(19) United States
(12) Patent Application Publication
(10) Pub. No.: US 2012/0227134 A1
(43) Pub. Date: Sep. 6, 2012

(54) Plants with Increased Yield

(75) Inventors: Hardy Schön, Berlin (DE); Oliver Thimm, Neustadt (DE); Gerhard Ritte, Potsdam (DE); Oliver Bläsing, Potsdam (DE); Stefan Henkes, Potsdam (DE); Koen Bruynseels, Wichelen (BE); Yves Hatzfeld, Lille (FR); Valerie Frankard, Waterloo (BE); Ana Isabel Sanz Molinero, Madrid (ES); Christophe Reuzeau, Gent (BE); Steven Vandenabeele, Oudenaarde (BE); Bryan McKersie, Raleigh, NC (US); Krishna Kolliparra, Durham, NC (US); Christian Dammann, Durham, NC (US)

(73) Assignee: BASF PLANT SCIENCE COMPANY GMBH, LUDWIGSHAFEN (DE)

(21) Appl. No.: 13/510,220

(22) PCT Filed: Nov. 5, 2010
(86) PCT No.: PCT/IB10/55028

§ 371 Date: May 16, 2012

Related U.S. Application Data
(60) Provisional application No. 61/262,152, filed on Nov. 18, 2009.
(60) Provisional application No. 61/316,415, filed on Mar. 23, 2010.
(60) Provisional application No. 61/366,561, filed on Jul. 22, 2010.

(30) Foreign Application Priority Data
Nov. 17, 2009 (EP) 09176253.4
Mar. 23, 2010 (EP) 10157353.3
Jul. 22, 2010 (EP) 10170505.1

(51) Int. Cl. A01H 5/00; C12P 21/00; C12N 5/10; C12Q 1/48; C12Q 1/42; C12Q 1/26; A01H 1/06; C12Q 1/68; C12N 15/52; C12N 15/29; C07K 14/415; C07K 16/16; A01H 5/10; G01N 33/566; A01N 25/00; A01N 43/00; A01N 37/00; C12N 15/82

(52) U.S. Cl. 800/278; 435/320.1; 435/69.1; 435/419; 435/317.1; 435/412; 435/411; 435/414; 435/415; 435/416; 435/417; 435/15; 435/21; 435/25; 435/6.11; 536/23.2; 536/23.6; 530/370; 530/389.8; 800/298; 800/320.1; 800/320.3; 800/320; 800/320.2; 800/312; 800/314; 800/306; 800/317.1; 800/322; 800/317.2; 800/317.3; 800/317; 800/317.4; 435/7.2; 504/116.1; 504/209; 504/313

(57) ABSTRACT

A method for producing a plant with increased yield as compared to a corresponding wild type plant whereby the method comprises at least the following step: increasing or generating in a plant or a part thereof one or more activities of a polypeptide selected from the group consisting of 2-oxoglutarate-dependent dioxygenase, 3-ketoacyl-CoA thiolase, 3′-phosphoadenosine 5′-phosphate phosphatase, 4-diphosphocytidyl-2-C-methyl-D-erythritol kinase, 5OS chloroplast ribosomal protein L21, 57972199. R01.1-protein, 60952769. R01.1-protein, 60S ribosomal protein, ABC transporter family protein, AP2 domain-containing transcription factor, argonaute protein, AT1 G29250.1-protein, AT1 G53885-protein, AT2G35300-protein, AT3G04620-protein, AT4G01870-protein, AT5G42380-protein, AT5G47440-protein, CDS5394-protein, CDS5401_TRUNCATED-protein, cold response protein, cullin, Cytochrome P450, delta-8 sphingolipid desaturase, galactinol synthase, glutathione-S-transferase, GTPase, haspin-related protein, heat shock protein, heat shock transcription factor, histone H2B, jasmonate-zim-domain protein, mitochondrial asparaginyl-tRNA synthetase, Oligosaccharyltransferase, OS02G44730-protein, Oxygen-evolving enhancer protein, peptidyl-prolyl cis-trans isomerase, peptidyl-prolyl cis-trans isomerase family protein, plastid lipid-associated protein, Polypyrimidine tract binding protein, PRLI-interacting factor, protein kinase, protein kinase family protein, rubisco subunit binding-protein beta subunit, serine acetyltransferase, serine hydroxymethyltransferase, small heat shock protein, S-ribosylhomocysteinase, sugar transporter, Thioredoxin H-type, ubiquitin-conjugating enzyme, ubiquitin-protein ligase, universal stress protein family protein, and Vacuolar protein.

[0001] The invention disclosed herein provides a method for producing a plant with increased yield as compared to a corresponding wild type plant comprising increasing or generating one or more activities in a plant or a part thereof. The present invention further relates to nucleic acids enhancing or improving one or more traits of a transgenic plant, and cells, progenies, seeds and pollen derived from such plants or parts, as well as methods of making and methods of using such plant cell(s) or plant(s), progenies, seed(s) or pollen. Particularly, said improved trait(s) are manifested in an increased yield, preferably by improving one or more yield-related trait(s).

### BACKGROUND OF THE INVENTION

[0002] Under field conditions, plant performance, for example in terms of growth, development, biomass accumulation and seed generation, depends on a plant's tolerance and acclimation ability to numerous environmental conditions, changes and stresses. Since the beginning of agriculture and horticulture, there was a need for improving plant traits in crop cultivation. Breeding strategies foster crop properties to withstand biotic and abiotic stresses, to improve nutrient use efficiency and to alter other intrinsic crop specific yield parameters, i.e. increasing yield by applying technical advances. Plants are sessile organisms and consequently need to cope with various environmental stresses. Biotic stresses such as plant pests and pathogens on the one hand, and abiotic environmental stresses on the other hand are major limiting factors for plant growth and productivity, thereby limiting plant cultivation and geographical distribution. Plants exposed to different stresses typically have low yields of plant material, like seeds, fruit or other produces. Crop losses and crop yield losses caused by abiotic and biotic stresses represent a significant economic and political factor and contribute to food shortages, particularly in many underdeveloped countries.

[0003] Conventional means for crop and horticultural improvements today utilize selective breeding techniques to identify plants with desirable characteristics. Advances in molecular biology have allowed modifying the germplasm of plants in a specific way. For example, the modification of a single gene, resulted in several cases in a significant increase in e.g. stress tolerance as well as other yield-related traits.

[0004] Agricultural biotechnology has attempted to meet humanity's growing needs through genetic modifications of plants that could increase crop yield, for example, by conferring better tolerance to abiotic stress responses or by increasing biomass.

[0005] Agricultural biotechnologists use measurements of other parameters that indicate the potential impact of a transgene on crop yield. For forage crops like alfalfa, silage corn, and hay, the plant biomass correlates with the total yield. For grain crops, however, other parameters have been used to estimate yield, such as plant size, as measured by total plant dry weight, above-ground dry weight, above-ground fresh weight, leaf area, stem volume, plant height, rosette diameter, leaf length, root length, root mass, tiller number, and leaf number. Plant size at an early developmental stage will typically correlate with plant size later in development. A larger plant with a greater leaf area can typically absorb more light and carbon dioxide than a smaller plant and therefore will likely gain a greater weight during the same period. There is a strong genetic component to plant size and growth rate, and so for a range of diverse genotypes plant size under one environmental condition is likely to correlate with size under another. In this way a standard environment is used to approximate the diverse and dynamic environments encountered at different locations and times by crops in the field.

[0006] Plants that exhibit tolerance of one abiotic stress often exhibit tolerance of another environmental stress. This phenomenon of cross-tolerance is not understood at a mechanistic level. Nonetheless, it is reasonable to expect that plants exhibiting enhanced tolerance to low temperature, e.g. chilling temperatures and/or freezing temperatures, due to the expression of a transgene may also exhibit tolerance to drought and/or salt and/or other abiotic stresses.

[0007] Some genes that are involved in stress responses, water use, and/or biomass in plants have been characterized, but to date, success at developing transgenic crop plants with improved yield has been limited, and no such plants have been commercialized.

[0008] Consequently, there is a need to identify genes which confer resistance to various combinations of stresses or which confer improved yield under optimal and/or suboptimal growth conditions.

[0009] Accordingly, in one embodiment, the present invention provides a method for producing a plant having an increased yield as compared to a corresponding wild type plant whereby the method comprises at least the following step: increasing or generating in a plant one or more activities of a polypeptide selected from the group consisting of 2-oxoglutarate-dependent dioxygenase, 3-ketoacyl-CoA thiolase, 3′-phosphoadenosine 5′-phosphate phosphatase, 4-diphosphocytidyl-2-C-methyl-D-erythritol kinase, 50S chloroplast ribosomal protein L21, 57972199.R01.1-protein, 60952769.R01.1-protein, 60S ribosomal protein, ABC transporter family protein, AP2 domain-containing transcription factor, argonaute protein, AT1G29250.1-protein, AT1G53885-protein, AT2G35300-protein, AT3G04620-protein, AT4G01870-protein, AT5G42380-protein, AT5G47440-protein, CDS5394-protein, CDS5401_TRUNCATED-protein, cold response protein, cullin, Cytochrome P450, delta-8 sphingolipid desaturase, galactinol synthase, glutathione-S-transferase, GTPase, haspin-related protein, heat shock protein, heat shock transcription factor, histone H2B, jasmonate-zim-domain protein, mitochondrial asparaginyl-tRNA synthetase, Oligosaccharyltransferase, OS02G44730-protein, Oxygen-evolving enhancer protein, peptidyl-prolyl cis-trans isomerase, peptidyl-prolyl cis-trans isomerase family protein, plastid lipid-associated protein, Polypyrimidine tract binding protein, PRLI-interacting factor, protein kinase, protein kinase family protein, rubisco subunit binding-protein beta subunit, serine acetyltransferase, serine hydroxymethyltransferase, small heat shock protein, S-ribosylhomocysteinase, sugar transporter, Thioredoxin H-type, ubiquitin-conjugating enzyme, ubiquitin-protein ligase, universal stress protein family protein, and Vacuolar protein in the sub-cellular compartment and tissue indicated herein below.

[0010] Accordingly, the invention provides a transgenic plant that over-expresses an isolated polynucleotide as identified in Table I, or a homolog thereof, in the sub-cellular compartment and tissue as indicated herein. The transgenic plant of the invention demonstrates an improved or increased harvestable yield as compared to a wild type variety of the plant.

[0011] Accordingly, the invention provides a method for producing a plant with increased yield as compared to a corresponding wild type plant comprising at least one of the steps selected from the group consisting of: (i) increasing or generating the activity of a polypeptide comprising at least one polypeptide motif or consensus sequence as depicted in column 5 or 7 of Table II or of Table IV, respectively; or (ii) increasing or generating the activity of an expression product of one or more isolated polynucleotide(s) comprising one or more polynucleotide(s) as depicted in column 5 or 7 of Table I.

[0012] The invention further provides a method for increasing yield of a crop plant, the method comprising the following steps: (i) increasing or generating of the expression of at least one polynucleotide; and/or (ii) increasing or generating the expression of an expression product encoded by at least one polynucleotide; and/or (iii) increasing or generating one or more activities of an expression product encoded by at least one polynucleotide, wherein the polynucleotide is selected from the group consisting of:
[0013] (a) an isolated polynucleotide encoding the polypeptide shown in column 5 or 7 of table II;
[0014] (b) an isolated polynucleotide shown in column 5 or 7 of table I;
[0015] (c) an isolated polynucleotide, which, as a result of the degeneracy of the genetic code, can be derived from a polypeptide sequence depicted in column 5 or 7 of table II and confers an increased yield as compared to a corresponding, e.g. non-transformed, wild type plant cell, a transgenic plant or a part thereof;
[0016] (d) an isolated polynucleotide having 30 or more, for example 50%, 60%, 70%, 80%, 85%, 90%, 95%, 97%, 98%, or 99% (percent) or more identity with the sequence of a polynucleotide shown in column 5 or 7 of table I and conferring an increased yield as compared to a corresponding, e.g. non-transformed, wild type plant cell, a transgenic plant or a part thereof;
[0017] (e) an isolated polynucleotide encoding a polypeptide having 30 or more, for example 50%, 60%, 70%, 80%, 85%, 90%, 95%, 97%, 98%, or 99% or more identity with the amino acid sequence of the polypeptide encoded by the isolated polynucleotide of (a) to (c) and having the activity represented by a polynucleotide as depicted in column 5 of table I and conferring an increased yield as compared to a corresponding, e.g. non-transformed, wild type plant cell, a transgenic plant or a part thereof;
[0018] (f) an isolated polynucleotide which hybridizes with an isolated polynucleotide of (a) to (c) under stringent hybridization conditions and confers an increased yield as compared to a corresponding, e.g. non-transformed, wild type plant cell, a transgenic plant or a part thereof;
[0019] (g) an isolated polynucleotide encoding a polypeptide which can be isolated with the aid of monoclonal or polyclonal antibodies made against a polypeptide encoded by one of the isolated polynucleotides of (a) to (e) and which has the activity represented by the polynucleotide as depicted in column 5 of table I;
[0020] (h) an isolated polynucleotide encoding a polypeptide comprising the consensus sequence or one or more polypeptide motifs as shown in column 7 of table IV and preferably having the activity represented by a polynucleotide as depicted in column 5 of table II or IV;
[0021] (i) an isolated polynucleotide encoding a polypeptide having the activity represented by a protein as depicted in column 5 of table II and conferring increased yield as compared to a corresponding, e.g. non-transformed, wild type plant cell, a transgenic plant or a part thereof;
[0022] (j) an isolated polynucleotide which is obtained by amplifying a cDNA library or a genomic library using primers derived from the polynucleotides sequences in Tables 1 or 2 and having the activity represented by a polynucleotide as depicted in column 5 of table II or IV; and
[0023] (k) an isolated polynucleotide which is obtainable by screening a suitable nucleic acid library under stringent hybridization conditions with a probe comprising a complementary sequence of a isolated polynucleotide of (a) or (b) or with a fragment thereof, having 15 nt or more, preferably 20 nt, 30 nt, 50 nt, 100 nt, 200 nt, or 500 nt, 1000 nt, 1500 nt, 2000 nt or 3000 nt or more of a polynucleotide complementary to a polynucleotide sequence characterized in (a) to (e) and encoding a polypeptide having the activity represented by a protein comprising a polypeptide as depicted in column 5 of table II.

[0024] Furthermore, the invention relates to a method for producing a transgenic plant with increased yield as compared to a corresponding, e.g. non-transformed, wild type plant, comprising transforming a plant cell or a plant cell nucleus or a plant tissue to produce such a plant, with an isolated polynucleotide selected from the group consisting of:
[0025] (a) an isolated polynucleotide encoding the polypeptide shown in column 5 or 7 of table II;
[0026] (b) an isolated polynucleotide shown in column 5 or 7 of table I;
[0027] (c) an isolated polynucleotide, which, as a result of the degeneracy of the genetic code, can be derived from a polypeptide sequence depicted in column 5 or 7 of table II and confers an increased yield as compared to a corresponding, e.g. non-transformed, wild type plant cell, a transgenic plant or a part thereof;
[0028] (d) an isolated polynucleotide having 30% or more, for example 50%, 60%, 70%, 80%, 85%, 90%, 95%, 97%, 98%, or 99% or more identity with a polynucleotide shown in column 5 or 7 of table I and confers an increased yield as compared to a corresponding, e.g. non-transformed, wild type plant cell, a transgenic plant or a part thereof;
[0029] (e) an isolated polynucleotide encoding a polypeptide having 30% or more, for example 50%, 60%, 70%, 80%, 85%, 90%, 95%, 97%, 98%, or 99% or more identity with the amino acid sequence of the polypeptide encoded by the isolated polynucleotide of (a) to (c) and having the activity represented by a polynucleotide as depicted in column 5 of table I and confers an increased yield as compared to a corresponding, e.g. non-transformed, wild type plant cell, a transgenic plant or a part thereof;
[0030] (f) an isolated polynucleotide which hybridizes with a isolated polynucleotide of (a) to (c) under stringent hybridization conditions and confers an increased yield as compared to a corresponding, e.g. non-transformed, wild type plant cell, a transgenic plant or a part thereof;
[0031] (g) an isolated polynucleotide encoding a polypeptide which can be isolated with the aid of monoclonal or polyclonal antibodies made against a polypeptide encoded by one of the isolated polynucleotides of (a) to (e) and having the activity represented by a polynucleotide as depicted in column 5 of table I;
[0032] (h) an isolated polynucleotide encoding a polypeptide comprising the consensus sequence or one or more polypeptide motifs as shown in column 7 of table IV and preferably having the activity represented by a polynucleotide as depicted in column 5 of table II or IV;
[0033] (i) an isolated polynucleotide encoding a polypeptide having the activity represented by a protein as depicted in column 5 of table II and conferring increased yield as compared to a corresponding, e.g. non-transformed, wild type plant cell, a transgenic plant or a part thereof;
[0034] (j) an isolated polynucleotide which is obtained by amplifying a cDNA library or a genomic library using primers derived from the polynucleotide sequences in Tables 1 and 2 and having the activity represented by a polynucleotide as depicted in column 5 of table II or IV; and
[0035] (k) an isolated polynucleotide which is obtainable by screening a suitable nucleic acid library under stringent hybridization conditions with a probe comprising a complementary sequence of an isolated polynucleotide of (a) or (b) or with a fragment thereof, having at least 20, 30, 50, 100, 200, 300, 500 or 1000 or more nt of a polynucleotide complementary to a polynucleotide sequence characterized in (a) to (e) and encoding a polypeptide having the activity represented by a protein comprising a polypeptide as depicted in column 5 of table II,
   and regenerating a transgenic plant from that transformed plant cell nucleus, plant cell or plant tissue with increased yield.

### DETAILED DESCRIPTION OF THE PREFERRED EMBODIMENTS

[0036] A number of yield-related phenotypes are associated with yield of plants. In accordance with the invention, therefore, the genes identified in Table 1, or homologs thereof, may be employed to enhance any yield-related phenotype. Increased yield may be determined in field trials of transgenic plants and suitable control plants. Alternatively, a transgene's ability to increase yield may be determined in a model plant. An increased yield phenotype may be determined in the field test or in a model plant by measuring any one or any combination of the following phenotypes, in comparison to a control plant: yield of dry harvestable parts of the plant, yield of dry aerial harvestable parts of the plant, yield of underground dry harvestable parts of the plant, yield of fresh weight harvestable parts of the plant, yield of aerial fresh weight harvestable parts of the plant yield of underground fresh weight harvestable parts of the plant, yield of the plant's fruit (both fresh and dried), grain dry weight, yield of seeds (both fresh and dry), and the like.

[0037] The most basic yield-related phenotype is increased yield associated with the presence of the gene or a homolog thereof as a transgene in the plant, i.e., the intrinsic yield of the plant. Intrinsic yield capacity of a plant can be, for example, manifested in a field test or in a model system by demonstrating an improvement of seed yield (e.g. in terms of increased seed/grain size, increased ear number, increased seed number per ear, improvement of seed filling, improvement of seed composition, embryo and/or endosperm improvements, and the like); modification and improvement of inherent growth and development mechanisms of a plant (such as plant height, plant growth rate, pod number, pod position on the plant, number of internodes, incidence of pod shatter, efficiency of nodulation and nitrogen fixation, efficiency of carbon assimilation, improvement of seedling vigour/early vigour, enhanced efficiency of germination (under non-stressed conditions), improvement in plant architecture,

[0038] Increased yield-related phenotypes may also be measured to determine tolerance to abiotic environmental stress. Abiotic stresses include drought, low temperature, salinity, osmotic stress, shade, high plant density, mechanical stresses, and oxidative stress, and yield-related phenotypes are encompassed by tolerance to such abiotic stresses. Additional phenotypes that can be monitored to determine enhanced tolerance to abiotic environmental stress include, without limitation, wilting; leaf browning; loss of turgor, which results in drooping of leaves or needles stems, and flowers; drooping and/or shedding of leaves or needles; the leaves are green but leaf angled slightly toward the ground compared with controls; leaf blades begun to fold (curl) inward; premature senescence of leaves or needles; loss of chlorophyll in leaves or needles and/or yellowing. Any of the yield-related phenotypes described above may be monitored in field tests or in model plants to demonstrate that a transgenic plant has increased tolerance to abiotic environmental stress. In accordance with the invention, the genes identified in Table 1, or homologs thereof, may be employed to enhance tolerance to abiotic environmental stress in a plant means that the plant, when confronted with abiotic environmental stress.

### DEFINITION COLLECTION

[0039] An “yield-increasing activity” according to the invention refers to an activity selected from the group consisting of 2-oxoglutarate-dependent dioxygenase, 3-ketoacyl-CoA thiolase, 3′-phosphoadenosine 5′-phosphate phosphatase, 4-diphosphocytidyl-2-C-methyl-D-erythritol kinase, 50S chloroplast ribosomal protein L21, 57972199.R01.1-protein, 60952769.R01.1-protein, 60S ribosomal protein, ABC transporter family protein, AP2 domain-containing transcription factor, argonaute protein, AT1G29250.1-protein, AT1G53885-protein, AT2G35300-protein, AT3G04620-protein, AT4G01870-protein, AT5G42380-protein, AT5G47440-protein, CDS5394-protein, CDS5401_TRUNCATED-protein, cold response protein, cullin, Cytochrome P450, delta-8 sphingolipid desaturase, galactinol synthase, glutathione-S-transferase, GTPase, haspin-related protein, heat shock protein, heat shock transcription factor, histone H2B, jasmonate-zim-domain protein, mitochondrial asparaginyl-tRNA synthetase, Oligosaccharyltransferase, OS02G44730-protein, Oxygen-evolving enhancer protein, peptidyl-prolyl cis-trans isomerase, peptidyl-prolyl cis-trans isomerase family protein, plastid lipid-associated protein, Polypyrimidine tract binding protein, PRLI-interacting factor, protein kinase, protein kinase family protein, rubisco subunit binding-protein beta subunit, serine acetyltransferase, serine hydroxymethyltransferase, small heat shock protein, S-ribosylhomocysteinase, sugar transporter, Thioredoxin H-type, ubiquitin-conjugating enzyme, ubiquitin-protein ligase, universal stress protein family protein, and Vacuolar protein. A polypeptide conferring a yield-increasing activity can be encoded by a nucleic acid sequence as shown in table I, column 5 or 7, and/or comprises or consists of a polypeptide as depicted in table II, column 5 and 7, and/or can be amplified with the primer set shown in table III, column 7.

[0040] A “transgenic plant”, as used herein, refers to a plant which contains a foreign nucleotide sequence inserted into either its nuclear genome or organelle genome. It encompasses further the offspring generations i.e. the T1-, T2- and consecutively generations or BC1-, BC2- and consecutively generation as well as crossbreeds thereof with non-transgenic or other transgenic plants.

[0041] “Improved adaptation” to environmental stress like e.g. drought, heat, nutrient depletion, freezing and/or chilling temperatures refers herein to an improved plant performance resulting in an increased yield, particularly with regard to one or more of the yield related traits as defined in more detail above.

[0042] A modification, i.e. an increase, can be caused by endogenous or exogenous factors. For example, an increase in activity in an organism or a part thereof can be caused by adding a gene product or a precursor or an activator or an agonist to the media or nutrition or can be caused by introducing said subjects into a organism, transient or stable. Furthermore such an increase can be reached by the introduction of the inventive nucleic acid sequence or the encoded protein in the correct cell compartment for example into the nucleus or cytoplasmic respectively or into plastids either by transformation and/or targeting.

[0043] For the purposes of the description of the present invention, the terms “cytoplasmic” and “non-targeted” shall indicate, that the nucleic acid of the invention is expressed without the addition of a non-natural transit peptide encoding sequence. A non-natural transit peptide encoding sequence is a sequence which is not a natural part of a nucleic acid of the invention, e.g. of the nucleic acids depicted in table I column 5 or 7, but is rather added by molecular manipulation steps as for example described in the example under “plastid targeted expression”. Therefore the terms “cytoplasmic” and “non-targeted” shall not exclude a targeted localization to any cell compartment for the products of the inventive nucleic acid sequences by their naturally occurring sequence properties within the background of the transgenic organism. The sub-cellular location of the mature polypeptide derived from the enclosed sequences can be predicted by a skilled person for the organism (plant) by using software tools like TargetP (Emanuelsson et al., (2000), Predicting subcellular localization of proteins based on their N-terminal amino acid sequence., J. Mol. Biol. 300, 1005-1016.), ChloroP (Emanuelsson et al. (1999), ChloroP, a neural network-based method for predicting chloroplast transit peptides and their cleavage sites., Protein Science, 8: 978-984.) or other predictive software tools (Emanuelsson et al. (2007), Locating proteins in the cell using TargetP, SignalP, and related tools., Nature Protocols 2, 953-971).

[0044] The term “organelle” according to the invention shall mean for example “mitochondria” or “plastid”. The term “plastid” according to the invention are intended to include various forms of plastids including proplastids, chloroplasts, chromoplasts, gerontoplasts, leucoplasts, amyloplasts, elaioplasts and etioplasts, preferably chloroplasts. They all have as a common ancestor the aforementioned proplasts.

[0045] The term “introduced” in the context of this specification shall mean the insertion of a nucleic acid sequence into the organism by means of a “transfection”, “transduction” or preferably by “transformation”.

[0046] A plastid, such as a chloroplast, has been “transformed” by an exogenous (preferably foreign) nucleic acid sequence if nucleic acid sequence has been introduced into the plastid that means that this sequence has crossed the membrane or the membranes of the plastid. The foreign DNA may be integrated (covalently linked) into plastid DNA making up the genome of the plastid, or it may remain not integrated (e.g., by including a chloroplast origin of replication). “Stably” integrated DNA sequences are those, which are inherited through plastid replication, thereby transferring new plastids, with the features of the integrated DNA sequence to the progeny.

[0047] As used herein, “plant” is meant to include not only a whole plant but also a part thereof i.e., one or more cells, and tissues, including for example, leaves, stems, shoots, roots, flowers, fruits and seeds.

[0048] The term “yield” as used herein generally refers to a measurable produce from a plant, particularly a crop. Yield and yield increase (in comparison to a non-transformed starting or wild-type plant) can be measured in a number of ways, and it is understood that a skilled person will be able to apply the correct meaning in view of the particular embodiments, the particular crop concerned and the specific purpose or application concerned. The terms “improved yield” or “increased yield” can be used interchangeable.

[0049] As used herein, the term “improved yield” or the term “increased yield” means any improvement in the yield of any measured plant product, such as grain, fruit or fiber. In accordance with the invention, changes in different phenotypic traits may improve yield. For example, and without limitation, parameters such as floral organ development, root initiation, root biomass, seed number, seed weight, harvest index, tolerance to abiotic environmental stress, leaf formation, phototropism, apical dominance, and fruit development, are suitable measurements of improved yield. Increased yield includes higher fruit yields, higher seed yields, higher fresh matter production, and/or higher dry matter production.

[0050] Any increase in yield is an improved yield in accordance with the invention. For example, the improvement in yield can comprise a 0.1%, 0.5%, 1%, 3%, 5%, 10%, 15%, 20%, 30%, 40%, 50%, 60%, 70%, 80%, 90% or greater increase in any measured parameter. For example, an increase in the bu/acre yield of soybeans or corn derived from a crop comprising plants which are transgenic for the nucleotides and polypeptides of Table I, as compared with the bu/acre yield from untreated soybeans or corn cultivated under the same conditions, is an improved yield in accordance with the invention. The increased or improved yield can be achieved in the absence or presence of stress conditions.

[0051] For example, enhanced or increased “yield” refers to one or more yield parameters selected from the group consisting of biomass yield, dry biomass yield, aerial dry biomass yield, underground dry biomass yield, fresh-weight biomass yield, aerial fresh-weight biomass yield, underground fresh-weight biomass yield; enhanced yield of harvestable parts, either dry or fresh-weight or both, either aerial or underground or both; enhanced yield of crop fruit, either dry or fresh-weight or both, either aerial or underground or both; and preferably enhanced yield of seeds, either dry or fresh-weight or both, either aerial or underground or both.

[0052] “Crop yield” is defined herein as the number of bushels of relevant agricultural product (such as grain, forage, or seed) harvested per acre. Crop yield is impacted by abiotic stresses, such as drought, heat, salinity, and cold stress, and by the size (biomass) of the plant.

[0053] The yield of a plant can depend on the specific plant/crop of interest as well as its intended application (such as food production, feed production, processed food production, bio-fuel, biogas or alcohol production, or the like) of interest in each particular case. Thus, in one embodiment, yield can be calculated as harvest index (expressed as a ratio of the weight of the respective harvestable parts divided by the total biomass), harvestable parts weight per area (acre, square meter, or the like); and the like. The harvest index is the ratio of yield biomass to the total cumulative biomass at harvest. Harvest index is relatively stable under many environmental conditions, and so a robust correlation between plant size and grain yield is possible. As with abiotic stress tolerance, measurements of plant size in early development, under standardized conditions in a growth chamber or greenhouse, are standard practices to measure potential yield advantages conferred by the presence of a transgene.

[0054] Accordingly, the yield of a plant can be increased by improving one or more of the yield-related phenotypes or traits.

[0055] Such yield-related phenotypes or traits of a plant the improvement of which results in increased yield comprise, without limitation, the increase of the intrinsic yield capacity of a plant, improved nutrient use efficiency, and/or increased stress tolerance.

[0056] For example, yield refers to biomass yield, e.g. to dry weight biomass yield and/or fresh-weight biomass yield. Biomass yield refers to the aerial or underground parts of a plant, depending on the specific circumstances (test conditions, specific crop of interest, application of interest, and the like). In one embodiment, biomass yield refers to the aerial and underground parts. Biomass yield may be calculated as fresh-weight, dry weight or a moisture adjusted basis. Biomass yield may be calculated on a per plant basis or in relation to a specific area (e.g. biomass yield per acre/square meter/or the like).

[0057] “Yield” can also refer to seed yield which can be measured by one or more of the following parameters: number of seeds or number of filled seeds (per plant or per area (acre/square meter/or the like)); seed filling rate (ratio between number of filled seeds and total number of seeds); number of flowers per plant; seed biomass or total seeds weight (per plant or per area (acre/square meter/or the like); thousand kernel weight (TKW; extrapolated from the number of filled seeds counted and their total weight; an increase in TKW may be caused by an increased seed size, an increased seed weight, an increased embryo size, and/or an increased endosperm). Other parameters allowing to measure seed yield are also known in the art. Seed yield may be determined on a dry weight or on a fresh weight basis, or typically on a moisture adjusted basis, e.g. at 15.5 percent moisture.

[0058] For example, the term “increased yield” means that the a plant, exhibits an increased growth rate, e.g. in the absence or presence of abiotic environmental stress, compared to the corresponding wild-type plant.

[0059] An increased growth rate may be reflected inter alia by or confers an increased biomass production of the whole plant, or an increased biomass production of the aerial parts of a plant, or by an increased biomass production of the underground parts of a plant, or by an increased biomass production of parts of a plant, like stems, leaves, blossoms, fruits, and/or seeds.

[0060] A prolonged growth comprises survival and/or continued growth of the plant, at the moment when the non-transformed wild type organism shows visual symptoms of deficiency and/or death.

[0061] When the plant of the invention is a corn plant, increased yield for corn plants means, for example, increased seed yield, in particular for corn varieties used for feed or food. Increased seed yield of corn refers to an increased kernel size or weight, an increased kernel per ear, or increased ears per plant. Alternatively or in addition the cob yield may be increased, or the length or size of the cob is increased, or the kernel per cob ratio is improved.

[0062] When the plant of the invention is a soy plant, increased yield for soy plants means increased seed yield, in particular for soy varieties used for feed or food. Increased seed yield of soy refers for example to an increased kernel size or weight, an increased kernel per pod, or increased pods per plant.

[0063] When the plant of the invention is an oil seed rape (OSR) plant, increased yield for OSR plants means increased seed yield, in particular for OSR varieties used for feed or food. Increased seed yield of OSR refers to an increased seed size or weight, an increased seed number per silique, or increased siliques per plant.

[0064] When the plant of the invention is a cotton plant. Increased yield for cotton plants means increased lint yield. Increased lint yield of cotton refers in one embodiment to an increased length of lint.

[0065] Said increased yield can typically be achieved by enhancing or improving, one or more yield-related traits of the plant. Such yield-related traits of a plant comprise, without limitation, the increase of the intrinsic yield capacity of a plant, improved nutrient use efficiency, and/or increased stress tolerance, in particular increased abiotic stress tolerance.

[0066] Intrinsic yield capacity of a plant can be, for example, manifested by improving the specific (intrinsic) seed yield (e.g. in terms of increased seed/grain size, increased ear number, increased seed number per ear, improvement of seed filling, improvement of seed composition, embryo and/or endosperm improvements, or the like); modification and improvement of inherent growth and development mechanisms of a plant (such as plant height, plant growth rate, pod number, pod position on the plant, number of internodes, incidence of pod shatter, efficiency of nodulation and nitrogen fixation, efficiency of carbon assimilation, improvement of seedling vigour/early vigour, enhanced efficiency of germination (under stressed or non-stressed conditions), improvement in plant architecture, cell cycle modifications, photosynthesis modifications, various signaling pathway modifications, modification of transcriptional regulation, modification of translational regulation, modification of enzyme activities, and the like); and/or the like.

[0067] The improvement or increase of stress tolerance of a plant can for example be manifested by improving or increasing a plant's tolerance against stress, particularly abiotic stress. In the present application, abiotic stress refers generally to abiotic environmental conditions a plant is typically confronted with, including, but not limited to, drought (tolerance to drought may be achieved as a result of improved water use efficiency), heat, low temperatures and cold conditions (such as freezing and chilling conditions), salinity, osmotic stress, shade, high plant density, mechanical stress, oxidative stress, and the like.

[0068] The increased plant yield can also be mediated by increasing the “nutrient use efficiency of a plant”, e.g. by improving the use efficiency of nutrients including, but not limited to, phosphorus, potassium, and nitrogen. Further, higher yields may be obtained with current or standard levels of nitrogen use

[0069] Generally, the term “increased tolerance to stress” can be defined as survival of plants, and/or higher yield production, under stress conditions as compared to a non-transformed wild type or starting plant: For example, the plant of the invention or produced according to the method of the invention is better adapted to the stress conditions. “

[0070] During its life-cycle, a plant is generally confronted with a diversity of environmental conditions. Any such conditions, which may, under certain circumstances, have an impact on plant yield, are herein referred to as “stress” condition. Environmental stresses may generally be divided into biotic and abiotic (environmental) stresses. Unfavorable nutrient conditions are sometimes also referred to as “environmental stress”. The present invention does also contemplate solutions for this kind of environmental stress, e.g. referring to increased nutrient use efficiency.

[0071] For the purposes of the description of the present invention, the terms “enhanced tolerance to abiotic stress”, “enhanced resistance to abiotic environmental stress”, “enhanced tolerance to environmental stress”, “improved adaptation to environmental stress” and other variations and expressions similar in its meaning are used interchangeably and refer, without limitation, to an improvement in tolerance to one or more abiotic environmental stress(es) as described herein and as compared to a corresponding origin or wild type plant or a part thereof.

[0072] The term abiotic stress tolerance(s) refers for example low temperature tolerance, drought tolerance or improved water use efficiency (WUE), heat tolerance, salt stress tolerance and others. Studies of a plant's response to desiccation, osmotic shock, and temperature extremes are also employed to determine the plant's tolerance or resistance to abiotic stresses. Water use efficiency (WUE) is a parameter often correlated with drought tolerance. In selecting traits for improving crops, a decrease in water use, without a change in growth would have particular merit in an irrigated agricultural system where the water input costs were high. An increase in growth without a corresponding jump in water use would have applicability to all agricultural systems. In many agricultural systems where water supply is not limiting, an increase in growth, even if it came at the expense of an increase in water use also increases yield.

[0073] Drought stress means any environmental stress which leads to a lack of water in plants or reduction of water supply to plants, including a secondary stress by low temperature and/or salt, and/or a primary stress during drought or heat, e.g. desiccation etc.

[0074] Unless otherwise specified, the terms “polynucleotides”, “nucleic acid” and “nucleic acid molecule” are interchangeably in the present context. Unless otherwise specified, the terms “peptide”, “polypeptide” and “protein” are interchangeably in the present context. The term “sequence” may relate to polynucleotides, nucleic acids, nucleic acid molecules, peptides, polypeptides and proteins, depending on the context in which the term “sequence” is used. The terms “gene(s)”, “polynucleotide”, “nucleic acid sequence”, “nucleotide sequence”, or “nucleic acid molecule(s)” as used herein refers to a polymeric form of nucleotides of any length, either ribonucleotides or deoxyribonucleotides. The terms “gene(s)”, “polynucleotide”, “nucleic acid sequence”, “nucleotide sequence”, or “nucleic acid molecule(s)” as used herein include known types of modifications, for example, methylation, “caps”, substitutions of one or more of the naturally occurring nucleotides with an analogue. Preferably, the DNA or RNA sequence comprises a coding sequence encoding the herein defined polypeptide.

[0075] As also used herein, the terms “nucleic acid” and “nucleic acid molecule” are intended to include DNA molecules (e.g. cDNA or genomic DNA) and RNA molecules (e.g. mRNA) and analogs of the DNA or RNA generated using nucleotide analogs. The nucleic acid molecule can be single-stranded or double-stranded.

[0076] An “isolated” nucleic acid molecule is one that is substantially separated from other nucleic acid molecules, which are present in the natural source of the nucleic acid. That means other nucleic acid molecules are present in an amount less than 5% based on weight of the amount of the desired nucleic acid, preferably less than 2% by weight, more preferably less than 1% by weight, most preferably less than 0.5% by weight. Preferably, an “isolated” nucleic acid is free of some of the sequences that naturally flank the nucleic acid (i.e., sequences located at the 5′ and 3′ ends of the nucleic acid) in the genomic DNA of the organism from which the nucleic acid is derived. For example, in various embodiments, the isolated yield increasing, for example, low temperature resistance and/or tolerance related protein encoding nucleic acid molecule can contain less than about 5 kb, 4 kb, 3 kb, 2 kb, 1 kb, 0.5 kb or 0.1 kb of nucleotide sequences which naturally flank the nucleic acid molecule in genomic DNA of the cell from which the nucleic acid is derived. Moreover, an “isolated” nucleic acid molecule, such as a cDNA molecule, can be free from some of the other cellular material with which it is naturally associated, or culture medium when produced by recombinant techniques, or chemical precursors or other chemicals when chemically synthesized.

[0077] A “coding sequence” is a nucleotide sequence, which is transcribed into an RNA, e.g. a regulatory RNA, such as a miRNA, a ta-siRNA, co-suppression molecule, an RNAi, a ribozyme, etc. or into a mRNA which is translated into a polypeptide when placed under the control of appropriate regulatory sequences. The boundaries of the coding sequence are determined by a translation start codon at the 5′-terminus and a translation stop codon at the 3′-terminus. A coding sequence can include, but is not limited to mRNA, cDNA, recombinant nucleotide sequences or genomic DNA, while introns may be present as well under certain circumstances.

[0078] As used in the present context a nucleic acid molecule may also encompass the untranslated sequence located at the 3′ and at the 5′ end of the coding gene region, for example 2000, preferably less, e.g. 500, preferably 200, especially preferably 100, nucleotides of the sequence upstream of the 5′ end of the coding region and for example 300, preferably less, e.g. 100, preferably 50, especially preferably 20, nucleotides of the sequence downstream of the 3′ end of the coding gene region.

[0079] “Polypeptide” refers to a polymer of amino acid (amino acid sequence) and does not refer to a specific length of the molecule. Thus, peptides and oligopeptides are included within the definition of polypeptide. This term does also refer to or include post-translational modifications of the polypeptide, for example, glycosylations, acetylations, phosphorylations and the like. Included within the definition are, for example, polypeptides containing one or more analogs of an amino acid (including, for example, unnatural amino acids, etc.), polypeptides with substituted linkages, as well as other modifications known in the art, both naturally occurring and non-naturally occurring. An “isolated” polynucleotide or nucleic acid molecule is separated from other polynucleotides or nucleic acid molecules, which are present in the natural source of the nucleic acid molecule. An isolated nucleic acid molecule may be a chromosomal fragment of several kb, or preferably, a molecule only comprising the coding region of the gene. Accordingly, an isolated nucleic acid molecule of the invention may comprise chromosomal regions, which are adjacent 5′ and 3′ or further adjacent chromosomal regions, but preferably comprises no such sequences which naturally flank the nucleic acid molecule sequence in the genomic or chromosomal context in the organism from which the nucleic acid molecule originates (for example sequences which are adjacent to the regions encoding the 5′- and 3′-UTRs of the nucleic acid molecule). An “isolated” or “purified” polypeptide or biologically active portion thereof is free of some of the cellular material when produced by recombinant DNA techniques, or chemical precursors or other chemicals when chemically synthesized. The language “substantially free of cellular material” includes preparations of a protein in which the polypeptide is separated from some of the cellular components of the cells in which it is naturally or recombinantly produced.

[0080] The term “table I” or “table 1” used in this specification is to be taken to specify the content of table I A and table I B. The term “table II” used in this specification is to be taken to specify the content of table II A and table II B. The term “table I A” used in this specification is to be taken to specify the content of table I A. The term “table I B” used in this specification is to be taken to specify the content of table I B. The term “table II A” used in this specification is to be taken to specify the content of table II A. The term “table II B” used in this specification is to be taken to specify the content of table II B.

[0081] The terms “comprise” or “comprising” and grammatical variations thereof when used in this specification are to be taken to specify the presence of stated features, integers, steps or components or groups thereof, but not to preclude the presence or addition of one or more other features, integers, steps, components or groups thereof.

[0082] In accordance with the invention, a protein or polypeptide has the “activity of a protein as shown in table II, column 3” if its de novo activity, or its increased expression directly or indirectly leads to and confers increased yield, e.g. to an increased yield-related trait, for example enhanced tolerance to abiotic environmental stress, for example an increased drought tolerance and/or low temperature tolerance and/or an increased nutrient use efficiency, intrinsic yield and/or another increased yield-related trait as compared to a corresponding, e.g. non-transformed, wild type plant and the protein has the above mentioned activities of a protein as shown in table II, column 3.

[0083] Throughout the specification the activity or preferably the biological activity of such a protein or polypeptide or an nucleic acid molecule or sequence encoding such protein or polypeptide is identical or similar if it still has the biological or enzymatic activity of a protein as shown in table II, column 3, or which has 10% or more of the original enzymatic activity, preferably 20%, 30%, 40%, 50%, particularly preferably 60%, 70%, 80% most particularly preferably 90%, 95%, 98%, 99% or more in comparison to a protein as shown in table II, column 3 of S. cerevisiae or E. coli or Synechocystis sp. or A. thaliana.

[0084] In another embodiment the biological or enzymatic activity of a protein as shown in table II, column 3, has 100% or more of the original enzymatic activity, preferably 110%, 120%, 130%, 150%, particularly preferably 150%, 200%, 300% or more in comparison to a protein as shown in table II, column 3 of S. cerevisiae or E. coli or Synechocystis sp. or A. thaliana.

[0085] The terms “increased”, “raised”, “extended”, “enhanced”, “improved” or “amplified” relate to a corresponding change of a property in a plant, an organism, a part of an organism such as a tissue, seed, root, leave, flower etc. or in a cell and are interchangeable. Preferably, the overall activity in the volume is increased or enhanced in cases if the increase or enhancement is related to the increase or enhancement of an activity of a gene product, independent whether the amount of gene product or the specific activity of the gene product or both is increased or enhanced or whether the amount, stability or translation efficacy of the nucleic acid sequence or gene encoding for the gene product is increased or enhanced.

[0086] The terms “increase” relate to a corresponding change of a property an organism or in a part of a plant, an organism, such as a tissue, seed, root, leave, flower etc. or in a cell. Preferably, the overall activity in the volume is increased in cases the increase relates to the increase of an activity of a gene product, independent whether the amount of gene product or the specific activity of the gene product or both is increased or generated or whether the amount, stability or translation efficacy of the nucleic acid sequence or gene encoding for the gene product is increased. The terms “increase” include the change of said property in only parts of the subject of the present invention, for example, the modification can be found in compartment of a cell, like a organelle, or in a part of a plant, like tissue, seed, root, leave, flower etc. but is not detectable if the overall subject, i.e. complete cell or plant, is tested. Accordingly, the term “increase” means that the specific activity of an enzyme as well as the amount of a compound or metabolite, e.g. of a polypeptide, a nucleic acid molecule of the invention or an encoding mRNA or DNA, can be increased in a volume. The term “increase” includes, that a compound or an activity, especially an activity, is introduced into a cell, the cytoplasm or a sub-cellular compartment or organelle de novo or that the compound or the activity, especially an activity, has not been detected before, in other words it is “generated”. Accordingly, in the following, the term “increasing” also comprises the term “generating” or “stimulating”. The increased activity manifests itself in increased yield, e.g. an increased yield-related trait, for example enhanced tolerance to abiotic environmental stress, for example an increased drought tolerance and/or low temperature tolerance and/or an increased nutrient use efficiency, intrinsic yield and/or another increased yield-related trait as compared to a corresponding, e.g. non-transformed, wild type plant cell, plant or part thereof.

[0087] Under “change of a property” it is understood that the activity, expression level or amount of a gene product or the metabolite content is changed in a specific volume relative to a corresponding volume of a control, reference or wild type, including the de novo creation of the activity or expression.

[0088] “Amount of protein or mRNA” is understood as meaning the molecule number of polypeptides or mRNA molecules in an organism, especially a plant, a tissue, a cell or a cell compartment. “Increase” in the amount of a protein means the quantitative increase of the molecule number of said protein in an organism, especially a plant, a tissue, a cell or a cell compartment such as an organelle like a plastid or mitochondria or part thereof—for example by one of the methods described herein below—in comparison to a wild type, control or reference.

[0089] The increase in molecule number amounts preferably to 1′)/0 or more, preferably to 10% or more, more preferably to 30% or more, especially preferably to 50%, 70% or more, very especially preferably to 100%, most preferably to 500% or more. However, a de novo expression is also regarded as subject of the present invention.

[0090] The terms “wild type”, “control” or “reference” are exchangeable and can be a cell or a part of organisms such as an organelle like a chloroplast or a tissue, or an organism, in particular a plant, which was not modified or treated according to the herein described process according to the invention. Accordingly, the cell or a part of organisms such as an organelle like a chloroplast or a tissue, or an organism, in particular a plant used as wild type, control or reference corresponds to the cell, organism, plant or part thereof as much as possible and is in any other property but in the result of the process of the invention as identical to the subject matter of the invention as possible. Thus, the wild type, control or reference is treated identically or as identical as possible, saying that only conditions or properties might be different which do not influence the quality of the tested property.

[0091] Preferably, any comparison is carried out under analogous conditions. The term “analogous conditions” means that all conditions such as, for example, culture or growing conditions, soil, nutrient, water content of the soil, temperature, humidity or surrounding air or soil, assay conditions (such as buffer composition, temperature, substrates, pathogen strain, concentrations and the like) are kept identical between the experiments to be compared.

[0092] The “reference”, “control”, or “wild type” is preferably a subject, e.g. an organelle, a cell, a tissue, an organism, in particular a plant, which was not modified or treated according to the herein described process of the invention and is in any other property as similar to the subject matter of the invention as possible. The reference, control or wild type is in its genome, transcriptome, proteome or metabolome as similar as possible to the subject of the present invention. Preferably, the term “reference-” “control-” or “wild type-”-organelle, cell, -tissue or -organism, in particular plant, relates to an organelle, cell, tissue or organism, in particular plant, which is nearly genetically identical to the organelle, cell, tissue or organism, in particular plant, of the present invention or a part thereof preferably 90% or more, e.g. 95%, more preferred are 98%, even more preferred are 99.00%, in particular 99.10%, 99.30%, 99.50%, 99.70%, 99.90%, 99.99%, 99.999% or more. Most preferable the “reference”, “control”, or “wild type” is a subject, e.g. an organelle, a cell, a tissue, an organism, in particular a plant, which is genetically identical to the organism, in particular plant, cell, a tissue or organelle used according to the process of the invention except that the responsible or activity conferring nucleic acid molecules or the gene product encoded by them are amended, manipulated, exchanged or introduced according to the inventive process. In case, a control, reference or wild type differing from the subject of the present invention only by not being subject of the process of the invention can not be provided, a control, reference or wild type can be an organism in which the cause for the modulation of an activity conferring the enhanced tolerance to abiotic environmental stress and/or increased yield as compared to a corresponding, e.g. non-transformed, wild type plant cell, plant or part thereof or expression of the nucleic acid molecule of the invention as described herein has been switched back or off, e.g. by knocking out the expression of responsible gene product, e.g. by antisense or RNAi or miRNA inhibition, by inactivation of an activator or agonist, by activation of an inhibitor or antagonist, by inhibition through adding inhibitory antibodies, by adding active compounds as e.g. hormones, by introducing negative dominant mutants, etc. A gene production can for example be knocked out by introducing inactivating point mutations, which lead to an enzymatic activity inhibition or a destabilization or an inhibition of the ability to bind to cofactors etc. Accordingly, preferred reference subject is the starting subject of the present process of the invention. Preferably, the reference and the subject matter of the invention are compared after standardization and normalization, e.g. to the amount of total RNA, DNA, or protein or activity or expression of reference genes, like housekeeping genes, such as ubiquitin, actin or ribosomal proteins.

[0093] The term “expression” refers to the transcription and/or translation of a codogenic gene segment or gene. As a rule, the resulting product is an mRNA or a protein.

[0094] The increase or modulation according to this invention can be constitutive, e.g. due to a stable permanent transgenic expression or to a stable mutation in the corresponding endogenous gene encoding the nucleic acid molecule of the invention or to a modulation of the expression or of the behavior of a gene conferring the expression of the polypeptide of the invention, or transient, e.g. due to an transient transformation or temporary addition of a modulator such as a agonist or antagonist or inducible, e.g. after transformation with a inducible construct carrying the nucleic acid molecule of the invention under control of a inducible promoter and adding the inducer, e.g. tetracycline or as described herein below.

[0095] Less influence on the regulation of a gene or its gene product is understood as meaning a reduced regulation of the enzymatic activity leading to an increased specific or cellular activity of the gene or its product. An increase of the enzymatic activity is understood as meaning an enzymatic activity, which is increased by 10% or more, advantageously 20%, 30% or 40% or more, especially advantageously by 50%, 60% or 70% or more in comparison with the starting organism. This leads to increased yield, e.g. an increased yield-related trait, for example enhanced tolerance to abiotic environmental stress, for example an increased drought tolerance and/or low temperature tolerance and/or an increased nutrient use efficiency, intrinsic yield and/or another mentioned yield-related trait as compared to a corresponding, e.g. non-transformed, wild type plant or part thereof.

[0096] The increase in activity of the polypeptide amounts in a cell, a tissue, an organelle, an organ or an organism, preferably a plant, or a part thereof preferably to 5% or more, preferably to 20% or to 50%, especially preferably to 70%, 80%, 90% or more, very especially preferably are to 100%, 150% or 200%, most preferably are to 250% or more in comparison to the control, reference or wild type. In one embodiment the term increase means the increase in amount in relation to the weight of the organism or part thereof (w/w).

[0097] By “vectors” is meant with the exception of plasmids all other vectors known to those skilled in the art such as by way of example phages, viruses such as SV40, CMV, baculovirus, adenovirus, transposons, IS elements, phasmids, phagemids, cosmids, linear or circular DNA. These vectors can be replicated autonomously in the host organism or be chromosomally replicated, chromosomal replication being preferred. As used herein, the term “vector” refers to a nucleic acid molecule capable of transporting another nucleic acid to which it has been linked. One type of vector is a “plasmid”, which refers to a circular double stranded DNA loop into which additional DNA segments can be ligated. Another type of vector is a viral vector, wherein additional DNA segments can be ligated into the viral genome. Certain vectors are capable of autonomous replication in a host cell into which they are introduced (e.g. bacterial vectors having a bacterial origin of replication and episomal mammalian vectors). Other vectors (e.g. non-episomal mammalian vectors) are integrated into the genome of a host cell or a organelle upon introduction into the host cell, and thereby are replicated along with the host or organelle genome. Moreover, certain vectors are capable of directing the expression of genes to which they are operatively linked. Such vectors are referred to herein as “expression vectors.” In general, expression vectors of utility in recombinant DNA techniques are often in the form of plasmids. In the present specification, “plasmid” and “vector” can be used interchangeably as the plasmid is the most commonly used form of vector. However, the invention is intended to include such other forms of expression vectors, such as viral vectors (e.g., replication defective retroviruses, adenoviruses, and adeno-associated viruses), which serve equivalent functions.

[0098] As used herein, “operatively linked” is intended to mean that the nucleotide sequence of interest is linked to the regulatory sequence(s) in a manner which allows for expression of the nucleotide sequence (e.g. in an in vitro transcription/translation system or in a host cell when the vector is introduced into the host cell). The term “regulatory sequence” is intended to include promoters, enhancers, and other expression control elements (e.g. polyadenylation signals). Such regulatory sequences are described, for example, in Goeddel, Gene Expression Technology: Methods in Enzymology 185, Academic Press, San Diego, Calif. (1990), and Gruber and Crosby, in: Methods in Plant Molecular Biology and Biotechnology, eds. Glick and Thompson, Chapter 7, 89-108, CRC Press; Boca Raton, Fla., including the references therein. Regulatory sequences include those that direct constitutive expression of a nucleotide sequence in many types of host cells and those that direct expression of the nucleotide sequence only in certain host cells or under certain conditions.

[0099] “Transformation” is defined herein as a process for introducing heterologous DNA into a plant cell, plant tissue, or plant. It may occur under natural or artificial conditions using various methods well known in the art. Transformation may rely on any known method for the insertion of foreign nucleic acid sequences into a prokaryotic or eukaryotic host cell. The method is selected based on the host cell being transformed and may include, but is not limited to, viral infection, electroporation, lipofection, and particle bombardment. Such “transformed” cells include stably transformed cells in which the inserted DNA is capable of replication either as an autonomously replicating plasmid or as part of the host chromosome. They also include cells which transiently express the inserted DNA or RNA for limited periods of time. Transformed plant cells, plant tissue, or plants are understood to encompass not only the end product of a transformation process, but also transgenic progeny thereof.

[0100] The terms “transformed,” “transgenic,” and “recombinant” refer to a host organism such as a bacterium or a plant into which a heterologous nucleic acid molecule has been introduced. The nucleic acid molecule can be stably integrated into the genome of the host or the nucleic acid molecule can also be present as an extra-chromosomal molecule. Such an extra-chromosomal molecule can be auto-replicating. Transformed cells, tissues, or plants are understood to encompass not only the end product of a transformation process, but also transgenic progeny thereof. A “non-transformed”, “non-transgenic” or “nonrecombinant” host refers to a wild-type organism, e.g. a bacterium or plant, which does not contain the heterologous nucleic acid molecule.

[0101] The terms “host organism”, “host cell”, “recombinant (host) organism” and “transgenic (host) cell” are used here interchangeably. Of course these terms relate not only to the particular host organism or the particular target cell but also to the descendants or potential descendants of these organisms or cells. Since, due to mutation or environmental effects certain modifications may arise in successive generations, these descendants need not necessarily be identical with the parental cell but nevertheless are still encompassed by the term as used here.

[0102] For the purposes of the invention “transgenic” or “recombinant” means with regard for example to a nucleic acid sequence, an expression cassette (=gene construct, nucleic acid construct) or a vector containing the nucleic acid sequence according to the invention or an organism transformed by said nucleic acid sequences, expression cassette or vector according to the invention all those constructions produced by genetic engineering methods in which either
[0103] (a) the nucleic acid sequence depicted in table I, column 5 or 7 or its derivatives or parts thereof; or
[0104] (b) a genetic control sequence functionally linked to the nucleic acid sequence described under (a), for example a 3′- and/or 5′-genetic control sequence such as a promoter or terminator, or
[0105] (c) (a) and (b);
   are not found in their natural, genetic environment or have been modified by genetic engineering methods, wherein the modification may by way of example be a substitution, addition, deletion, inversion or insertion of one or more nucleotide residues.

[0106] “Natural genetic environment” means the natural genomic or chromosomal locus in the organism of origin or inside the host organism or presence in a genomic library. In the case of a genomic library the natural genetic environment of the nucleic acid sequence is preferably retained at least in part. The environment borders the nucleic acid sequence at least on one side and has a sequence length of at least 50 bp, preferably at least 500 bp, particularly preferably at least 1,000 bp, most particularly preferably at least 5,000 bp. A naturally occurring expression cassette—for example the naturally occurring combination of the natural promoter of the nucleic acid sequence according to the invention with the corresponding gene—turns into a transgenic expression cassette when the latter is modified by unnatural, synthetic (“artificial”) methods such as by way of example a mutagenation. Appropriate methods are described by way of example in U.S. Pat. No. 5,565,350 or WO 00/15815.

[0107] The term “transgenic plants” used in accordance with the invention also refers to the progeny of a transgenic plant, for example the T₁, T₂, T₃ and subsequent plant generations or the BC₁, BC₂, BC₃ and subsequent plant generations. Thus, the transgenic plants according to the invention can be raised and selfed or crossed with other individuals in order to obtain further transgenic plants according to the invention. Transgenic plants may also be obtained by propagating transgenic plant cells vegetatively. The present invention also relates to transgenic plant material, which can be derived from a transgenic plant population according to the invention. Such material includes plant cells and certain tissues, organs and parts of plants in all their manifestations, such as seeds, leaves, anthers, fibers, tubers, roots, root hairs, stems, embryo, calli, cotelydons, petioles, harvested material, plant tissue, reproductive tissue and cell cultures, which are derived from the actual transgenic plant and/or can be used for bringing about the transgenic plant. Any transformed plant obtained according to the invention can be used in a conventional breeding scheme or in in vitro plant propagation to produce more transformed plants with the same characteristics and/or can be used to introduce the same characteristic in other varieties of the same or related species. Such plants are also part of the invention. Seeds obtained from the transformed plants genetically also contain the same characteristic and are part of the invention. As mentioned before, the present invention is in principle applicable to any plant and crop that can be transformed with any of the transformation method known to those skilled in the art.

[0108] The term “homology” means that the respective nucleic acid molecules or encoded proteins are functionally and/or structurally equivalent. The nucleic acid molecules that are homologous to the nucleic acid molecules described above and that are derivatives of said nucleic acid molecules are, for example, variations of said nucleic acid molecules which represent modifications having the same biological function, in particular encoding proteins with the same or substantially the same biological function. They may be naturally occurring variations, such as sequences from other plant varieties or species, or mutations. These mutations may occur naturally or may be obtained by mutagenesis techniques. The allelic variations may be naturally occurring allelic variants as well as synthetically produced or genetically engineered variants. Structurally equivalents can, for example, be identified by testing the binding of said polypeptide to antibodies or computer based predictions. Structurally equivalent have the similar immunological characteristic, e.g. comprise similar epitopes.

[0109] As used herein, the terms “gene” and “recombinant gene” refer to nucleic acid molecules comprising an open reading frame encoding the polypeptide of the invention or comprising the nucleic acid molecule of the invention or encoding the polypeptide used in the process of the present invention, preferably from a crop plant or from a microorgansim useful for the method of the invention. Such natural variations can typically result in 1 to 5% variance in the nucleotide sequence of the gene. Any and all such nucleotide variations and resulting amino acid polymorphisms in genes encoding a polypeptide of the invention or comprising a the nucleic acid molecule of the invention that are the result of natural variation and that do not alter the functional activity as described are intended to be within the scope of the invention.

### Specific Embodiments

[0110] Accordingly, this invention provides measures and methods to produce plants with increased yield, e.g. genes conferring an increased yield-related trait, for example enhanced tolerance to abiotic environmental stress, for example an increased drought tolerance and/or low temperature tolerance and/or an increased nutrient use efficiency, intrinsic yield and/or another increased yield-related trait, upon expression or over-expression. Accordingly, the present invention provides genes derived from plants. In particular, genes from plants are described in column 5 as well as in column 7 of tables I or II.

[0111] Accordingly, the present invention provides transgenic plants showing one or more improved yield-related traits as compared to the corresponding origin or the wild type plant and methods for producing such transgenic plants with increased yield. One or more enhanced yield-related phenotypes are increased in accordance with the invention by increasing or generating one or more activities in the transgenic plant, wherein the activity is selected from the group consisting of 2-oxoglutarate-dependent dioxygenase, 3-ketoacyl-CoA thiolase, 3′-phosphoadenosine 5′-phosphate phosphatase, 4-diphosphocytidyl-2-C-methyl-D-erythritol kinase, 50S chloroplast ribosomal protein L21, 57972199.R01.1-protein, 60952769.R01.1-protein, 60S ribosomal protein, ABC transporter family protein, AP2 domain-containing transcription factor, argonaute protein, AT1G29250.1-protein, AT1G53885-protein, AT2G35300-protein, AT3G04620-protein, AT4G01870-protein, AT5G42380-protein, AT5G47440-protein, CDS5394-protein, CDS5401_TRUNCATED-protein, cold response protein, cullin, Cytochrome P450, delta-8 sphingolipid desaturase, galactinol synthase, glutathione-S-transferase, GTPase, haspin-related protein, heat shock protein, heat shock transcription factor, histone H2B, jasmonate-zim-domain protein, mitochondrial asparaginyl-tRNA synthetase, Oligosaccharyltransferase, OS02G44730-protein, Oxygen-evolving enhancer protein, peptidyl-prolyl cis-trans isomerase, peptidyl-prolyl cis-trans isomerase family protein, plastid lipid-associated protein, Polypyrimidine tract binding protein, PRLI-interacting factor, protein kinase, protein kinase family protein, rubisco subunit binding-protein beta subunit, serine acetyltransferase, serine hydroxymethyltransferase, small heat shock protein, S-ribosylhomocysteinase, sugar transporter, Thioredoxin H-type, ubiquitin-conjugating enzyme, ubiquitin-protein ligase, universal stress protein family protein, and Vacuolar protein activity in a subcellular compartment and/or tissue of said plant indicated herein, e.g. in Table I, column 6.

[0112] The nucleic acid molecule of the present invention or used in accordance with the present invention, encodes a protein conferring an activity of a polypeptide selected from the group consisting of 2-oxoglutarate-dependent dioxygenase, 3-ketoacyl-CoA thiolase, 3′-phosphoadenosine 5′-phosphate phosphatase, 4-diphosphocytidyl-2-C-methyl-D-erythritol kinase, 50S chloroplast ribosomal protein L21, 57972199.R01.1-protein, 60952769.R01.1-protein, 60S ribosomal protein, ABC transporter family protein, AP2 domain-containing transcription factor, argonaute protein, AT1G29250.1-protein, AT1G53885-protein, AT2G35300-protein, AT3G04620-protein, AT4G01870-protein, AT5G42380-protein, AT5G47440-protein, CDS5394-protein, CDS5401_TRUNCATED-protein, cold response protein, cullin, Cytochrome P450, delta-8 sphingolipid desaturase, galactinol synthase, glutathione-S-transferase, GTPase, haspin-related protein, heat shock protein, heat shock transcription factor, histone H2B, jasmonate-zim-domain protein, mitochondrial asparaginyl-tRNA synthetase, Oligosaccharyltransferase, OS02G44730-protein, Oxygen-evolving enhancer protein, peptidyl-prolyl cis-trans isomerase, peptidyl-prolyl cis-trans isomerase family protein, plastid lipid-associated protein, Polypyrimidine tract binding protein, PRLI-interacting factor, protein kinase, protein kinase family protein, rubisco subunit binding-protein beta subunit, serine acetyltransferase, serine hydroxymethyltransferase, small heat shock protein, S-ribosylhomocysteinase, sugar transporter, Thioredoxin H-type, ubiquitin-conjugating enzyme, ubiquitin-protein ligase, universal stress protein family protein, and Vacuolar protein, i.e. conferring an “yield-increasing activity”. Accordingly, in one embodiment, the present invention relates to a nucleic acid molecule that encodes a polypeptide with an yield-increasing activity which is encoded by a nucleic acid sequence as shown in table I, column 5 or 7, and/or which is a protein comprising or consisting of a polypeptide as depicted in table II, column 5 and 7, and/or that can be amplified with the primer set shown in table III, column 7.

[0113] The increase or generation of one or more said “activities” is for example conferred by the increase of activity or of amount in a cell or a part thereof of one or more expression products of said nucleic acid molecule, e.g. proteins, or by de novo expression, i.e. by the generation of said “activity” in the plant.

[0114] In one embodiment, one or more of said yield-increasing activities are increased by increasing the amount and/or the specific activity of one or more proteins listed in Table I, column 5 or 7 in a compartment of a cell indicated in Table I, column 6.

[0115] Accordingly to present invention, the yield of the plant of the invention is increased by improving one or more of the yield-related traits as defined herein. Said increased yield in accordance with the present invention can typically be achieved by enhancing or improving, in comparison to an origin or wild-type plant, one or more yield-related traits of said plant. Such yield-related traits of a plant the improvement of which results in increased yield comprise, without limitation, the increase of the intrinsic yield capacity of a plant, improved nutrient use efficiency, and/or increased stress tolerance.

[0116] In one embodiment, abiotic environmental stress refers to nitrogen use efficiency.

[0117] The transgenic plants of the present invention demonstrate increased intrinsic yield, as compared to a corresponding non-modified, e.g. a non-transformed, wild type plant is conferred if the activity of a polypeptide comprising the polypeptide shown in SEQ ID NO. 64, or encoded by a nucleic acid molecule comprising the nucleic acid molecule shown in SEQ ID NO. 63, or a homolog of said nucleic acid molecule or polypeptide, is increased or generated. For example, the activity of a corresponding nucleic acid molecule or a polypeptide derived from Arabidopsis thaliana is increased or generated, preferably comprising the nucleic acid molecule shown in SEQ ID NO. 63 or polypeptide shown in SEQ ID NO. 64, respectively, or a homolog thereof. E.g. an increased tolerance to abiotic environmental stress, in particular increased intrinsic yield, compared to a corresponding non-modified, e.g. a non-transformed, wild type plant is conferred if the activity “2-oxoglutarate-dependent dioxygenase” or if the activity of a nucleic acid molecule or a polypeptide comprising the nucleic acid or polypeptide or the consensus sequence or the polypeptide motif, depicted in table I, II or IV, column 7, respective same line as SEQ ID NO.: 63 or SEQ ID NO.: 64, respectively, is increased or generated in a plant or part thereof. Preferably, the increase occurs cytoplasmic. Particularly, an increase of yield from 1.05-fold to 1.17-fold, for example plus at least 100% thereof, under standard conditions, e.g. in the absence of nutrient deficiency and/or stress conditions is conferred compared to a corresponding control, e.g. an non-modified, e.g. non-transformed, wild type plant.

[0118] The transgenic plants of the present invention demonstrate increased intrinsic yield, as compared to a corresponding non-modified, e.g. a non-transformed, wild type plant is conferred if the activity of a polypeptide comprising the polypeptide shown in SEQ ID NO. 642, or encoded by a nucleic acid molecule comprising the nucleic acid molecule shown in SEQ ID NO. 641, or a homolog of said nucleic acid molecule or polypeptide, is increased or generated. For example, the activity of a corresponding nucleic acid molecule or a polypeptide derived from Arabidopsis thaliana is increased or generated, preferably comprising the nucleic acid molecule shown in SEQ ID NO. 641 or polypeptide shown in SEQ ID NO. 642, respectively, or a homolog thereof. E.g. an increased tolerance to abiotic environmental stress, in particular increased intrinsic yield, compared to a corresponding non-modified, e.g. a non-transformed, wild type plant is conferred if the activity “AT1G53885-protein” or if the activity of a nucleic acid molecule or a polypeptide comprising the nucleic acid or polypeptide or the consensus sequence or the polypeptide motif, depicted in table I, II or IV, column 7, respective same line as SEQ ID NO.: 641 or SEQ ID NO.: 642, respectively, is increased or generated in a plant or part thereof. Preferably, the increase occurs cytoplasmic. Particularly, an increase of yield from 1.05-fold to 1.25-fold, for example plus at least 100% thereof, under standard conditions, e.g. in the absence of nutrient deficiency and/or stress conditions is conferred compared to a corresponding control, e.g. an non-modified, e.g. non-transformed, wild type plant.

[0119] The transgenic plants of the present invention demonstrate increased intrinsic yield, as compared to a corresponding non-modified, e.g. a non-transformed, wild type plant is conferred if the activity of a polypeptide comprising the polypeptide shown in SEQ ID NO. 2458, or encoded by a nucleic acid molecule comprising the nucleic acid molecule shown in SEQ ID NO. 2457, or a homolog of said nucleic acid molecule or polypeptide, is increased or generated. For example, the activity of a corresponding nucleic acid molecule or a polypeptide derived from Populus trichocarpa is increased or generated, preferably comprising the nucleic acid molecule shown in SEQ ID NO. 2457 or polypeptide shown in SEQ ID NO. 2458, respectively, or a homolog thereof. E.g. an increased tolerance to abiotic environmental stress, in particular increased intrinsic yield, compared to a corresponding non-modified, e.g. a non-transformed, wild type plant is conferred if the activity “3-ketoacyl-CoA thiolase” or if the activity of a nucleic acid molecule or a polypeptide comprising the nucleic acid or polypeptide or the consensus sequence or the polypeptide motif, depicted in table I, II or IV, column 7, respective same line as SEQ ID NO.: 2457 or SEQ ID NO.: 2458, respectively, is increased or generated in a plant or part thereof. Preferably, the increase occurs cytoplasmic. Particularly, an increase of yield from 1.05-fold to 1.11-fold, for example plus at least 100% thereof, under standard conditions, e.g. in the absence of nutrient deficiency and/or stress conditions is conferred compared to a corresponding control, e.g. an non-modified, e.g. non-transformed, wild type plant.

[0120] The transgenic plants of the present invention demonstrate increased intrinsic yield, as compared to a corresponding non-modified, e.g. a non-transformed, wild type plant is conferred if the activity of a polypeptide comprising the polypeptide shown in SEQ ID NO. 3464, or encoded by a nucleic acid molecule comprising the nucleic acid molecule shown in SEQ ID NO. 3463, or a homolog of said nucleic acid molecule or polypeptide, is increased or generated. For example, the activity of a corresponding nucleic acid molecule or a polypeptide derived from Populus trichocarpa is increased or generated, preferably comprising the nucleic acid molecule shown in SEQ ID NO. 3463 or polypeptide shown in SEQ ID NO. 3464, respectively, or a homolog thereof. E.g. an increased tolerance to abiotic environmental stress, in particular increased intrinsic yield, compared to a corresponding non-modified, e.g. a non-transformed, wild type plant is conferred if the activity “60S ribosomal protein” or if the activity of a nucleic acid molecule or a polypeptide comprising the nucleic acid or polypeptide or the consensus sequence or the polypeptide motif, depicted in table I, II or IV, column 7, respective same line as SEQ ID NO.: 3463 or SEQ ID NO.: 3464, respectively, is increased or generated in a plant or part thereof. Preferably, the increase occurs cytoplasmic. Particularly, an increase of yield from 1.05-fold to 1.06-fold, for example plus at least 100% thereof, under standard conditions, e.g. in the absence of nutrient deficiency and/or stress conditions is conferred compared to a corresponding control, e.g. an non-modified, e.g. non-transformed, wild type plant.

[0121] The transgenic plants of the present invention demonstrate increased intrinsic yield, as compared to a corresponding non-modified, e.g. a non-transformed, wild type plant is conferred if the activity of a polypeptide comprising the polypeptide shown in SEQ ID NO. 6495, or encoded by a nucleic acid molecule comprising the nucleic acid molecule shown in SEQ ID NO. 6494, or a homolog of said nucleic acid molecule or polypeptide, is increased or generated. For example, the activity of a corresponding nucleic acid molecule or a polypeptide derived from Arabidopsis thaliana is increased or generated, preferably comprising the nucleic acid molecule shown in SEQ ID NO. 6494 or polypeptide shown in SEQ ID NO. 6495, respectively, or a homolog thereof. E.g. an increased tolerance to abiotic environmental stress, in particular increased intrinsic yield, compared to a corresponding non-modified, e.g. a non-transformed, wild type plant is conferred if the activity “histone H2B” or if the activity of a nucleic acid molecule or a polypeptide comprising the nucleic acid or polypeptide or the consensus sequence or the polypeptide motif, depicted in table I, II or IV, column 7, respective same line as SEQ ID NO.: 6494 or SEQ ID NO.: 6495, respectively, is increased or generated in a plant or part thereof. Preferably, the increase occurs cytoplasmic. Particularly, an increase of yield from 1.05-fold to 1.19-fold, for example plus at least 100% thereof, under standard conditions, e.g. in the absence of nutrient deficiency and/or stress conditions is conferred compared to a corresponding control, e.g. an non-modified, e.g. non-transformed, wild type plant.

[0122] The transgenic plants of the present invention demonstrate increased intrinsic yield, as compared to a corresponding non-modified, e.g. a non-transformed, wild type plant is conferred if the activity of a polypeptide comprising the polypeptide shown in SEQ ID NO. 7435, or encoded by a nucleic acid molecule comprising the nucleic acid molecule shown in SEQ ID NO. 7434, or a homolog of said nucleic acid molecule or polypeptide, is increased or generated. For example, the activity of a corresponding nucleic acid molecule or a polypeptide derived from Arabidopsis thaliana is increased or generated, preferably comprising the nucleic acid molecule shown in SEQ ID NO. 7434 or polypeptide shown in SEQ ID NO. 7435, respectively, or a homolog thereof. E.g. an increased tolerance to abiotic environmental stress, in particular increased intrinsic yield, compared to a corresponding non-modified, e.g. a non-transformed, wild type plant is conferred if the activity “protein kinase family protein” or if the activity of a nucleic acid molecule or a polypeptide comprising the nucleic acid or polypeptide or the consensus sequence or the polypeptide motif, depicted in table I, II or IV, column 7, respective same line as SEQ ID NO.: 7434 or SEQ ID NO.: 7435, respectively, is increased or generated in a plant or part thereof. Preferably, the increase occurs cytoplasmic. Particularly, an increase of yield from 1.05-fold to 1.24-fold, for example plus at least 100% thereof, under standard conditions, e.g. in the absence of nutrient deficiency and/or stress conditions is conferred compared to a corresponding control, e.g. an non-modified, e.g. non-transformed, wild type plant.

[0123] The transgenic plants of the present invention demonstrate increased intrinsic yield, as compared to a corresponding non-modified, e.g. a non-transformed, wild type plant is conferred if the activity of a polypeptide comprising the polypeptide shown in SEQ ID NO. 7514, or encoded by a nucleic acid molecule comprising the nucleic acid molecule shown in SEQ ID NO. 7513, or a homolog of said nucleic acid molecule or polypeptide, is increased or generated. For example, the activity of a corresponding nucleic acid molecule or a polypeptide derived from Arabidopsis thaliana is increased or generated, preferably comprising the nucleic acid molecule shown in SEQ ID NO. 7513 or polypeptide shown in SEQ ID NO. 7514, respectively, or a homolog thereof. E.g. an increased tolerance to abiotic environmental stress, in particular increased intrinsic yield, compared to a corresponding non-modified, e.g. a non-transformed, wild type plant is conferred if the activity “AP2 domain-containing transcription factor” or if the activity of a nucleic acid molecule or a polypeptide comprising the nucleic acid or polypeptide or the consensus sequence or the polypeptide motif, depicted in table I, II or IV, column 7, respective same line as SEQ ID NO.: 7513 or SEQ ID NO.: 7514, respectively, is increased or generated in a plant or part thereof. Preferably, the increase occurs cytoplasmic. Particularly, an increase of yield from 1.05-fold to 1.40-fold, for example plus at least 100% thereof, under standard conditions, e.g. in the absence of nutrient deficiency and/or stress conditions is conferred compared to a corresponding control, e.g. an non-modified, e.g. non-transformed, wild type plant.

[0124] The transgenic plants of the present invention demonstrate increased intrinsic yield, as compared to a corresponding non-modified, e.g. a non-transformed, wild type plant is conferred if the activity of a polypeptide comprising the polypeptide shown in SEQ ID NO. 7546, or encoded by a nucleic acid molecule comprising the nucleic acid molecule shown in SEQ ID NO. 7545, or a homolog of said nucleic acid molecule or polypeptide, is increased or generated. For example, the activity of a corresponding nucleic acid molecule or a polypeptide derived from Populus trichocarpa is increased or generated, preferably comprising the nucleic acid molecule shown in SEQ ID NO. 7545 or polypeptide shown in SEQ ID NO. 7546, respectively, or a homolog thereof. E.g. an increased tolerance to abiotic environmental stress, in particular increased intrinsic yield, compared to a corresponding non-modified, e.g. a non-transformed, wild type plant is conferred if the activity “Oligosaccharyltransferase” or if the activity of a nucleic acid molecule or a polypeptide comprising the nucleic acid or polypeptide or the consensus sequence or the polypeptide motif, depicted in table I, II or IV, column 7, respective same line as SEQ ID NO.: 7545 or SEQ ID NO.: 7546, respectively, is increased or generated in a plant or part thereof. Preferably, the increase occurs cytoplasmic. Particularly, an increase of yield from 1.05-fold to 1.12-fold, for example plus at least 100% thereof, under standard conditions, e.g. in the absence of nutrient deficiency and/or stress conditions is conferred compared to a corresponding control, e.g. an non-modified, e.g. non-transformed, wild type plant.

[0125] The transgenic plants of the present invention demonstrate increased intrinsic yield, as compared to a corresponding non-modified, e.g. a non-transformed, wild type plant is conferred if the activity of a polypeptide comprising the polypeptide shown in SEQ ID NO. 8288, or encoded by a nucleic acid molecule comprising the nucleic acid molecule shown in SEQ ID NO. 8287, or a homolog of said nucleic acid molecule or polypeptide, is increased or generated. For example, the activity of a corresponding nucleic acid molecule or a polypeptide derived from Arabidopsis thaliana is increased or generated, preferably comprising the nucleic acid molecule shown in SEQ ID NO. 8287 or polypeptide shown in SEQ ID NO. 8288, respectively, or a homolog thereof. E.g. an increased tolerance to abiotic environmental stress, in particular increased intrinsic yield, compared to a corresponding non-modified, e.g. a non-transformed, wild type plant is conferred if the activity “plastid lipid-associated protein” or if the activity of a nucleic acid molecule or a polypeptide comprising the nucleic acid or polypeptide or the consensus sequence or the polypeptide motif, depicted in table I, II or IV, column 7, respective same line as SEQ ID NO.: 8287 or SEQ ID NO.: 8288, respectively, is increased or generated in a plant or part thereof. Preferably, the increase occurs cytoplasmic. Particularly, an increase of yield from 1.05-fold to 1.14-fold, for example plus at least 100% thereof, under standard conditions, e.g. in the absence of nutrient deficiency and/or stress conditions is conferred compared to a corresponding control, e.g. an non-modified, e.g. non-transformed, wild type plant.

[0126] The transgenic plants of the present invention demonstrate increased intrinsic yield, as compared to a corresponding non-modified, e.g. a non-transformed, wild type plant is conferred if the activity of a polypeptide comprising the polypeptide shown in SEQ ID NO. 7865, or encoded by a nucleic acid molecule comprising the nucleic acid molecule shown in SEQ ID NO. 7864, or a homolog of said nucleic acid molecule or polypeptide, is increased or generated. For example, the activity of a corresponding nucleic acid molecule or a polypeptide derived from Arabidopsis thaliana is increased or generated, preferably comprising the nucleic acid molecule shown in SEQ ID NO. 7864 or polypeptide shown in SEQ ID NO. 7865, respectively, or a homolog thereof. E.g. an increased tolerance to abiotic environmental stress, in particular increased intrinsic yield, compared to a corresponding non-modified, e.g. a non-transformed, wild type plant is conferred if the activity “galactinol synthase” or if the activity of a nucleic acid molecule or a polypeptide comprising the nucleic acid or polypeptide or the consensus sequence or the polypeptide motif, depicted in table I, II or IV, column 7, respective same line as SEQ ID NO.: 7864 or SEQ ID NO.: 7865, respectively, is increased or generated in a plant or part thereof. Preferably, the increase occurs cytoplasmic. Particularly, an increase of yield from 1.05-fold to 1.13-fold, for example plus at least 100% thereof, under standard conditions, e.g. in the absence of nutrient deficiency and/or stress conditions is conferred compared to a corresponding control, e.g. an non-modified, e.g. non-transformed, wild type plant.

[0127] The transgenic plants of the present invention demonstrate increased intrinsic yield, as compared to a corresponding non-modified, e.g. a non-transformed, wild type plant is conferred if the activity of a polypeptide comprising the polypeptide shown in SEQ ID NO. 8153, or encoded by a nucleic acid molecule comprising the nucleic acid molecule shown in SEQ ID NO. 8152, or a homolog of said nucleic acid molecule or polypeptide, is increased or generated. For example, the activity of a corresponding nucleic acid molecule or a polypeptide derived from Arabidopsis thaliana is increased or generated, preferably comprising the nucleic acid molecule shown in SEQ ID NO. 8152 or polypeptide shown in SEQ ID NO. 8153, respectively, or a homolog thereof. E.g. an increased tolerance to abiotic environmental stress, in particular increased intrinsic yield, compared to a corresponding non-modified, e.g. a non-transformed, wild type plant is conferred if the activity “cold response protein” or if the activity of a nucleic acid molecule or a polypeptide comprising the nucleic acid or polypeptide or the consensus sequence or the polypeptide motif, depicted in table I, II or IV, column 7, respective same line as SEQ ID NO.: 8152 or SEQ ID NO.: 8153, respectively, is increased or generated in a plant or part thereof. Preferably, the increase occurs cytoplasmic. Particularly, an increase of yield from 1.05-fold to 1.06-fold, for example plus at least 100% thereof, under standard conditions, e.g. in the absence of nutrient deficiency and/or stress conditions is conferred compared to a corresponding control, e.g. an non-modified, e.g. non-transformed, wild type plant.

[0128] The transgenic plants of the present invention demonstrate increased intrinsic yield, as compared to a corresponding non-modified, e.g. a non-transformed, wild type plant is conferred if the activity of a polypeptide comprising the polypeptide shown in SEQ ID NO. 8409, or encoded by a nucleic acid molecule comprising the nucleic acid molecule shown in SEQ ID NO. 8408, or a homolog of said nucleic acid molecule or polypeptide, is increased or generated. For example, the activity of a corresponding nucleic acid molecule or a polypeptide derived from Arabidopsis thaliana is increased or generated, preferably comprising the nucleic acid molecule shown in SEQ ID NO. 8408 or polypeptide shown in SEQ ID NO. 8409, respectively, or a homolog thereof. E.g. an increased tolerance to abiotic environmental stress, in particular increased intrinsic yield, compared to a corresponding non-modified, e.g. a non-transformed, wild type plant is conferred if the activity “small heat shock protein” or if the activity of a nucleic acid molecule or a polypeptide comprising the nucleic acid or polypeptide or the consensus sequence or the polypeptide motif, depicted in table I, II or IV, column 7, respective same line as SEQ ID NO.: 8408 or SEQ ID NO.: 8409, respectively, is increased or generated in a plant or part thereof. Preferably, the increase occurs cytoplasmic. Particularly, an increase of yield from 1.05-fold to 1.06-fold, for example plus at least 100% thereof, under standard conditions, e.g. in the absence of nutrient deficiency and/or stress conditions is conferred compared to a corresponding control, e.g. an non-modified, e.g. non-transformed, wild type plant.

[0129] The transgenic plants of the present invention demonstrate increased intrinsic yield, as compared to a corresponding non-modified, e.g. a non-transformed, wild type plant is conferred if the activity of a polypeptide comprising the polypeptide shown in SEQ ID NO. 10881, or encoded by a nucleic acid molecule comprising the nucleic acid molecule shown in SEQ ID NO. 10880, or a homolog of said nucleic acid molecule or polypeptide, is increased or generated. For example, the activity of a corresponding nucleic acid molecule or a polypeptide derived from Arabidopsis thaliana is increased or generated, preferably comprising the nucleic acid molecule shown in SEQ ID NO. 10880 or polypeptide shown in SEQ ID NO. 10881, respectively, or a homolog thereof. E.g. an increased tolerance to abiotic environmental stress, in particular increased intrinsic yield, compared to a corresponding non-modified, e.g. a non-transformed, wild type plant is conferred if the activity “universal stress protein family protein” or if the activity of a nucleic acid molecule or a polypeptide comprising the nucleic acid or polypeptide or the consensus sequence or the polypeptide motif, depicted in table I, II or IV, column 7, respective same line as SEQ ID NO.: 10880 or SEQ ID NO.: 10881, respectively, is increased or generated in a plant or part thereof. Preferably, the increase occurs cytoplasmic. Particularly, an increase of yield from 1.05-fold to 1.05-fold, for example plus at least 100% thereof, under standard conditions, e.g. in the absence of nutrient deficiency and/or stress conditions is conferred compared to a corresponding control, e.g. an non-modified, e.g. non-transformed, wild type plant.

[0130] The transgenic plants of the present invention demonstrate increased intrinsic yield, as compared to a corresponding non-modified, e.g. a non-transformed, wild type plant is conferred if the activity of a polypeptide comprising the polypeptide shown in SEQ ID NO. 10966, or encoded by a nucleic acid molecule comprising the nucleic acid molecule shown in SEQ ID NO. 10965, or a homolog of said nucleic acid molecule or polypeptide, is increased or generated. For example, the activity of a corresponding nucleic acid molecule or a polypeptide derived from Arabidopsis thaliana is increased or generated, preferably comprising the nucleic acid molecule shown in SEQ ID NO. 10965 or polypeptide shown in SEQ ID NO. 10966, respectively, or a homolog thereof. E.g. an increased tolerance to abiotic environmental stress, in particular increased intrinsic yield, compared to a corresponding non-modified, e.g. a non-transformed, wild type plant is conferred if the activity “heat shock protein” or if the activity of a nucleic acid molecule or a polypeptide comprising the nucleic acid or polypeptide or the consensus sequence or the polypeptide motif, depicted in table I, II or IV, column 7, respective same line as SEQ ID NO.: 10965 or SEQ ID NO.: 10966, respectively, is increased or generated in a plant or part thereof. Preferably, the increase occurs cytoplasmic. Particularly, an increase of yield from 1.05-fold to 1.13-fold, for example plus at least 100% thereof, under standard conditions, e.g. in the absence of nutrient deficiency and/or stress conditions is conferred compared to a corresponding control, e.g. an non-modified, e.g. non-transformed, wild type plant.

[0131] The transgenic plants of the present invention demonstrate increased intrinsic yield, as compared to a corresponding non-modified, e.g. a non-transformed, wild type plant is conferred if the activity of a polypeptide comprising the polypeptide shown in SEQ ID NO. 11419, or encoded by a nucleic acid molecule comprising the nucleic acid molecule shown in SEQ ID NO. 11418, or a homolog of said nucleic acid molecule or polypeptide, is increased or generated. For example, the activity of a corresponding nucleic acid molecule or a polypeptide derived from Arabidopsis thaliana is increased or generated, preferably comprising the nucleic acid molecule shown in SEQ ID NO. 11418 or polypeptide shown in SEQ ID NO. 11419, respectively, or a homolog thereof. E.g. an increased tolerance to abiotic environmental stress, in particular increased intrinsic yield, compared to a corresponding non-modified, e.g. a non-transformed, wild type plant is conferred if the activity “argonaute protein” or if the activity of a nucleic acid molecule or a polypeptide comprising the nucleic acid or polypeptide or the consensus sequence or the polypeptide motif, depicted in table I, II or IV, column 7, respective same line as SEQ ID NO.: 11418 or SEQ ID NO.: 11419, respectively, is increased or generated in a plant or part thereof. Preferably, the increase occurs cytoplasmic. Particularly, an increase of yield from 1.05-fold to 1.06-fold, for example plus at least 100% thereof, under standard conditions, e.g. in the absence of nutrient deficiency and/or stress conditions is conferred compared to a corresponding control, e.g. an non-modified, e.g. non-transformed, wild type plant.

[0132] The transgenic plants of the present invention demonstrate increased intrinsic yield, as compared to a corresponding non-modified, e.g. a non-transformed, wild type plant is conferred if the activity of a polypeptide comprising the polypeptide shown in SEQ ID NO. 12197, or encoded by a nucleic acid molecule comprising the nucleic acid molecule shown in SEQ ID NO. 12196, or a homolog of said nucleic acid molecule or polypeptide, is increased or generated. For example, the activity of a corresponding nucleic acid molecule or a polypeptide derived from Arabidopsis thaliana is increased or generated, preferably comprising the nucleic acid molecule shown in SEQ ID NO. 12196 or polypeptide shown in SEQ ID NO. 12197, respectively, or a homolog thereof. E.g. an increased tolerance to abiotic environmental stress, in particular increased intrinsic yield, compared to a corresponding non-modified, e.g. a non-transformed, wild type plant is conferred if the activity “AT2G35300-protein” or if the activity of a nucleic acid molecule or a polypeptide comprising the nucleic acid or polypeptide or the consensus sequence or the polypeptide motif, depicted in table I, II or IV, column 7, respective same line as SEQ ID NO.: 12196 or SEQ ID NO.: 12197, respectively, is increased or generated in a plant or part thereof. Preferably, the increase occurs cytoplasmic. Particularly, an increase of yield from 1.05-fold to 1.23-fold, for example plus at least 100% thereof, under standard conditions, e.g. in the absence of nutrient deficiency and/or stress conditions is conferred compared to a corresponding control, e.g. an non-modified, e.g. non-transformed, wild type plant.

[0133] The transgenic plants of the present invention demonstrate increased intrinsic yield, as compared to a corresponding non-modified, e.g. a non-transformed, wild type plant is conferred if the activity of a polypeptide comprising the polypeptide shown in SEQ ID NO. 12317, or encoded by a nucleic acid molecule comprising the nucleic acid molecule shown in SEQ ID NO. 12316, or a homolog of said nucleic acid molecule or polypeptide, is increased or generated. For example, the activity of a corresponding nucleic acid molecule or a polypeptide derived from Arabidopsis thaliana is increased or generated, preferably comprising the nucleic acid molecule shown in SEQ ID NO. 12316 or polypeptide shown in SEQ ID NO. 12317, respectively, or a homolog thereof. E.g. an increased tolerance to abiotic environmental stress, in particular increased intrinsic yield, compared to a corresponding non-modified, e.g. a non-transformed, wild type plant is conferred if the activity “ubiquitin-protein ligase” or if the activity of a nucleic acid molecule or a polypeptide comprising the nucleic acid or polypeptide or the consensus sequence or the polypeptide motif, depicted in table I, II or IV, column 7, respective same line as SEQ ID NO.: 12316 or SEQ ID NO.: 12317, respectively, is increased or generated in a plant or part thereof. Preferably, the increase occurs cytoplasmic. Particularly, an increase of yield from 1.05-fold to 1.08-fold, for example plus at least 100% thereof, under standard conditions, e.g. in the absence of nutrient deficiency and/or stress conditions is conferred compared to a corresponding control, e.g. an non-modified, e.g. non-transformed, wild type plant.

[0134] The transgenic plants of the present invention demonstrate increased intrinsic yield, as compared to a corresponding non-modified, e.g. a non-transformed, wild type plant is conferred if the activity of a polypeptide comprising the polypeptide shown in SEQ ID NO. 13277, or encoded by a nucleic acid molecule comprising the nucleic acid molecule shown in SEQ ID NO. 13276, or a homolog of said nucleic acid molecule or polypeptide, is increased or generated. For example, the activity of a corresponding nucleic acid molecule or a polypeptide derived from Arabidopsis thaliana is increased or generated, preferably comprising the nucleic acid molecule shown in SEQ ID NO. 13276 or polypeptide shown in SEQ ID NO. 13277, respectively, or a homolog thereof. E.g. an increased tolerance to abiotic environmental stress, in particular increased intrinsic yield, compared to a corresponding non-modified, e.g. a non-transformed, wild type plant is conferred if the activity “jasmonate-zim-domain protein” or if the activity of a nucleic acid molecule or a polypeptide comprising the nucleic acid or polypeptide or the consensus sequence or the polypeptide motif, depicted in table I, II or IV, column 7, respective same line as SEQ ID NO.: 13276 or SEQ ID NO.: 13277, respectively, is increased or generated in a plant or part thereof. Preferably, the increase occurs cytoplasmic. Particularly, an increase of yield from 1.05-fold to 1.24-fold, for example plus at least 100% thereof, under standard conditions, e.g. in the absence of nutrient deficiency and/or stress conditions is conferred compared to a corresponding control, e.g. an non-modified, e.g. non-transformed, wild type plant.

[0135] The transgenic plants of the present invention demonstrate increased intrinsic yield, as compared to a corresponding non-modified, e.g. a non-transformed, wild type plant is conferred if the activity of a polypeptide comprising the polypeptide shown in SEQ ID NO. 13246, or encoded by a nucleic acid molecule comprising the nucleic acid molecule shown in SEQ ID NO. 13245, or a homolog of said nucleic acid molecule or polypeptide, is increased or generated. For example, the activity of a corresponding nucleic acid molecule or a polypeptide derived from Arabidopsis thaliana is increased or generated, preferably comprising the nucleic acid molecule shown in SEQ ID NO. 13245 or polypeptide shown in SEQ ID NO. 13246, respectively, or a homolog thereof. E.g. an increased tolerance to abiotic environmental stress, in particular increased intrinsic yield, compared to a corresponding non-modified, e.g. a non-transformed, wild type plant is conferred if the activity “PRLI-interacting factor” or if the activity of a nucleic acid molecule or a polypeptide comprising the nucleic acid or polypeptide or the consensus sequence or the polypeptide motif, depicted in table I, II or IV, column 7, respective same line as SEQ ID NO.: 13245 or SEQ ID NO.: 13246, respectively, is increased or generated in a plant or part thereof. Preferably, the increase occurs cytoplasmic. Particularly, an increase of yield from 1.05-fold to 1.23-fold, for example plus at least 100% thereof, under standard conditions, e.g. in the absence of nutrient deficiency and/or stress conditions is conferred compared to a corresponding control, e.g. an non-modified, e.g. non-transformed, wild type plant.

[0136] The transgenic plants of the present invention demonstrate increased intrinsic yield, as compared to a corresponding non-modified, e.g. a non-transformed, wild type plant is conferred if the activity of a polypeptide comprising the polypeptide shown in SEQ ID NO. 10754, or encoded by a nucleic acid molecule comprising the nucleic acid molecule shown in SEQ ID NO. 10753, or a homolog of said nucleic acid molecule or polypeptide, is increased or generated. For example, the activity of a corresponding nucleic acid molecule or a polypeptide derived from Zea mays is increased or generated, preferably comprising the nucleic acid molecule shown in SEQ ID NO. 10753 or polypeptide shown in SEQ ID NO. 10754, respectively, or a homolog thereof. E.g. an increased tolerance to abiotic environmental stress, in particular increased intrinsic yield, compared to a corresponding non-modified, e.g. a non-transformed, wild type plant is conferred if the activity “60952769.R01.1-protein” or if the activity of a nucleic acid molecule or a polypeptide comprising the nucleic acid or polypeptide or the consensus sequence or the polypeptide motif, depicted in table I, II or IV, column 7, respective same line as SEQ ID NO.: 10753 or SEQ ID NO.: 10754, respectively, is increased or generated in a plant or part thereof. Preferably, the increase occurs cytoplasmic. Particularly, an increase of yield from 1.05-fold to 1.15-fold, for example plus at least 100% thereof, under standard conditions, e.g. in the absence of nutrient deficiency and/or stress conditions is conferred compared to a corresponding control, e.g. an non-modified, e.g. non-transformed, wild type plant.

[0137] The transgenic plants of the present invention demonstrate increased intrinsic yield, as compared to a corresponding non-modified, e.g. a non-transformed, wild type plant is conferred if the activity of a polypeptide comprising the polypeptide shown in SEQ ID NO. 13310, or encoded by a nucleic acid molecule comprising the nucleic acid molecule shown in SEQ ID NO. 13309, or a homolog of said nucleic acid molecule or polypeptide, is increased or generated. For example, the activity of a corresponding nucleic acid molecule or a polypeptide derived from Arabidopsis thaliana is increased or generated, preferably comprising the nucleic acid molecule shown in SEQ ID NO. 13309 or polypeptide shown in SEQ ID NO. 13310, respectively, or a homolog thereof. E.g. an increased tolerance to abiotic environmental stress, in particular increased intrinsic yield, compared to a corresponding non-modified, e.g. a non-transformed, wild type plant is conferred if the activity “AT5G42380-protein” or if the activity of a nucleic acid molecule or a polypeptide comprising the nucleic acid or polypeptide or the consensus sequence or the polypeptide motif, depicted in table I, II or IV, column 7, respective same line as SEQ ID NO.: 13309 or SEQ ID NO.: 13310, respectively, is increased or generated in a plant or part thereof. Preferably, the increase occurs cytoplasmic. Particularly, an increase of yield from 1.05-fold to 1.32-fold, for example plus at least 100% thereof, under standard conditions, e.g. in the absence of nutrient deficiency and/or stress conditions is conferred compared to a corresponding control, e.g. an non-modified, e.g. non-transformed, wild type plant.

[0138] The transgenic plants of the present invention demonstrate increased intrinsic yield, as compared to a corresponding non-modified, e.g. a non-transformed, wild type plant is conferred if the activity of a polypeptide comprising the polypeptide shown in SEQ ID NO. 10750, or encoded by a nucleic acid molecule comprising the nucleic acid molecule shown in SEQ ID NO. 10749, or a homolog of said nucleic acid molecule or polypeptide, is increased or generated. For example, the activity of a corresponding nucleic acid molecule or a polypeptide derived from Zea mays is increased or generated, preferably comprising the nucleic acid molecule shown in SEQ ID NO. 10749 or polypeptide shown in SEQ ID NO. 10750, respectively, or a homolog thereof. E.g. an increased tolerance to abiotic environmental stress, in particular increased intrinsic yield, compared to a corresponding non-modified, e.g. a non-transformed, wild type plant is conferred if the activity “57972199.R01.1-protein” or if the activity of a nucleic acid molecule or a polypeptide comprising the nucleic acid or polypeptide or the consensus sequence or the polypeptide motif, depicted in table I, II or IV, column 7, respective same line as SEQ ID NO.: 10749 or SEQ ID NO.: 10750, respectively, is increased or generated in a plant or part thereof. Preferably, the increase occurs cytoplasmic. Particularly, an increase of yield from 1.05-fold to 1.30-fold, for example plus at least 100% thereof, under standard conditions, e.g. in the absence of nutrient deficiency and/or stress conditions is conferred compared to a corresponding control, e.g. an non-modified, e.g. non-transformed, wild type plant.

[0139] The transgenic plants of the present invention demonstrate increased intrinsic yield, as compared to a corresponding non-modified, e.g. a non-transformed, wild type plant is conferred if the activity of a polypeptide comprising the polypeptide shown in SEQ ID NO. 13502, or encoded by a nucleic acid molecule comprising the nucleic acid molecule shown in SEQ ID NO. 13501, or a homolog of said nucleic acid molecule or polypeptide, is increased or generated. For example, the activity of a corresponding nucleic acid molecule or a polypeptide derived from Oryza sativa is increased or generated, preferably comprising the nucleic acid molecule shown in SEQ ID NO. 13501 or polypeptide shown in SEQ ID NO. 13502, respectively, or a homolog thereof. E.g. an increased tolerance to abiotic environmental stress, in particular increased intrinsic yield, compared to a corresponding non-modified, e.g. a non-transformed, wild type plant is conferred if the activity “OS02G44730-protein” or if the activity of a nucleic acid molecule or a polypeptide comprising the nucleic acid or polypeptide or the consensus sequence or the polypeptide motif, depicted in table I, II or IV, column 7, respective same line as SEQ ID NO.: 13501 or SEQ ID NO.: 13502, respectively, is increased or generated in a plant or part thereof. Preferably, the increase occurs cytoplasmic. Particularly, an increase of yield from 1.05-fold to 1.30-fold, for example plus at least 100% thereof, under standard conditions, e.g. in the absence of nutrient deficiency and/or stress conditions is conferred compared to a corresponding control, e.g. an non-modified, e.g. non-transformed, wild type plant.

[0140] The transgenic plants of the present invention demonstrate increased intrinsic yield, as compared to a corresponding non-modified, e.g. a non-transformed, wild type plant is conferred if the activity of a polypeptide comprising the polypeptide shown in SEQ ID NO. 13103, or encoded by a nucleic acid molecule comprising the nucleic acid molecule shown in SEQ ID NO. 13102, or a homolog of said nucleic acid molecule or polypeptide, is increased or generated. For example, the activity of a corresponding nucleic acid molecule or a polypeptide derived from Arabidopsis thaliana is increased or generated, preferably comprising the nucleic acid molecule shown in SEQ ID NO. 13102 or polypeptide shown in SEQ ID NO. 13103, respectively, or a homolog thereof. E.g. an increased tolerance to abiotic environmental stress, in particular increased intrinsic yield, compared to a corresponding non-modified, e.g. a non-transformed, wild type plant is conferred if the activity “ubiquitin-conjugating enzyme” or if the activity of a nucleic acid molecule or a polypeptide comprising the nucleic acid or polypeptide or the consensus sequence or the polypeptide motif, depicted in table I, II or IV, column 7, respective same line as SEQ ID NO.: 13102 or SEQ ID NO.: 13103, respectively, is increased or generated in a plant or part thereof. Preferably, the increase occurs cytoplasmic. Particularly, an increase of yield from 1.05-fold to 1.23-fold, for example plus at least 100% thereof, under standard conditions, e.g. in the absence of nutrient deficiency and/or stress conditions is conferred compared to a corresponding control, e.g. an non-modified, e.g. non-transformed, wild type plant.

[0141] In one embodiment, a nucleic acid molecule indicated in Table VIIId or its homolog as indicated in Table I or the expression product is used in the method of the present invention to increase intrinsic yield, e.g. to increase yield under standard conditions, e.g. increase biomass under non-deficiency or non-stress conditions, of the plant compared to the wild type control.

[0142] A plant's tolerance to drought may be measured by monitoring any of the phenotypes described above in a field during a drought, or in a model system in a drought assay such as a cycling drought or water use efficiency assay. Experimental designs of cycling drought assays and water use efficiency assays are known. An increased drought tolerance may be demonstrated, for example, by survival of a transgenic corn, soy, oilseed rape, or cotton plant produced in accordance with the present invention under water-limiting conditions which would stunt or destroy a control plant of the respective species.

[0143] Water use efficiency (WUE) is a parameter often correlated with drought tolerance. An increase in biomass at low water availability may be due to relatively improved efficiency of growth or reduced water consumption. In selecting traits for improving crops, a decrease in water use, without a change in growth would have particular merit in an irrigated agricultural system where the water input costs were high. An increase in growth without a corresponding jump in water use would have applicability to all agricultural systems. In many agricultural systems where water supply is not limiting, an increase in growth, even if it came at the expense of an increase in water use also increases yield.

[0144] When soil water is depleted or if water is not available during periods of drought, crop yields are restricted. Plant water deficit develops if transpiration from leaves exceeds the supply of water from the roots. The available water supply is related to the amount of water held in the soil and the ability of the plant to reach that water with its root system. Transpiration of water from leaves is linked to the fixation of carbon dioxide by photosynthesis through the stomata. The two processes are positively correlated so that high carbon dioxide influx through photosynthesis is closely linked to water loss by transpiration. As water transpires from the leaf, leaf water potential is reduced and the stomata tend to close in a hydraulic process limiting the amount of photosynthesis. Since crop yield is dependent on the fixation of carbon dioxide in photosynthesis, water uptake and transpiration are contributing factors to crop yield. Plants which are able to use less water to fix the same amount of carbon dioxide or which are able to function normally at a lower water potential have the potential to conduct more photosynthesis and thereby to produce more biomass and economic yield in many agricultural systems.

[0145] For example, increased tolerance to drought conditions can be determined and quantified according to the following method: Transformed plants are grown individually in pots in a growth chamber (York Industriekälte GmbH, Mannheim, Germany). Germination is induced. In case the plants are Arabidopsis thaliana sown seeds are kept at 4° C., in the dark, for 3 days in order to induce germination. Subsequently conditions are changed for 3 days to 20° C./6° C. day/night temperature with a 16/8 h day-night cycle at 150 μE/m²s. Subsequently the plants are grown under standard growth conditions. In case the plants are Arabidopsis thaliana, the standard growth conditions are: photoperiod of 16 h light and 8 h dark, 20° C., 60% relative humidity, and a photon flux density of 200 μE. Plants are grown and cultured until they develop leaves. In case the plants are Arabidopsis thaliana they are watered daily until they were approximately 3 weeks old. Starting at that time drought was imposed by withholding water. After the non-transformed wild type plants show visual symptoms of injury, the evaluation starts and plants are scored for symptoms of drought symptoms and biomass production comparison to wild type and neighboring plants for 5-6 days in succession. The tolerance to drought, e.g. the tolerance to cycling drought can be determined according to the method described in the examples. The tolerance to drought can be a tolerance to cycling drought.

[0146] Accordingly, in one embodiment, the present invention relates to a method for increasing the yield, comprising the following steps:

(a) determining, whether the water supply in the area for planting is optimal or suboptimal for the growth of an origin or wild type plant, e.g. a crop, and/or determining the visual symptoms of injury of plants growing in the area for planting; and
(b1) growing the plant of the invention in said soil, if the water supply is suboptimal for the growth of an origin or wild type plant or visual symptoms for drought can be found at a standard, origin or wild type plant growing in the area; or
(b2) growing the plant of the invention in the soil and comparing the yield with the yield of a standard, an origin or a wild type plant and selecting and growing the plant, which shows a higher yield or the highest yield, if the water supply is optimal for the origin or wild type plant.
Visual symptoms of injury stating for one or any combination of two, three or more of the following features: wilting; leaf browning; loss of turgor, which results in drooping of leaves or needles stems, and flowers; drooping and/or shedding of leaves or needles; the leaves are green but leaf angled slightly toward the ground compared with controls; leaf blades begun to fold (curl) inward; premature senescence of leaves or needles; loss of chlorophyll in leaves or needles and/or yellowing.

[0147] Another yield-related phenotype is increased nutrient use efficiency. The genes identified in Table I, or homologs thereof, may be used to enhance nutrient use efficiency in transgenic plants. Such transgenic plants may demonstrate enhanced yield, as measured by any of the phenotypes described above, with current commercial levels of fertilizer application. Alternatively or additionally, transgenic plants with improved nutrient use efficiency may demonstrate equivalent yield or improved yield with reduced fertilizer input.

[0148] A particularly important nutrient for plants is nitrogen. In accordance with the invention, transgenic plants comprising a gene identified in Table I, or a homolog thereof, demonstrate increased nitrogen use efficiency (NUE), which is increased harvestable yield per unit of input nitrogen fertilizer. Increased nitrogen use efficiency may be determined by measuring any of the yield-related phenotypes described above, in plants which have been grown under conditions of controlled nitrogen soil concentrations, both in the field and in model systems. An exemplary nitrogen use efficiency assay is set forth below. An increased nitrogen use efficiency of a transgenic corn, soy, oilseed rape, or cotton plant in accordance with the present invention may be demonstrated, for example, by an improved or increased protein content of the respective seed, in particular in corn seed used as feed. Increased nitrogen use efficiency relates also to an increased kernel size or a higher kernel number per plant.

[0149] Accordingly, in a further embodiment, an increased nutrient use efficiency compared to a corresponding non-modified, e.g. a non-transformed, wild type plant is conferred if the activity of a polypeptide comprising the polypeptide shown in SEQ ID NO. 64, or encoded by a nucleic acid molecule comprising the nucleic acid molecule shown in SEQ ID NO. 63, or a homolog of said nucleic acid molecule or polypeptide, is increased or generated. For example, the activity of a corresponding nucleic acid molecule or a polypeptide derived from Arabidopsis thaliana is increased or generated, preferably comprising the nucleic acid molecule shown in SEQ ID NO. 63 or polypeptide shown in SEQ ID NO. 64, respectively, or a homolog thereof. E.g. an increased tolerance to abiotic environmental stress, in particular increased nutrient use efficiency as compared to a corresponding non-modified, e.g. a non-transformed, wild type plant cell, a plant or a part thereof is conferred if the activity “2-oxoglutarate-dependent dioxygenase or” if the activity of a nucleic acid molecule or a polypeptide comprising the nucleic acid or polypeptide or the consensus sequence or the polypeptide motif, as depicted in table I, II or IV, column 7 respective same line as SEQ ID NO. 63 or SEQ ID NO. 64, respectively, is increased or generated in a plant or part thereof. Preferably, the increase occurs cytoplasmic. Accordingly, in one embodiment increased nitrogen use efficiency is conferred. Particularly, an increase of yield from 1.1-fold to 1.49-fold, for example plus at least 100% thereof, under conditions of nitrogen deficiency is conferred compared to a corresponding non-modified, e.g. non-transformed, wild type plant.

[0150] Accordingly, in a further embodiment, an increased nutrient use efficiency compared to a corresponding non-modified, e.g. a non-transformed, wild type plant is conferred if the activity of a polypeptide comprising the polypeptide shown in SEQ ID NO. 385, or encoded by a nucleic acid molecule comprising the nucleic acid molecule shown in SEQ ID NO. 384, or a homolog of said nucleic acid molecule or polypeptide, is increased or generated. For example, the activity of a corresponding nucleic acid molecule or a polypeptide derived from Arabidopsis thaliana is increased or generated, preferably comprising the nucleic acid molecule shown in SEQ ID NO. 384 or polypeptide shown in SEQ ID NO. 385, respectively, or a homolog thereof. E.g. an increased tolerance to abiotic environmental stress, in particular increased nutrient use efficiency as compared to a corresponding non-modified, e.g. a non-transformed, wild type plant cell, a plant or a part thereof is conferred if the activity “Oxygen-evolving enhancer protein or” if the activity of a nucleic acid molecule or a polypeptide comprising the nucleic acid or polypeptide or the consensus sequence or the polypeptide motif, as depicted in table I, II or IV, column 7 respective same line as SEQ ID NO. 384 or SEQ ID NO. 385, respectively, is increased or generated in a plant or part thereof. Preferably, the increase occurs cytoplasmic. Accordingly, in one embodiment increased nitrogen use efficiency is conferred. Particularly, an increase of yield from 1.1-fold to 1.37-fold, for example plus at least 100% thereof, under conditions of nitrogen deficiency is conferred compared to a corresponding non-modified, e.g. non-transformed, wild type plant.

[0151] Accordingly, in a further embodiment, an increased nutrient use efficiency compared to a corresponding non-modified, e.g. a non-transformed, wild type plant is conferred if the activity of a polypeptide comprising the polypeptide shown in SEQ ID NO. 505, or encoded by a nucleic acid molecule comprising the nucleic acid molecule shown in SEQ ID NO. 504, or a homolog of said nucleic acid molecule or polypeptide, is increased or generated. For example, the activity of a corresponding nucleic acid molecule or a polypeptide derived from Arabidopsis thaliana is increased or generated, preferably comprising the nucleic acid molecule shown in SEQ ID NO. 504 or polypeptide shown in SEQ ID NO. 505, respectively, or a homolog thereof. E.g. an increased tolerance to abiotic environmental stress, in particular increased nutrient use efficiency as compared to a corresponding non-modified, e.g. a non-transformed, wild type plant cell, a plant or a part thereof is conferred if the activity “2-oxoglutarate-dependent dioxygenase or” if the activity of a nucleic acid molecule or a polypeptide comprising the nucleic acid or polypeptide or the consensus sequence or the polypeptide motif, as depicted in table I, II or IV, column 7 respective same line as SEQ ID NO. 504 or SEQ ID NO. 505, respectively, is increased or generated in a plant or part thereof. Preferably, the increase occurs cytoplasmic. Accordingly, in one embodiment increased nitrogen use efficiency is conferred. Particularly, an increase of yield from 1.1-fold to 1.28-fold, for example plus at least 100% thereof, under conditions of nitrogen deficiency is conferred compared to a corresponding non-modified, e.g. non-transformed, wild type plant.

[0152] Accordingly, in a further embodiment, an increased nutrient use efficiency compared to a corresponding non-modified, e.g. a non-transformed, wild type plant is conferred if the activity of a polypeptide comprising the polypeptide shown in SEQ ID NO. 608, or encoded by a nucleic acid molecule comprising the nucleic acid molecule shown in SEQ ID NO. 607, or a homolog of said nucleic acid molecule or polypeptide, is increased or generated. For example, the activity of a corresponding nucleic acid molecule or a polypeptide derived from Arabidopsis thaliana is increased or generated, preferably comprising the nucleic acid molecule shown in SEQ ID NO. 607 or polypeptide shown in SEQ ID NO. 608, respectively, or a homolog thereof. E.g. an increased tolerance to abiotic environmental stress, in particular increased nutrient use efficiency as compared to a corresponding non-modified, e.g. a non-transformed, wild type plant cell, a plant or a part thereof is conferred if the activity “peptidyl-prolyl cis-trans isomerase family protein or” if the activity of a nucleic acid molecule or a polypeptide comprising the nucleic acid or polypeptide or the consensus sequence or the polypeptide motif, as depicted in table I, II or IV, column 7 respective same line as SEQ ID NO. 607 or SEQ ID NO. 608, respectively, is increased or generated in a plant or part thereof. Preferably, the increase occurs cytoplasmic. Accordingly, in one embodiment increased nitrogen use efficiency is conferred. Particularly, an increase of yield from 1.1-fold to 1.28-fold, for example plus at least 100% thereof, under conditions of nitrogen deficiency is conferred compared to a corresponding non-modified, e.g. non-transformed, wild type plant.

[0153] Accordingly, in a further embodiment, an increased nutrient use efficiency compared to a corresponding non-modified, e.g. a non-transformed, wild type plant is conferred if the activity of a polypeptide comprising the polypeptide shown in SEQ ID NO. 642, or encoded by a nucleic acid molecule comprising the nucleic acid molecule shown in SEQ ID NO. 641, or a homolog of said nucleic acid molecule or polypeptide, is increased or generated. For example, the activity of a corresponding nucleic acid molecule or a polypeptide derived from Arabidopsis thaliana is increased or generated, preferably comprising the nucleic acid molecule shown in SEQ ID NO. 641 or polypeptide shown in SEQ ID NO. 642, respectively, or a homolog thereof. E.g. an increased tolerance to abiotic environmental stress, in particular increased nutrient use efficiency as compared to a corresponding non-modified, e.g. a non-transformed, wild type plant cell, a plant or a part thereof is conferred if the activity “AT1G53885-protein or” if the activity of a nucleic acid molecule or a polypeptide comprising the nucleic acid or polypeptide or the consensus sequence or the polypeptide motif, as depicted in table I, II or IV, column 7 respective same line as SEQ ID NO. 641 or SEQ ID NO. 642, respectively, is increased or generated in a plant or part thereof. Preferably, the increase occurs cytoplasmic. Accordingly, in one embodiment increased nitrogen use efficiency is conferred. Particularly, an increase of yield from 1.1-fold to 1.33-fold, for example plus at least 100% thereof, under conditions of nitrogen deficiency is conferred compared to a corresponding non-modified, e.g. non-transformed, wild type plant.

[0154] Accordingly, in a further embodiment, an increased nutrient use efficiency compared to a corresponding non-modified, e.g. a non-transformed, wild type plant is conferred if the activity of a polypeptide comprising the polypeptide shown in SEQ ID NO. 673, or encoded by a nucleic acid molecule comprising the nucleic acid molecule shown in SEQ ID NO. 672, or a homolog of said nucleic acid molecule or polypeptide, is increased or generated. For example, the activity of a corresponding nucleic acid molecule or a polypeptide derived from Arabidopsis thaliana is increased or generated, preferably comprising the nucleic acid molecule shown in SEQ ID NO. 672 or polypeptide shown in SEQ ID NO. 673, respectively, or a homolog thereof. E.g. an increased tolerance to abiotic environmental stress, in particular increased nutrient use efficiency as compared to a corresponding non-modified, e.g. a non-transformed, wild type plant cell, a plant or a part thereof is conferred if the activity “peptidyl-prolyl cis-trans isomerase or” if the activity of a nucleic acid molecule or a polypeptide comprising the nucleic acid or polypeptide or the consensus sequence or the polypeptide motif, as depicted in table I, II or IV, column 7 respective same line as SEQ ID NO. 672 or SEQ ID NO. 673, respectively, is increased or generated in a plant or part thereof. Preferably, the increase occurs cytoplasmic. Accordingly, in one embodiment increased nitrogen use efficiency is conferred. Particularly, an increase of yield from 1.1-fold to 1.19-fold, for example plus at least 100% thereof, under conditions of nitrogen deficiency is conferred compared to a corresponding non-modified, e.g. non-transformed, wild type plant.

[0155] Accordingly, in a further embodiment, an increased nutrient use efficiency compared to a corresponding non-modified, e.g. a non-transformed, wild type plant is conferred if the activity of a polypeptide comprising the polypeptide shown in SEQ ID NO. 1552, or encoded by a nucleic acid molecule comprising the nucleic acid molecule shown in SEQ ID NO. 1551, or a homolog of said nucleic acid molecule or polypeptide, is increased or generated. For example, the activity of a corresponding nucleic acid molecule or a polypeptide derived from Arabidopsis thaliana is increased or generated, preferably comprising the nucleic acid molecule shown in SEQ ID NO. 1551 or polypeptide shown in SEQ ID NO. 1552, respectively, or a homolog thereof. E.g. an increased tolerance to abiotic environmental stress, in particular increased nutrient use efficiency as compared to a corresponding non-modified, e.g. a non-transformed, wild type plant cell, a plant or a part thereof is conferred if the activity “Polypyrimidine tract binding protein or” if the activity of a nucleic acid molecule or a polypeptide comprising the nucleic acid or polypeptide or the consensus sequence or the polypeptide motif, as depicted in table I, II or IV, column 7 respective same line as SEQ ID NO. 1551 or SEQ ID NO. 1552, respectively, is increased or generated in a plant or part thereof. Preferably, the increase occurs cytoplasmic. Accordingly, in one embodiment increased nitrogen use efficiency is conferred. Particularly, an increase of yield from 1.1-fold to 1.17-fold, for example plus at least 100% thereof, under conditions of nitrogen deficiency is conferred compared to a corresponding non-modified, e.g. non-transformed, wild type plant.

[0156] Accordingly, in a further embodiment, an increased nutrient use efficiency compared to a corresponding non-modified, e.g. a non-transformed, wild type plant is conferred if the activity of a polypeptide comprising the polypeptide shown in SEQ ID NO. 1629, or encoded by a nucleic acid molecule comprising the nucleic acid molecule shown in SEQ ID NO. 1628, or a homolog of said nucleic acid molecule or polypeptide, is increased or generated. For example, the activity of a corresponding nucleic acid molecule or a polypeptide derived from Arabidopsis thaliana is increased or generated, preferably comprising the nucleic acid molecule shown in SEQ ID NO. 1628 or polypeptide shown in SEQ ID NO. 1629, respectively, or a homolog thereof. E.g. an increased tolerance to abiotic environmental stress, in particular increased nutrient use efficiency as compared to a corresponding non-modified, e.g. a non-transformed, wild type plant cell, a plant or a part thereof is conferred if the activity “AT5G47440-protein or” if the activity of a nucleic acid molecule or a polypeptide comprising the nucleic acid or polypeptide or the consensus sequence or the polypeptide motif, as depicted in table I, II or IV, column 7 respective same line as SEQ ID NO. 1628 or SEQ ID NO. 1629, respectively, is increased or generated in a plant or part thereof. Preferably, the increase occurs cytoplasmic. Accordingly, in one embodiment increased nitrogen use efficiency is conferred. Particularly, an increase of yield from 1.1-fold to 1.56-fold, for example plus at least 100% thereof, under conditions of nitrogen deficiency is conferred compared to a corresponding non-modified, e.g. non-transformed, wild type plant.

[0157] Accordingly, in a further embodiment, an increased nutrient use efficiency compared to a corresponding non-modified, e.g. a non-transformed, wild type plant is conferred if the activity of a polypeptide comprising the polypeptide shown in SEQ ID NO. 1710, or preferably, in SEQ ID NO.: 2220, or encoded by a nucleic acid molecule comprising the nucleic acid molecule shown in SEQ ID NO. 1709, or preferably in SEQ ID NO.: 2219, or a homolog of said nucleic acid molecule or polypeptide, is increased or generated. For example, the activity of a corresponding nucleic acid molecule or a polypeptide derived from Escherichia coli is increased or generated, preferably comprising the nucleic acid molecule shown in SEQ ID NO. 1709 or SEQ ID NO.: 2219 or polypeptide shown in SEQ ID NO. 1710 or SEQ ID NO.: 2220, respectively, or a homolog thereof. E.g. an increased tolerance to abiotic environmental stress, in particular increased nutrient use efficiency as compared to a corresponding non-modified, e.g. a non-transformed, wild type plant cell, a plant or a part thereof is conferred if the activity “4-diphosphocytidyl-2-C-methyl-D-erythritol kinase or” if the activity of a nucleic acid molecule or a polypeptide comprising the nucleic acid or polypeptide or the consensus sequence or the polypeptide motif, as depicted in table I, II or IV, column 7 respective same line as SEQ ID NO. 1709 or 2219 or SEQ ID NO. 1710 or 2220, respectively, is increased or generated in a plant or part thereof. Preferably, the increase occurs plastidic. Accordingly, in one embodiment an increased nitrogen use efficiency is conferred. Particularly, an increase of yield from 1.1-fold to 1.27-fold, for example plus at least 100% thereof, under conditions of nitrogen deficiency is conferred compared to a corresponding non-modified, e.g. non-transformed, wild type plant. In a preferred embodiment, an increased nutrient use efficiency in a plant is achieve by increasing the activity or amount of a polpypeptide comprising the sequence of SEQ ID No.: 2220 or a homolog thereof, which is 60%, 65%, 705; 80%, 5%, 90%, 95%, 97%, 98% or 99% or 100% identical to SEQ ID NO.: 2220, or increasing the gene expression of a nucleic acid molecule comprising the sequence shown in SEQ ID NO.: 2219 or a molecule comprising a sequence which is 60%, 65%, 70%, 75%, 80%, 85%, 90%, 95%, 97%, 98%, or 99% or 100% identical to SEQ ID No.: 2219.

[0158] Accordingly, in a further embodiment, an increased nutrient use efficiency compared to a corresponding non-modified, e.g. a non-transformed, wild type plant is conferred if the activity of a polypeptide comprising the polypeptide shown in SEQ ID NO. 2227, or, preferably, as shown in SEQ ID NO.: 2447, or encoded by a nucleic acid molecule comprising the nucleic acid molecule shown in SEQ ID NO. 2226, or, preferably, as shown in SEQ ID NO.: 2246, or a homolog of said nucleic acid molecule or polypeptide, is increased or generated. For example, the activity of a corresponding nucleic acid molecule or a polypeptide derived from Escherichia coli is increased or generated, preferably comprising the nucleic acid molecule shown in SEQ ID NO. 2226, or SEQ ID NO.: 2246, or polypeptide shown in SEQ ID NO. 2227, or SEQ ID NO.: 2447, respectively, or a homolog thereof. E.g. an increased tolerance to abiotic environmental stress, in particular increased nutrient use efficiency as compared to a corresponding non-modified, e.g. a non-transformed, wild type plant cell, a plant or a part thereof is conferred if the activity “3′-phosphoadenosine 5′-phosphate phosphatase or” if the activity of a nucleic acid molecule or a polypeptide comprising the nucleic acid or polypeptide or the consensus sequence or the polypeptide motif, as depicted in table I, II or IV, column 7 respective same line as SEQ ID NO. 2226 or 2446 or SEQ ID NO. 2227 or 2447, respectively, is increased or generated in a plant or part thereof. Preferably, the increase occurs plastidic. Accordingly, in one embodiment an increased nitrogen use efficiency is conferred. Particularly, an increase of yield from 1.1-fold to 1.15-fold, for example plus at least 100% thereof, under conditions of nitrogen deficiency is conferred compared to a corresponding non-modified, e.g. non-transformed, wild type plant. In a preferred embodiment, an increased nutrient use efficiency in a plant is achieve by increasing the activity or amount of a polpypeptide comprising the sequence of SEQ ID No.: 2447 or a homolog thereof, which is 60%, 65%, 705; 80%, 5%, 90%, 95%, 97%, 98%, or 99% or 100% identical to SEQ ID NO.: 2447, or increasing the gene expression of a nucleic acid molecule comprising the sequence shown in SEQ ID NO.: 2446 or a molecule comprising a sequence which is 60%, 65%, 70%, 75%, 80%, 85%, 90%, 95%, 97%, 98%, or 99% or 100% identical to SEQ ID No.: 2446.

[0159] Accordingly, in a further embodiment, an increased nutrient use efficiency compared to a corresponding non-modified, e.g. a non-transformed, wild type plant is conferred if the activity of a polypeptide comprising the polypeptide shown in SEQ ID NO. 2458, or encoded by a nucleic acid molecule comprising the nucleic acid molecule shown in SEQ ID NO. 2457, or a homolog of said nucleic acid molecule or polypeptide, is increased or generated. For example, the activity of a corresponding nucleic acid molecule or a polypeptide derived from Populus trichocarpa is increased or generated, preferably comprising the nucleic acid molecule shown in SEQ ID NO. 2457 or polypeptide shown in SEQ ID NO. 2458, respectively, or a homolog thereof. E.g. an increased tolerance to abiotic environmental stress, in particular increased nutrient use efficiency as compared to a corresponding non-modified, e.g. a non-transformed, wild type plant cell, a plant or a part thereof is conferred if the activity “3-ketoacyl-CoA thiolase or” if the activity of a nucleic acid molecule or a polypeptide comprising the nucleic acid or polypeptide or the consensus sequence or the polypeptide motif, as depicted in table I, II or IV, column 7 respective same line as SEQ ID NO. 2457 or SEQ ID NO. 2458, respectively, is increased or generated in a plant or part thereof. Preferably, the increase occurs cytoplasmic. Accordingly, in one embodiment increased nitrogen use efficiency is conferred. Particularly, an increase of yield from 1.1-fold to 1.25-fold, for example plus at least 100% thereof, under conditions of nitrogen deficiency is conferred compared to a corresponding non-modified, e.g. non-transformed, wild type plant.

[0160] Accordingly, in a further embodiment, an increased nutrient use efficiency compared to a corresponding non-modified, e.g. a non-transformed, wild type plant is conferred if the activity of a polypeptide comprising the polypeptide shown in SEQ ID NO. 3464, or encoded by a nucleic acid molecule comprising the nucleic acid molecule shown in SEQ ID NO. 3463, or a homolog of said nucleic acid molecule or polypeptide, is increased or generated. For example, the activity of a corresponding nucleic acid molecule or a polypeptide derived from Populus trichocarpa is increased or generated, preferably comprising the nucleic acid molecule shown in SEQ ID NO. 3463 or polypeptide shown in SEQ ID NO. 3464, respectively, or a homolog thereof. E.g. an increased tolerance to abiotic environmental stress, in particular increased nutrient use efficiency as compared to a corresponding non-modified, e.g. a non-transformed, wild type plant cell, a plant or a part thereof is conferred if the activity “60S ribosomal protein or” if the activity of a nucleic acid molecule or a polypeptide comprising the nucleic acid or polypeptide or the consensus sequence or the polypeptide motif, as depicted in table I, II or IV, column 7 respective same line as SEQ ID NO. 3463 or SEQ ID NO. 3464, respectively, is increased or generated in a plant or part thereof. Preferably, the increase occurs cytoplasmic. Accordingly, in one embodiment increased nitrogen use efficiency is conferred. Particularly, an increase of yield from 1.1-fold to 1.13-fold, for example plus at least 100% thereof, under conditions of nitrogen deficiency is conferred compared to a corresponding non-modified, e.g. non-transformed, wild type plant.

[0161] Accordingly, in a further embodiment, an increased nutrient use efficiency compared to a corresponding non-modified, e.g. a non-transformed, wild type plant is conferred if the activity of a polypeptide comprising the polypeptide shown in SEQ ID NO. 3795, or encoded by a nucleic acid molecule comprising the nucleic acid molecule shown in SEQ ID NO. 3794, or a homolog of said nucleic acid molecule or polypeptide, is increased or generated. For example, the activity of a corresponding nucleic acid molecule or a polypeptide derived from Populus trichocarpa is increased or generated, preferably comprising the nucleic acid molecule shown in SEQ ID NO. 3794 or polypeptide shown in SEQ ID NO. 3795, respectively, or a homolog thereof. E.g. an increased tolerance to abiotic environmental stress, in particular increased nutrient use efficiency as compared to a corresponding non-modified, e.g. a non-transformed, wild type plant cell, a plant or a part thereof is conferred if the activity “serine hydroxymethyltransferase or” if the activity of a nucleic acid molecule or a polypeptide comprising the nucleic acid or polypeptide or the consensus sequence or the polypeptide motif, as depicted in table I, II or IV, column 7 respective same line as SEQ ID NO. 3794 or SEQ ID NO. 3795, respectively, is increased or generated in a plant or part thereof. Preferably, the increase occurs cytoplasmic. Accordingly, in one embodiment increased nitrogen use efficiency is conferred. Particularly, an increase of yield from 1.1-fold to 1.35-fold, for example plus at least 100% thereof, under conditions of nitrogen deficiency is conferred compared to a corresponding non-modified, e.g. non-transformed, wild type plant.

[0162] Accordingly, in a further embodiment, an increased nutrient use efficiency compared to a corresponding non-modified, e.g. a non-transformed, wild type plant is conferred if the activity of a polypeptide comprising the polypeptide shown in SEQ ID NO. 4631, or encoded by a nucleic acid molecule comprising the nucleic acid molecule shown in SEQ ID NO. 4630, or a homolog of said nucleic acid molecule or polypeptide, is increased or generated. For example, the activity of a corresponding nucleic acid molecule or a polypeptide derived from Thermus thermophilus is increased or generated, preferably comprising the nucleic acid molecule shown in SEQ ID NO. 4630 or polypeptide shown in SEQ ID NO. 4631, respectively, or a homolog thereof. E.g. an increased tolerance to abiotic environmental stress, in particular increased nutrient use efficiency as compared to a corresponding non-modified, e.g. a non-transformed, wild type plant cell, a plant or a part thereof is conferred if the activity “S-ribosylhomocysteinase or” if the activity of a nucleic acid molecule or a polypeptide comprising the nucleic acid or polypeptide or the consensus sequence or the polypeptide motif, as depicted in table I, II or IV, column 7 respective same line as SEQ ID NO. 4630 or SEQ ID NO. 4631, respectively, is increased or generated in a plant or part thereof. Preferably, the increase occurs cytoplasmic. Accordingly, in one embodiment increased nitrogen use efficiency is conferred. Particularly, an increase of yield from 1.1-fold to 1.36-fold, for example plus at least 100% thereof, under conditions of nitrogen deficiency is conferred compared to a corresponding non-modified, e.g. non-transformed, wild type plant.

[0163] Accordingly, in a further embodiment, an increased nutrient use efficiency compared to a corresponding non-modified, e.g. a non-transformed, wild type plant is conferred if the activity of a polypeptide comprising the polypeptide shown in SEQ ID NO. 5043, or encoded by a nucleic acid molecule comprising the nucleic acid molecule shown in SEQ ID NO. 5042, or a homolog of said nucleic acid molecule or polypeptide, is increased or generated. For example, the activity of a corresponding nucleic acid molecule or a polypeptide derived from Saccharomyces cerevisiae is increased or generated, preferably comprising the nucleic acid molecule shown in SEQ ID NO. 5042 or polypeptide shown in SEQ ID NO. 5043, respectively, or a homolog thereof. E.g. an increased tolerance to abiotic environmental stress, in particular increased nutrient use efficiency as compared to a corresponding non-modified, e.g. a non-transformed, wild type plant cell, a plant or a part thereof is conferred if the activity “Vacuolar protein or” if the activity of a nucleic acid molecule or a polypeptide comprising the nucleic acid or polypeptide or the consensus sequence or the polypeptide motif, as depicted in table I, II or IV, column 7 respective same line as SEQ ID NO. 5042 or SEQ ID NO. 5043, respectively, is increased or generated in a plant or part thereof. Preferably, the increase occurs cytoplasmic. Accordingly, in one embodiment increased nitrogen use efficiency is conferred. Particularly, an increase of yield from 1.1-fold to 1.29-fold, for example plus at least 100% thereof, under conditions of nitrogen deficiency is conferred compared to a corresponding non-modified, e.g. non-transformed, wild type plant.

[0164] Accordingly, in a further embodiment, an increased nutrient use efficiency compared to a corresponding non-modified, e.g. a non-transformed, wild type plant is conferred if the activity of a polypeptide comprising the polypeptide shown in SEQ ID NO. 5070, or encoded by a nucleic acid molecule comprising the nucleic acid molecule shown in SEQ ID NO. 5069, or a homolog of said nucleic acid molecule or polypeptide, is increased or generated. For example, the activity of a corresponding nucleic acid molecule or a polypeptide derived from Saccharomyces cerevisiae is increased or generated, preferably comprising the nucleic acid molecule shown in SEQ ID NO. 5069 or polypeptide shown in SEQ ID NO. 5070, respectively, or a homolog thereof. E.g. an increased tolerance to abiotic environmental stress, in particular increased nutrient use efficiency as compared to a corresponding non-modified, e.g. a non-transformed, wild type plant cell, a plant or a part thereof is conferred if the activity “GTPase or” if the activity of a nucleic acid molecule or a polypeptide comprising the nucleic acid or polypeptide or the consensus sequence or the polypeptide motif, as depicted in table I, II or IV, column 7 respective same line as SEQ ID NO. 5069 or SEQ ID NO. 5070, respectively, is increased or generated in a plant or part thereof. Preferably, the increase occurs cytoplasmic. Accordingly, in one embodiment increased nitrogen use efficiency is conferred. Particularly, an increase of yield from 1.1-fold to 1.66-fold, for example plus at least 100% thereof, under conditions of nitrogen deficiency is conferred compared to a corresponding non-modified, e.g. non-transformed, wild type plant.

[0165] Accordingly, in a further embodiment, an increased nutrient use efficiency compared to a corresponding non-modified, e.g. a non-transformed, wild type plant is conferred if the activity of a polypeptide comprising the polypeptide shown in SEQ ID NO. 5493, or encoded by a nucleic acid molecule comprising the nucleic acid molecule shown in SEQ ID NO. 5492, or a homolog of said nucleic acid molecule or polypeptide, is increased or generated. For example, the activity of a corresponding nucleic acid molecule or a polypeptide derived from Zea mays is increased or generated, preferably comprising the nucleic acid molecule shown in SEQ ID NO. 5492 or polypeptide shown in SEQ ID NO. 5493, respectively, or a homolog thereof. E.g. an increased tolerance to abiotic environmental stress, in particular increased nutrient use efficiency as compared to a corresponding non-modified, e.g. a non-transformed, wild type plant cell, a plant or a part thereof is conferred if the activity “Thioredoxin H-type or” if the activity of a nucleic acid molecule or a polypeptide comprising the nucleic acid or polypeptide or the consensus sequence or the polypeptide motif, as depicted in table I, II or IV, column 7 respective same line as SEQ ID NO. 5492 or SEQ ID NO. 5493, respectively, is increased or generated in a plant or part thereof. Preferably, the increase occurs cytoplasmic. Accordingly, in one embodiment increased nitrogen use efficiency is conferred. Particularly, an increase of yield from 1.1-fold to 1.10-fold, for example plus at least 100% thereof, under conditions of nitrogen deficiency is conferred compared to a corresponding non-modified, e.g. non-transformed, wild type plant.

[0166] Accordingly, in a further embodiment, an increased nutrient use efficiency compared to a corresponding non-modified, e.g. a non-transformed, wild type plant is conferred if the activity of a polypeptide comprising the polypeptide shown in SEQ ID NO. 5839, or encoded by a nucleic acid molecule comprising the nucleic acid molecule shown in SEQ ID NO. 5838, or a homolog of said nucleic acid molecule or polypeptide, is increased or generated. For example, the activity of a corresponding nucleic acid molecule or a polypeptide derived from Arabidopsis thaliana is increased or generated, preferably comprising the nucleic acid molecule shown in SEQ ID NO. 5838 or polypeptide shown in SEQ ID NO. 5839, respectively, or a homolog thereof. E.g. an increased tolerance to abiotic environmental stress, in particular increased nutrient use efficiency as compared to a corresponding non-modified, e.g. a non-transformed, wild type plant cell, a plant or a part thereof is conferred if the activity “AT1G29250.1-protein or” if the activity of a nucleic acid molecule or a polypeptide comprising the nucleic acid or polypeptide or the consensus sequence or the polypeptide motif, as depicted in table I, II or IV, column 7 respective same line as SEQ ID NO. 5838 or SEQ ID NO. 5839, respectively, is increased or generated in a plant or part thereof. Preferably, the increase occurs cytoplasmic. Accordingly, in one embodiment increased nitrogen use efficiency is conferred. Particularly, an increase of yield from 1.05-fold to 1.06-fold, for example plus at least 100% thereof, under conditions of nitrogen deficiency is conferred compared to a corresponding non-modified, e.g. non-transformed, wild type plant.

[0167] Accordingly, in a further embodiment, an increased nutrient use efficiency compared to a corresponding non-modified, e.g. a non-transformed, wild type plant is conferred if the activity of a polypeptide comprising the polypeptide shown in SEQ ID NO. 5983, or encoded by a nucleic acid molecule comprising the nucleic acid molecule shown in SEQ ID NO. 5982, or a homolog of said nucleic acid molecule or polypeptide, is increased or generated. For example, the activity of a corresponding nucleic acid molecule or a polypeptide derived from Arabidopsis thaliana is increased or generated, preferably comprising the nucleic acid molecule shown in SEQ ID NO. 5982 or polypeptide shown in SEQ ID NO. 5983, respectively, or a homolog thereof. E.g. an increased tolerance to abiotic environmental stress, in particular increased nutrient use efficiency as compared to a corresponding non-modified, e.g. a non-transformed, wild type plant cell, a plant or a part thereof is conferred if the activity “serine acetyltransferase or” if the activity of a nucleic acid molecule or a polypeptide comprising the nucleic acid or polypeptide or the consensus sequence or the polypeptide motif, as depicted in table I, II or IV, column 7 respective same line as SEQ ID NO. 5982 or SEQ ID NO. 5983, respectively, is increased or generated in a plant or part thereof. Preferably, the increase occurs cytoplasmic. Accordingly, in one embodiment increased nitrogen use efficiency is conferred. Particularly, an increase of yield from 1.1-fold to 1.15-fold, for example plus at least 100% thereof, under conditions of nitrogen deficiency is conferred compared to a corresponding non-modified, e.g. non-transformed, wild type plant.

[0168] Accordingly, in a further embodiment, an increased nutrient use efficiency compared to a corresponding non-modified, e.g. a non-transformed, wild type plant is conferred if the activity of a polypeptide comprising the polypeptide shown in SEQ ID NO. 6495, or encoded by a nucleic acid molecule comprising the nucleic acid molecule shown in SEQ ID NO. 6494, or a homolog of said nucleic acid molecule or polypeptide, is increased or generated. For example, the activity of a corresponding nucleic acid molecule or a polypeptide derived from Arabidopsis thaliana is increased or generated, preferably comprising the nucleic acid molecule shown in SEQ ID NO. 6494 or polypeptide shown in SEQ ID NO. 6495, respectively, or a homolog thereof. E.g. an increased tolerance to abiotic environmental stress, in particular increased nutrient use efficiency as compared to a corresponding non-modified, e.g. a non-transformed, wild type plant cell, a plant or a part thereof is conferred if the activity “histone H2B or” if the activity of a nucleic acid molecule or a polypeptide comprising the nucleic acid or polypeptide or the consensus sequence or the polypeptide motif, as depicted in table I, II or IV, column 7 respective same line as SEQ ID NO. 6494 or SEQ ID NO. 6495, respectively, is increased or generated in a plant or part thereof. Preferably, the increase occurs cytoplasmic. Accordingly, in one embodiment increased nitrogen use efficiency is conferred. Particularly, an increase of yield from 1.1-fold to 1.20-fold, for example plus at least 100% thereof, under conditions of nitrogen deficiency is conferred compared to a corresponding non-modified, e.g. non-transformed, wild type plant.

[0169] Accordingly, in a further embodiment, an increased nutrient use efficiency compared to a corresponding non-modified, e.g. a non-transformed, wild type plant is conferred if the activity of a polypeptide comprising the polypeptide shown in SEQ ID NO. 7365, or encoded by a nucleic acid molecule comprising the nucleic acid molecule shown in SEQ ID NO. 7364, or a homolog of said nucleic acid molecule or polypeptide, is increased or generated. For example, the activity of a corresponding nucleic acid molecule or a polypeptide derived from Arabidopsis thaliana is increased or generated, preferably comprising the nucleic acid molecule shown in SEQ ID NO. 7364 or polypeptide shown in SEQ ID NO. 7365, respectively, or a homolog thereof. E.g. an increased tolerance to abiotic environmental stress, in particular increased nutrient use efficiency as compared to a corresponding non-modified, e.g. a non-transformed, wild type plant cell, a plant or a part thereof is conferred if the activity “AT4G01870-protein or” if the activity of a nucleic acid molecule or a polypeptide comprising the nucleic acid or polypeptide or the consensus sequence or the polypeptide motif, as depicted in table I, II or IV, column 7 respective same line as SEQ ID NO. 7364 or SEQ ID NO. 7365, respectively, is increased or generated in a plant or part thereof. Preferably, the increase occurs cytoplasmic. Accordingly, in one embodiment increased nitrogen use efficiency is conferred. Particularly, an increase of yield from 1.1-fold to 1.17-fold, for example plus at least 100% thereof, under conditions of nitrogen deficiency is conferred compared to a corresponding non-modified, e.g. non-transformed, wild type plant.

[0170] Accordingly, in a further embodiment, an increased nutrient use efficiency compared to a corresponding non-modified, e.g. a non-transformed, wild type plant is conferred if the activity of a polypeptide comprising the polypeptide shown in SEQ ID NO. 7435, or encoded by a nucleic acid molecule comprising the nucleic acid molecule shown in SEQ ID NO. 7434, or a homolog of said nucleic acid molecule or polypeptide, is increased or generated. For example, the activity of a corresponding nucleic acid molecule or a polypeptide derived from Arabidopsis thaliana is increased or generated, preferably comprising the nucleic acid molecule shown in SEQ ID NO. 7434 or polypeptide shown in SEQ ID NO. 7435, respectively, or a homolog thereof. E.g. an increased tolerance to abiotic environmental stress, in particular increased nutrient use efficiency as compared to a corresponding non-modified, e.g. a non-transformed, wild type plant cell, a plant or a part thereof is conferred if the activity “protein kinase family protein or” if the activity of a nucleic acid molecule or a polypeptide comprising the nucleic acid or polypeptide or the consensus sequence or the polypeptide motif, as depicted in table I, II or IV, column 7 respective same line as SEQ ID NO. 7434 or SEQ ID NO. 7435, respectively, is increased or generated in a plant or part thereof. Preferably, the increase occurs cytoplasmic. Accordingly, in one embodiment increased nitrogen use efficiency is conferred. Particularly, an increase of yield from 1.1-fold to 1.13-fold, for example plus at least 100% thereof, under conditions of nitrogen deficiency is conferred compared to a corresponding non-modified, e.g. non-transformed, wild type plant.

[0171] Accordingly, in a further embodiment, an increased nutrient use efficiency compared to a corresponding non-modified, e.g. a non-transformed, wild type plant is conferred if the activity of a polypeptide comprising the polypeptide shown in SEQ ID NO. 7514, or encoded by a nucleic acid molecule comprising the nucleic acid molecule shown in SEQ ID NO. 7513, or a homolog of said nucleic acid molecule or polypeptide, is increased or generated. For example, the activity of a corresponding nucleic acid molecule or a polypeptide derived from Arabidopsis thaliana is increased or generated, preferably comprising the nucleic acid molecule shown in SEQ ID NO. 7513 or polypeptide shown in SEQ ID NO. 7514, respectively, or a homolog thereof. E.g. an increased tolerance to abiotic environmental stress, in particular increased nutrient use efficiency as compared to a corresponding non-modified, e.g. a non-transformed, wild type plant cell, a plant or a part thereof is conferred if the activity “AP2 domain-containing transcription factor or” if the activity of a nucleic acid molecule or a polypeptide comprising the nucleic acid or polypeptide or the consensus sequence or the polypeptide motif, as depicted in table I, II or IV, column 7 respective same line as SEQ ID NO. 7513 or SEQ ID NO. 7514, respectively, is increased or generated in a plant or part thereof. Preferably, the increase occurs cytoplasmic. Accordingly, in one embodiment an increased nitrogen use efficiency is conferred. Particularly, an increase of yield from 1.1-fold to 1.33-fold, for example plus at least 100% thereof, under conditions of nitrogen deficiency is conferred compared to a corresponding non-modified, e.g. non-transformed, wild type plant.

[0172] Accordingly, in a further embodiment, an increased nutrient use efficiency compared to a corresponding non-modified, e.g. a non-transformed, wild type plant is conferred if the activity of a polypeptide comprising the polypeptide shown in SEQ ID NO. 7546, or encoded by a nucleic acid molecule comprising the nucleic acid molecule shown in SEQ ID NO. 7545, or a homolog of said nucleic acid molecule or polypeptide, is increased or generated. For example, the activity of a corresponding nucleic acid molecule or a polypeptide derived from Populus trichocarpa is increased or generated, preferably comprising the nucleic acid molecule shown in SEQ ID NO. 7545 or polypeptide shown in SEQ ID NO. 7546, respectively, or a homolog thereof. E.g. an increased tolerance to abiotic environmental stress, in particular increased nutrient use efficiency as compared to a corresponding non-modified, e.g. a non-transformed, wild type plant cell, a plant or a part thereof is conferred if the activity “Oligosaccharyltransferase or” if the activity of a nucleic acid molecule or a polypeptide comprising the nucleic acid or polypeptide or the consensus sequence or the polypeptide motif, as depicted in table I, II or IV, column 7 respective same line as SEQ ID NO. 7545 or SEQ ID NO. 7546, respectively, is increased or generated in a plant or part thereof. Preferably, the increase occurs cytoplasmic. Accordingly, in one embodiment increased nitrogen use efficiency is conferred. Particularly, an increase of yield from 1.1-fold to 1.14-fold, for example plus at least 100% thereof, under conditions of nitrogen deficiency is conferred compared to a corresponding non-modified, e.g. non-transformed, wild type plant.

[0173] Accordingly, in a further embodiment, an increased nutrient use efficiency compared to a corresponding non-modified, e.g. a non-transformed, wild type plant is conferred if the activity of a polypeptide comprising the polypeptide shown in SEQ ID NO. 7722, or encoded by a nucleic acid molecule comprising the nucleic acid molecule shown in SEQ ID NO. 7721, or a homolog of said nucleic acid molecule or polypeptide, is increased or generated. For example, the activity of a corresponding nucleic acid molecule or a polypeptide derived from Arabidopsis thaliana is increased or generated, preferably comprising the nucleic acid molecule shown in SEQ ID NO. 7721 or polypeptide shown in SEQ ID NO. 7722, respectively, or a homolog thereof. E.g. an increased tolerance to abiotic environmental stress, in particular increased nutrient use efficiency as compared to a corresponding non-modified, e.g. a non-transformed, wild type plant cell, a plant or a part thereof is conferred if the activity “ABC transporter family protein or” if the activity of a nucleic acid molecule or a polypeptide comprising the nucleic acid or polypeptide or the consensus sequence or the polypeptide motif, as depicted in table I, II or IV, column 7 respective same line as SEQ ID NO. 7721 or SEQ ID NO. 7722, respectively, is increased or generated in a plant or part thereof. Preferably, the increase occurs cytoplasmic. Accordingly, in one embodiment increased nitrogen use efficiency is conferred. Particularly, an increase of yield from 1.1-fold to 1.24-fold, for example plus at least 100% thereof, under conditions of nitrogen deficiency is conferred compared to a corresponding non-modified, e.g. non-transformed, wild type plant.

[0174] Accordingly, in a further embodiment, an increased nutrient use efficiency compared to a corresponding non-modified, e.g. a non-transformed, wild type plant is conferred if the activity of a polypeptide comprising the polypeptide shown in SEQ ID NO. 8288, or encoded by a nucleic acid molecule comprising the nucleic acid molecule shown in SEQ ID NO. 8287, or a homolog of said nucleic acid molecule or polypeptide, is increased or generated. For example, the activity of a corresponding nucleic acid molecule or a polypeptide derived from Arabidopsis thaliana is increased or generated, preferably comprising the nucleic acid molecule shown in SEQ ID NO. 8287 or polypeptide shown in SEQ ID NO. 8288, respectively, or a homolog thereof. E.g. an increased tolerance to abiotic environmental stress, in particular increased nutrient use efficiency as compared to a corresponding non-modified, e.g. a non-transformed, wild type plant cell, a plant or a part thereof is conferred if the activity “plastid lipid-associated protein or” if the activity of a nucleic acid molecule or a polypeptide comprising the nucleic acid or polypeptide or the consensus sequence or the polypeptide motif, as depicted in table I, II or IV, column 7 respective same line as SEQ ID NO. 8287 or SEQ ID NO. 8288, respectively, is increased or generated in a plant or part thereof. Preferably, the increase occurs cytoplasmic. Accordingly, in one embodiment an increased nitrogen use efficiency is conferred. Particularly, an increase of yield from 1.1-fold to 1.12-fold, for example plus at least 100% thereof, under conditions of nitrogen deficiency is conferred compared to a corresponding non-modified, e.g. non-transformed, wild type plant.

[0175] Accordingly, in a further embodiment, an increased nutrient use efficiency compared to a corresponding non-modified, e.g. a non-transformed, wild type plant is conferred if the activity of a polypeptide comprising the polypeptide shown in SEQ ID NO. 7865, or encoded by a nucleic acid molecule comprising the nucleic acid molecule shown in SEQ ID NO. 7864, or a homolog of said nucleic acid molecule or polypeptide, is increased or generated. For example, the activity of a corresponding nucleic acid molecule or a polypeptide derived from Arabidopsis thaliana is increased or generated, preferably comprising the nucleic acid molecule shown in SEQ ID NO. 7864 or polypeptide shown in SEQ ID NO. 7865, respectively, or a homolog thereof. E.g. an increased tolerance to abiotic environmental stress, in particular increased nutrient use efficiency as compared to a corresponding non-modified, e.g. a non-transformed, wild type plant cell, a plant or a part thereof is conferred if the activity “galactinol synthase or” if the activity of a nucleic acid molecule or a polypeptide comprising the nucleic acid or polypeptide or the consensus sequence or the polypeptide motif, as depicted in table I, II or IV, column 7 respective same line as SEQ ID NO. 7864 or SEQ ID NO. 7865, respectively, is increased or generated in a plant or part thereof. Preferably, the increase occurs cytoplasmic. Accordingly, in one embodiment increased nitrogen use efficiency is conferred. Particularly, an increase of yield from 1.1-fold to 1.17-fold, for example plus at least 100% thereof, under conditions of nitrogen deficiency is conferred compared to a corresponding non-modified, e.g. non-transformed, wild type plant.

[0176] Accordingly, in a further embodiment, an increased nutrient use efficiency compared to a corresponding non-modified, e.g. a non-transformed, wild type plant is conferred if the activity of a polypeptide comprising the polypeptide shown in SEQ ID NO. 8065, or encoded by a nucleic acid molecule comprising the nucleic acid molecule shown in SEQ ID NO. 8064, or a homolog of said nucleic acid molecule or polypeptide, is increased or generated. For example, the activity of a corresponding nucleic acid molecule or a polypeptide derived from Arabidopsis thaliana is increased or generated, preferably comprising the nucleic acid molecule shown in SEQ ID NO. 8064 or polypeptide shown in SEQ ID NO. 8065, respectively, or a homolog thereof. E.g. an increased tolerance to abiotic environmental stress, in particular increased nutrient use efficiency as compared to a corresponding non-modified, e.g. a non-transformed, wild type plant cell, a plant or a part thereof is conferred if the activity “jasmonate-zim-domain protein or” if the activity of a nucleic acid molecule or a polypeptide comprising the nucleic acid or polypeptide or the consensus sequence or the polypeptide motif, as depicted in table I, II or IV, column 7 respective same line as SEQ ID NO. 8064 or SEQ ID NO. 8065, respectively, is increased or generated in a plant or part thereof. Preferably, the increase occurs cytoplasmic. Accordingly, in one embodiment increased nitrogen use efficiency is conferred. Particularly, an increase of yield from 1.1-fold to 1.57-fold, for example plus at least 100% thereof, under conditions of nitrogen deficiency is conferred compared to a corresponding non-modified, e.g. non-transformed, wild type plant.

[0177] Accordingly, in a further embodiment, an increased nutrient use efficiency compared to a corresponding non-modified, e.g. a non-transformed, wild type plant is conferred if the activity of a polypeptide comprising the polypeptide shown in SEQ ID NO. 8105, or encoded by a nucleic acid molecule comprising the nucleic acid molecule shown in SEQ ID NO. 8104, or a homolog of said nucleic acid molecule or polypeptide, is increased or generated. For example, the activity of a corresponding nucleic acid molecule or a polypeptide derived from Arabidopsis thaliana is increased or generated, preferably comprising the nucleic acid molecule shown in SEQ ID NO. 8104 or polypeptide shown in SEQ ID NO. 8105, respectively, or a homolog thereof. E.g. an increased tolerance to abiotic environmental stress, in particular increased nutrient use efficiency as compared to a corresponding non-modified, e.g. a non-transformed, wild type plant cell, a plant or a part thereof is conferred if the activity “50S chloroplast ribosomal protein L21 or” if the activity of a nucleic acid molecule or a polypeptide comprising the nucleic acid or polypeptide or the consensus sequence or the polypeptide motif, as depicted in table I, II or IV, column 7 respective same line as SEQ ID NO. 8104 or SEQ ID NO. 8105, respectively, is increased or generated in a plant or part thereof. Preferably, the increase occurs cytoplasmic. Accordingly, in one embodiment increased nitrogen use efficiency is conferred. Particularly, an increase of yield from 1.1-fold to 1.60-fold, for example plus at least 100% thereof, under conditions of nitrogen deficiency is conferred compared to a corresponding non-modified, e.g. non-transformed, wild type plant.

[0178] Accordingly, in a further embodiment, an increased nutrient use efficiency compared to a corresponding non-modified, e.g. a non-transformed, wild type plant is conferred if the activity of a polypeptide comprising the polypeptide shown in SEQ ID NO. 8153, or encoded by a nucleic acid molecule comprising the nucleic acid molecule shown in SEQ ID NO. 8152, or a homolog of said nucleic acid molecule or polypeptide, is increased or generated. For example, the activity of a corresponding nucleic acid molecule or a polypeptide derived from Arabidopsis thaliana is increased or generated, preferably comprising the nucleic acid molecule shown in SEQ ID NO. 8152 or polypeptide shown in SEQ ID NO. 8153, respectively, or a homolog thereof. E.g. an increased tolerance to abiotic environmental stress, in particular increased nutrient use efficiency as compared to a corresponding non-modified, e.g. a non-transformed, wild type plant cell, a plant or a part thereof is conferred if the activity “cold response protein or” if the activity of a nucleic acid molecule or a polypeptide comprising the nucleic acid or polypeptide or the consensus sequence or the polypeptide motif, as depicted in table I, II or IV, column 7 respective same line as SEQ ID NO. 8152 or SEQ ID NO. 8153, respectively, is increased or generated in a plant or part thereof. Preferably, the increase occurs cytoplasmic. Accordingly, in one embodiment increased nitrogen use efficiency is conferred. Particularly, an increase of yield from 1.1-fold to 1.12-fold, for example plus at least 100% thereof, under conditions of nitrogen deficiency is conferred compared to a corresponding non-modified, e.g. non-transformed, wild type plant.

[0179] Accordingly, in a further embodiment, an increased nutrient use efficiency compared to a corresponding non-modified, e.g. a non-transformed, wild type plant is conferred if the activity of a polypeptide comprising the polypeptide shown in SEQ ID NO. 8207, or encoded by a nucleic acid molecule comprising the nucleic acid molecule shown in SEQ ID NO. 8206, or a homolog of said nucleic acid molecule or polypeptide, is increased or generated. For example, the activity of a corresponding nucleic acid molecule or a polypeptide derived from Arabidopsis thaliana is increased or generated, preferably comprising the nucleic acid molecule shown in SEQ ID NO. 8206 or polypeptide shown in SEQ ID NO. 8207, respectively, or a homolog thereof. E.g. an increased tolerance to abiotic environmental stress, in particular increased nutrient use efficiency as compared to a corresponding non-modified, e.g. a non-transformed, wild type plant cell, a plant or a part thereof is conferred if the activity “heat shock transcription factor or” if the activity of a nucleic acid molecule or a polypeptide comprising the nucleic acid or polypeptide or the consensus sequence or the polypeptide motif, as depicted in table I, II or IV, column 7 respective same line as SEQ ID NO. 8206 or SEQ ID NO. 8207, respectively, is increased or generated in a plant or part thereof. Preferably, the increase occurs cytoplasmic. Accordingly, in one embodiment increased nitrogen use efficiency is conferred. Particularly, an increase of yield from 1.1-fold to 1.15-fold, for example plus at least 100% thereof, under conditions of nitrogen deficiency is conferred compared to a corresponding non-modified, e.g. non-transformed, wild type plant.

[0180] Accordingly, in a further embodiment, an increased nutrient use efficiency compared to a corresponding non-modified, e.g. a non-transformed, wild type plant is conferred if the activity of a polypeptide comprising the polypeptide shown in SEQ ID NO. 8409, or encoded by a nucleic acid molecule comprising the nucleic acid molecule shown in SEQ ID NO. 8408, or a homolog of said nucleic acid molecule or polypeptide, is increased or generated. For example, the activity of a corresponding nucleic acid molecule or a polypeptide derived from Arabidopsis thaliana is increased or generated, preferably comprising the nucleic acid molecule shown in SEQ ID NO. 8408 or polypeptide shown in SEQ ID NO. 8409, respectively, or a homolog thereof. E.g. an increased tolerance to abiotic environmental stress, in particular increased nutrient use efficiency as compared to a corresponding non-modified, e.g. a non-transformed, wild type plant cell, a plant or a part thereof is conferred if the activity “small heat shock protein or” if the activity of a nucleic acid molecule or a polypeptide comprising the nucleic acid or polypeptide or the consensus sequence or the polypeptide motif, as depicted in table I, II or IV, column 7 respective same line as SEQ ID NO. 8408 or SEQ ID NO. 8409, respectively, is increased or generated in a plant or part thereof. Preferably, the increase occurs cytoplasmic. Accordingly, in one embodiment increased nitrogen use efficiency is conferred. Particularly, an increase of yield from 1.1-fold to 1.17-fold, for example plus at least 100% thereof, under conditions of nitrogen deficiency is conferred compared to a corresponding non-modified, e.g. non-transformed, wild type plant.

[0181] Accordingly, in a further embodiment, an increased nutrient use efficiency compared to a corresponding non-modified, e.g. a non-transformed, wild type plant is conferred if the activity of a polypeptide comprising the polypeptide shown in SEQ ID NO. 8843, or encoded by a nucleic acid molecule comprising the nucleic acid molecule shown in SEQ ID NO. 8842, or a homolog of said nucleic acid molecule or polypeptide, is increased or generated. For example, the activity of a corresponding nucleic acid molecule or a polypeptide derived from Populus trichocarpa is increased or generated, preferably comprising the nucleic acid molecule shown in SEQ ID NO. 8842 or polypeptide shown in SEQ ID NO. 8843, respectively, or a homolog thereof. E.g. an increased tolerance to abiotic environmental stress, in particular increased nutrient use efficiency as compared to a corresponding non-modified, e.g. a non-transformed, wild type plant cell, a plant or a part thereof is conferred if the activity “rubisco subunit binding-protein beta subunit or” if the activity of a nucleic acid molecule or a polypeptide comprising the nucleic acid or polypeptide or the consensus sequence or the polypeptide motif, as depicted in table I, II or IV, column 7 respective same line as SEQ ID NO. 8842 or SEQ ID NO. 8843, respectively, is increased or generated in a plant or part thereof. Preferably, the increase occurs cytoplasmic. Accordingly, in one embodiment an increased nitrogen use efficiency is conferred. Particularly, an increase of yield from 1.1-fold to 1.31-fold, for example plus at least 100% thereof, under conditions of nitrogen deficiency is conferred compared to a corresponding non-modified, e.g. non-transformed, wild type plant.

[0182] Accordingly, in a further embodiment, an increased nutrient use efficiency compared to a corresponding non-modified, e.g. a non-transformed, wild type plant is conferred if the activity of a polypeptide comprising the polypeptide shown in SEQ ID NO. 9855, or encoded by a nucleic acid molecule comprising the nucleic acid molecule shown in SEQ ID NO. 9854, or a homolog of said nucleic acid molecule or polypeptide, is increased or generated. For example, the activity of a corresponding nucleic acid molecule or a polypeptide derived from Oryza sativa is increased or generated, preferably comprising the nucleic acid molecule shown in SEQ ID NO. 9854 or polypeptide shown in SEQ ID NO. 9855, respectively, or a homolog thereof. E.g. an increased tolerance to abiotic environmental stress, in particular increased nutrient use efficiency as compared to a corresponding non-modified, e.g. a non-transformed, wild type plant cell, a plant or a part thereof is conferred if the activity “sugar transporter or” if the activity of a nucleic acid molecule or a polypeptide comprising the nucleic acid or polypeptide or the consensus sequence or the polypeptide motif, as depicted in table I, II or IV, column 7 respective same line as SEQ ID NO. 9854 or SEQ ID NO. 9855, respectively, is increased or generated in a plant or part thereof. Preferably, the increase occurs cytoplasmic. Accordingly, in one embodiment increased nitrogen use efficiency is conferred. Particularly, an increase of yield from 1.1-fold to 1.77-fold, for example plus at least 100% thereof, under conditions of nitrogen deficiency is conferred compared to a corresponding non-modified, e.g. non-transformed, wild type plant.

[0183] Accordingly, in a further embodiment, an increased nutrient use efficiency compared to a corresponding non-modified, e.g. a non-transformed, wild type plant is conferred if the activity of a polypeptide comprising the polypeptide shown in SEQ ID NO. 9982, or encoded by a nucleic acid molecule comprising the nucleic acid molecule shown in SEQ ID NO. 9981, or a homolog of said nucleic acid molecule or polypeptide, is increased or generated. For example, the activity of a corresponding nucleic acid molecule or a polypeptide derived from Saccharomyces cerevisiae is increased or generated, preferably comprising the nucleic acid molecule shown in SEQ ID NO. 9981 or polypeptide shown in SEQ ID NO. 9982, respectively, or a homolog thereof. E.g. an increased tolerance to abiotic environmental stress, in particular increased nutrient use efficiency as compared to a corresponding non-modified, e.g. a non-transformed, wild type plant cell, a plant or a part thereof is conferred if the activity “mitochondrial asparaginyl-tRNA synthetase or” if the activity of a nucleic acid molecule or a polypeptide comprising the nucleic acid or polypeptide or the consensus sequence or the polypeptide motif, as depicted in table I, II or IV, column 7 respective same line as SEQ ID NO. 9981 or SEQ ID NO. 9982, respectively, is increased or generated in a plant or part thereof. Preferably, the increase occurs cytoplasmic. Accordingly, in one embodiment increased nitrogen use efficiency is conferred. Particularly, an increase of yield from 1.1-fold to 1.17-fold, for example plus at least 100% thereof, under conditions of nitrogen deficiency is conferred compared to a corresponding non-modified, e.g. non-transformed, wild type plant.

[0184] Accordingly, in a further embodiment, an increased nutrient use efficiency compared to a corresponding non-modified, e.g. a non-transformed, wild type plant is conferred if the activity of a polypeptide comprising the polypeptide shown in SEQ ID NO. 10799, or encoded by a nucleic acid molecule comprising the nucleic acid molecule shown in SEQ ID NO. 10798, or a homolog of said nucleic acid molecule or polypeptide, is increased or generated. For example, the activity of a corresponding nucleic acid molecule or a polypeptide derived from Arabidopsis thaliana is increased or generated, preferably comprising the nucleic acid molecule shown in SEQ ID NO. 10798 or polypeptide shown in SEQ ID NO. 10799, respectively, or a homolog thereof. E.g. an increased tolerance to abiotic environmental stress, in particular increased nutrient use efficiency as compared to a corresponding non-modified, e.g. a non-transformed, wild type plant cell, a plant or a part thereof is conferred if the activity “protein kinase or” if the activity of a nucleic acid molecule or a polypeptide comprising the nucleic acid or polypeptide or the consensus sequence or the polypeptide motif, as depicted in table I, II or IV, column 7 respective same line as SEQ ID NO. 10798 or SEQ ID NO. 10799, respectively, is increased or generated in a plant or part thereof. Preferably, the increase occurs cytoplasmic. Accordingly, in one embodiment increased nitrogen use efficiency is conferred. Particularly, an increase of yield from 1.1-fold to 1.20-fold, for example plus at least 100% thereof, under conditions of nitrogen deficiency is conferred compared to a corresponding non-modified, e.g. non-transformed, wild type plant.

[0185] Accordingly, in a further embodiment, an increased nutrient use efficiency compared to a corresponding non-modified, e.g. a non-transformed, wild type plant is conferred if the activity of a polypeptide comprising the polypeptide shown in SEQ ID NO. 10839, or encoded by a nucleic acid molecule comprising the nucleic acid molecule shown in SEQ ID NO. 10838, or a homolog of said nucleic acid molecule or polypeptide, is increased or generated. For example, the activity of a corresponding nucleic acid molecule or a polypeptide derived from Arabidopsis thaliana is increased or generated, preferably comprising the nucleic acid molecule shown in SEQ ID NO. 10838 or polypeptide shown in SEQ ID NO. 10839, respectively, or a homolog thereof. E.g. an increased tolerance to abiotic environmental stress, in particular increased nutrient use efficiency as compared to a corresponding non-modified, e.g. a non-transformed, wild type plant cell, a plant or a part thereof is conferred if the activity “haspin-related protein or” if the activity of a nucleic acid molecule or a polypeptide comprising the nucleic acid or polypeptide or the consensus sequence or the polypeptide motif, as depicted in table I, II or IV, column 7 respective same line as SEQ ID NO. 10838 or SEQ ID NO. 10839, respectively, is increased or generated in a plant or part thereof. Preferably, the increase occurs cytoplasmic. Accordingly, in one embodiment increased nitrogen use efficiency is conferred. Particularly, an increase of yield from 1.1-fold to 1.24-fold, for example plus at least 100% thereof, under conditions of nitrogen deficiency is conferred compared to a corresponding non-modified, e.g. non-transformed, wild type plant.

[0186] Accordingly, in a further embodiment, an increased nutrient use efficiency compared to a corresponding non-modified, e.g. a non-transformed, wild type plant is conferred if the activity of a polypeptide comprising the polypeptide shown in SEQ ID NO. 10881, or encoded by a nucleic acid molecule comprising the nucleic acid molecule shown in SEQ ID NO. 10880, or a homolog of said nucleic acid molecule or polypeptide, is increased or generated. For example, the activity of a corresponding nucleic acid molecule or a polypeptide derived from Arabidopsis thaliana is increased or generated, preferably comprising the nucleic acid molecule shown in SEQ ID NO. 10880 or polypeptide shown in SEQ ID NO. 10881, respectively, or a homolog thereof. E.g. an increased tolerance to abiotic environmental stress, in particular increased nutrient use efficiency as compared to a corresponding non-modified, e.g. a non-transformed, wild type plant cell, a plant or a part thereof is conferred if the activity “universal stress protein family protein or” if the activity of a nucleic acid molecule or a polypeptide comprising the nucleic acid or polypeptide or the consensus sequence or the polypeptide motif, as depicted in table I, II or IV, column 7 respective same line as SEQ ID NO. 10880 or SEQ ID NO. 10881, respectively, is increased or generated in a plant or part thereof. Preferably, the increase occurs cytoplasmic. Accordingly, in one embodiment increased nitrogen use efficiency is conferred. Particularly, an increase of yield from 1.1-fold to 1.21-fold, for example plus at least 100% thereof, under conditions of nitrogen deficiency is conferred compared to a corresponding non-modified, e.g. non-transformed, wild type plant.

[0187] Accordingly, in a further embodiment, an increased nutrient use efficiency compared to a corresponding non-modified, e.g. a non-transformed, wild type plant is conferred if the activity of a polypeptide comprising the polypeptide shown in SEQ ID NO. 10966, or encoded by a nucleic acid molecule comprising the nucleic acid molecule shown in SEQ ID NO. 10965, or a homolog of said nucleic acid molecule or polypeptide, is increased or generated. For example, the activity of a corresponding nucleic acid molecule or a polypeptide derived from Arabidopsis thaliana is increased or generated, preferably comprising the nucleic acid molecule shown in SEQ ID NO. 10965 or polypeptide shown in SEQ ID NO. 10966, respectively, or a homolog thereof. E.g. an increased tolerance to abiotic environmental stress, in particular increased nutrient use efficiency as compared to a corresponding non-modified, e.g. a non-transformed, wild type plant cell, a plant or a part thereof is conferred if the activity “heat shock protein or” if the activity of a nucleic acid molecule or a polypeptide comprising the nucleic acid or polypeptide or the consensus sequence or the polypeptide motif, as depicted in table I, II or IV, column 7 respective same line as SEQ ID NO. 10965 or SEQ ID NO. 10966, respectively, is increased or generated in a plant or part thereof. Preferably, the increase occurs cytoplasmic. Accordingly, in one embodiment increased nitrogen use efficiency is conferred. Particularly, an increase of yield from 1.1-fold to 1.16-fold, for example plus at least 100% thereof, under conditions of nitrogen deficiency is conferred compared to a corresponding non-modified, e.g. non-transformed, wild type plant.

[0188] Accordingly, in a further embodiment, an increased nutrient use efficiency compared to a corresponding non-modified, e.g. a non-transformed, wild type plant is conferred if the activity of a polypeptide comprising the polypeptide shown in SEQ ID NO. 11419, or encoded by a nucleic acid molecule comprising the nucleic acid molecule shown in SEQ ID NO. 11418, or a homolog of said nucleic acid molecule or polypeptide, is increased or generated. For example, the activity of a corresponding nucleic acid molecule or a polypeptide derived from Arabidopsis thaliana is increased or generated, preferably comprising the nucleic acid molecule shown in SEQ ID NO. 11418 or polypeptide shown in SEQ ID NO. 11419, respectively, or a homolog thereof. E.g. an increased tolerance to abiotic environmental stress, in particular increased nutrient use efficiency as compared to a corresponding non-modified, e.g. a non-transformed, wild type plant cell, a plant or a part thereof is conferred if the activity “argonaute protein or” if the activity of a nucleic acid molecule or a polypeptide comprising the nucleic acid or polypeptide or the consensus sequence or the polypeptide motif, as depicted in table I, II or IV, column 7 respective same line as SEQ ID NO. 11418 or SEQ ID NO. 11419, respectively, is increased or generated in a plant or part thereof. Preferably, the increase occurs cytoplasmic. Accordingly, in one embodiment increased nitrogen use efficiency is conferred. Particularly, an increase of yield from 1.1-fold to 1.18-fold, for example plus at least 100% thereof, under conditions of nitrogen deficiency is conferred compared to a corresponding non-modified, e.g. non-transformed, wild type plant.

[0189] Accordingly, in a further embodiment, an increased nutrient use efficiency compared to a corresponding non-modified, e.g. a non-transformed, wild type plant is conferred if the activity of a polypeptide comprising the polypeptide shown in SEQ ID NO. 11753, or encoded by a nucleic acid molecule comprising the nucleic acid molecule shown in SEQ ID NO. 11752, or a homolog of said nucleic acid molecule or polypeptide, is increased or generated. For example, the activity of a corresponding nucleic acid molecule or a polypeptide derived from Arabidopsis thaliana is increased or generated, preferably comprising the nucleic acid molecule shown in SEQ ID NO. 11752 or polypeptide shown in SEQ ID NO. 11753, respectively, or a homolog thereof. E.g. an increased tolerance to abiotic environmental stress, in particular increased nutrient use efficiency as compared to a corresponding non-modified, e.g. a non-transformed, wild type plant cell, a plant or a part thereof is conferred if the activity “glutathione-S-transferase or” if the activity of a nucleic acid molecule or a polypeptide comprising the nucleic acid or polypeptide or the consensus sequence or the polypeptide motif, as depicted in table I, II or IV, column 7 respective same line as SEQ ID NO. 11752 or SEQ ID NO. 11753, respectively, is increased or generated in a plant or part thereof. Preferably, the increase occurs cytoplasmic. Accordingly, in one embodiment increased nitrogen use efficiency is conferred. Particularly, an increase of yield from 1.1-fold to 1.18-fold, for example plus at least 100% thereof, under conditions of nitrogen deficiency is conferred compared to a corresponding non-modified, e.g. non-transformed, wild type plant.

[0190] Accordingly, in a further embodiment, an increased nutrient use efficiency compared to a corresponding non-modified, e.g. a non-transformed, wild type plant is conferred if the activity of a polypeptide comprising the polypeptide shown in SEQ ID NO. 12197, or encoded by a nucleic acid molecule comprising the nucleic acid molecule shown in SEQ ID NO. 12196, or a homolog of said nucleic acid molecule or polypeptide, is increased or generated. For example, the activity of a corresponding nucleic acid molecule or a polypeptide derived from Arabidopsis thaliana is increased or generated, preferably comprising the nucleic acid molecule shown in SEQ ID NO. 12196 or polypeptide shown in SEQ ID NO. 12197, respectively, or a homolog thereof. E.g. an increased tolerance to abiotic environmental stress, in particular increased nutrient use efficiency as compared to a corresponding non-modified, e.g. a non-transformed, wild type plant cell, a plant or a part thereof is conferred if the activity “AT2G35300-protein or” if the activity of a nucleic acid molecule or a polypeptide comprising the nucleic acid or polypeptide or the consensus sequence or the polypeptide motif, as depicted in table I, II or IV, column 7 respective same line as SEQ ID NO. 12196 or SEQ ID NO. 12197, respectively, is increased or generated in a plant or part thereof. Preferably, the increase occurs cytoplasmic. Accordingly, in one embodiment increased nitrogen use efficiency is conferred. Particularly, an increase of yield from 1.1-fold to 1.20-fold, for example plus at least 100% thereof, under conditions of nitrogen deficiency is conferred compared to a corresponding non-modified, e.g. non-transformed, wild type plant.

[0191] Accordingly, in a further embodiment, an increased nutrient use efficiency compared to a corresponding non-modified, e.g. a non-transformed, wild type plant is conferred if the activity of a polypeptide comprising the polypeptide shown in SEQ ID NO. 12317, or encoded by a nucleic acid molecule comprising the nucleic acid molecule shown in SEQ ID NO. 12316, or a homolog of said nucleic acid molecule or polypeptide, is increased or generated. For example, the activity of a corresponding nucleic acid molecule or a polypeptide derived from Arabidopsis thaliana is increased or generated, preferably comprising the nucleic acid molecule shown in SEQ ID NO. 12316 or polypeptide shown in SEQ ID NO. 12317, respectively, or a homolog thereof. E.g. an increased tolerance to abiotic environmental stress, in particular increased nutrient use efficiency as compared to a corresponding non-modified, e.g. a non-transformed, wild type plant cell, a plant or a part thereof is conferred if the activity “ubiquitin-protein ligase or” if the activity of a nucleic acid molecule or a polypeptide comprising the nucleic acid or polypeptide or the consensus sequence or the polypeptide motif, as depicted in table I, II or IV, column 7 respective same line as SEQ ID NO. 12316 or SEQ ID NO. 12317, respectively, is increased or generated in a plant or part thereof. Preferably, the increase occurs cytoplasmic. Accordingly, in one embodiment an increased nitrogen use efficiency is conferred. Particularly, an increase of yield from 1.1-fold to 1.16-fold, for example plus at least 100% thereof, under conditions of nitrogen deficiency is conferred compared to a corresponding non-modified, e.g. non-transformed, wild type plant.

[0192] Accordingly, in a further embodiment, an increased nutrient use efficiency compared to a corresponding non-modified, e.g. a non-transformed, wild type plant is conferred if the activity of a polypeptide comprising the polypeptide shown in SEQ ID NO. 12574, or encoded by a nucleic acid molecule comprising the nucleic acid molecule shown in SEQ ID NO. 12573, or a homolog of said nucleic acid molecule or polypeptide, is increased or generated. For example, the activity of a corresponding nucleic acid molecule or a polypeptide derived from Arabidopsis thaliana is increased or generated, preferably comprising the nucleic acid molecule shown in SEQ ID NO. 12573 or polypeptide shown in SEQ ID NO. 12574, respectively, or a homolog thereof. E.g. an increased tolerance to abiotic environmental stress, in particular increased nutrient use efficiency as compared to a corresponding non-modified, e.g. a non-transformed, wild type plant cell, a plant or a part thereof is conferred if the activity “AT3G04620-protein or” if the activity of a nucleic acid molecule or a polypeptide comprising the nucleic acid or polypeptide or the consensus sequence or the polypeptide motif, as depicted in table I, II or IV, column 7 respective same line as SEQ ID NO. 12573 or SEQ ID NO. 12574, respectively, is increased or generated in a plant or part thereof. Preferably, the increase occurs cytoplasmic. Accordingly, in one embodiment an increased nitrogen use efficiency is conferred. Particularly, an increase of yield from 1.1-fold to 1.11-fold, for example plus at least 100% thereof, under conditions of nitrogen deficiency is conferred compared to a corresponding non-modified, e.g. non-transformed, wild type plant.

[0193] Accordingly, in a further embodiment, an increased nutrient use efficiency compared to a corresponding non-modified, e.g. a non-transformed, wild type plant is conferred if the activity of a polypeptide comprising the polypeptide shown in SEQ ID NO. 12669, or encoded by a nucleic acid molecule comprising the nucleic acid molecule shown in SEQ ID NO. 12668, or a homolog of said nucleic acid molecule or polypeptide, is increased or generated. For example, the activity of a corresponding nucleic acid molecule or a polypeptide derived from Arabidopsis thaliana is increased or generated, preferably comprising the nucleic acid molecule shown in SEQ ID NO. 12668 or polypeptide shown in SEQ ID NO. 12669, respectively, or a homolog thereof. E.g. an increased tolerance to abiotic environmental stress, in particular increased nutrient use efficiency as compared to a corresponding non-modified, e.g. a non-transformed, wild type plant cell, a plant or a part thereof is conferred if the activity “Cytochrome P450 or” if the activity of a nucleic acid molecule or a polypeptide comprising the nucleic acid or polypeptide or the consensus sequence or the polypeptide motif, as depicted in table I, II or IV, column 7 respective same line as SEQ ID NO. 12668 or SEQ ID NO. 12669, respectively, is increased or generated in a plant or part thereof. Preferably, the increase occurs cytoplasmic. Accordingly, in one embodiment an increased nitrogen use efficiency is conferred. Particularly, an increase of yield from 1.1-fold to 1.34-fold, for example plus at least 100% thereof, under conditions of nitrogen deficiency is conferred compared to a corresponding non-modified, e.g. non-transformed, wild type plant.

[0194] Accordingly, in a further embodiment, an increased nutrient use efficiency compared to a corresponding non-modified, e.g. a non-transformed, wild type plant is conferred if the activity of a polypeptide comprising the polypeptide shown in SEQ ID NO. 13132, or encoded by a nucleic acid molecule comprising the nucleic acid molecule shown in SEQ ID NO. 13131, or a homolog of said nucleic acid molecule or polypeptide, is increased or generated. For example, the activity of a corresponding nucleic acid molecule or a polypeptide derived from Arabidopsis thaliana is increased or generated, preferably comprising the nucleic acid molecule shown in SEQ ID NO. 13131 or polypeptide shown in SEQ ID NO. 13132, respectively, or a homolog thereof. E.g. an increased tolerance to abiotic environmental stress, in particular increased nutrient use efficiency as compared to a corresponding non-modified, e.g. a non-transformed, wild type plant cell, a plant or a part thereof is conferred if the activity “delta-8 sphingolipid desaturase or” if the activity of a nucleic acid molecule or a polypeptide comprising the nucleic acid or polypeptide or the consensus sequence or the polypeptide motif, as depicted in table I, II or IV, column 7 respective same line as SEQ ID NO. 13131 or SEQ ID NO. 13132, respectively, is increased or generated in a plant or part thereof. Preferably, the increase occurs cytoplasmic. Accordingly, in one embodiment an increased nitrogen use efficiency is conferred. Particularly, an increase of yield from 1.1-fold to 1.95-fold, for example plus at least 100% thereof, under conditions of nitrogen deficiency is conferred compared to a corresponding non-modified, e.g. non-transformed, wild type plant.

[0195] Accordingly, in a further embodiment, an increased nutrient use efficiency compared to a corresponding non-modified, e.g. a non-transformed, wild type plant is conferred if the activity of a polypeptide comprising the polypeptide shown in SEQ ID NO. 13277, or encoded by a nucleic acid molecule comprising the nucleic acid molecule shown in SEQ ID NO. 13276, or a homolog of said nucleic acid molecule or polypeptide, is increased or generated. For example, the activity of a corresponding nucleic acid molecule or a polypeptide derived from Arabidopsis thaliana is increased or generated, preferably comprising the nucleic acid molecule shown in SEQ ID NO. 13276 or polypeptide shown in SEQ ID NO. 13277, respectively, or a homolog thereof. E.g. an increased tolerance to abiotic environmental stress, in particular increased nutrient use efficiency as compared to a corresponding non-modified, e.g. a non-transformed, wild type plant cell, a plant or a part thereof is conferred if the activity “jasmonate-zim-domain protein or” if the activity of a nucleic acid molecule or a polypeptide comprising the nucleic acid or polypeptide or the consensus sequence or the polypeptide motif, as depicted in table I, II or IV, column 7 respective same line as SEQ ID NO. 13276 or SEQ ID NO. 13277, respectively, is increased or generated in a plant or part thereof. Preferably, the increase occurs cytoplasmic. Accordingly, in one embodiment an increased nitrogen use efficiency is conferred. Particularly, an increase of yield from 1.1-fold to 1.17-fold, for example plus at least 100% thereof, under conditions of nitrogen deficiency is conferred compared to a corresponding non-modified, e.g. non-transformed, wild type plant.

[0196] Accordingly, in a further embodiment, an increased nutrient use efficiency compared to a corresponding non-modified, e.g. a non-transformed, wild type plant is conferred if the activity of a polypeptide comprising the polypeptide shown in SEQ ID NO. 13437, or encoded by a nucleic acid molecule comprising the nucleic acid molecule shown in SEQ ID NO. 13436, or a homolog of said nucleic acid molecule or polypeptide, is increased or generated. For example, the activity of a corresponding nucleic acid molecule or a polypeptide derived from Populus trichocarpa is increased or generated, preferably comprising the nucleic acid molecule shown in SEQ ID NO. 13436 or polypeptide shown in SEQ ID NO. 13437, respectively, or a homolog thereof. E.g. an increased tolerance to abiotic environmental stress, in particular increased nutrient use efficiency as compared to a corresponding non-modified, e.g. a non-transformed, wild type plant cell, a plant or a part thereof is conferred if the activity “CDS5394-protein or” if the activity of a nucleic acid molecule or a polypeptide comprising the nucleic acid or polypeptide or the consensus sequence or the polypeptide motif, as depicted in table I, II or IV, column 7 respective same line as SEQ ID NO. 13436 or SEQ ID NO. 13437, respectively, is increased or generated in a plant or part thereof. Preferably, the increase occurs cytoplasmic. Accordingly, in one embodiment an increased nitrogen use efficiency is conferred. Particularly, an increase of yield from 1.1-fold to 1.33-fold, for example plus at least 100% thereof, under conditions of nitrogen deficiency is conferred compared to a corresponding non-modified, e.g. non-transformed, wild type plant.

[0197] Accordingly, in a further embodiment, an increased nutrient use efficiency compared to a corresponding non-modified, e.g. a non-transformed, wild type plant is conferred if the activity of a polypeptide comprising the polypeptide shown in SEQ ID NO. 13478, or encoded by a nucleic acid molecule comprising the nucleic acid molecule shown in SEQ ID NO. 13477, or a homolog of said nucleic acid molecule or polypeptide, is increased or generated. For example, the activity of a corresponding nucleic acid molecule or a polypeptide derived from Populus trichocarpa is increased or generated, preferably comprising the nucleic acid molecule shown in SEQ ID NO. 13477 or polypeptide shown in SEQ ID NO. 13478, respectively, or a homolog thereof. E.g. an increased tolerance to abiotic environmental stress, in particular increased nutrient use efficiency as compared to a corresponding non-modified, e.g. a non-transformed, wild type plant cell, a plant or a part thereof is conferred if the activity “CDS5401_TRUNCATED-protein or” if the activity of a nucleic acid molecule or a polypeptide comprising the nucleic acid or polypeptide or the consensus sequence or the polypeptide motif, as depicted in table I, II or IV, column 7 respective same line as SEQ ID NO. 13477 or SEQ ID NO. 13478, respectively, is increased or generated in a plant or part thereof. Preferably, the increase occurs cytoplasmic. Accordingly, in one embodiment an increased nitrogen use efficiency is conferred. Particularly, an increase of yield from 1.1-fold to 1.23-fold, for example plus at least 100% thereof, under conditions of nitrogen deficiency is conferred compared to a corresponding non-modified, e.g. non-transformed, wild type plant.

[0198] Accordingly, in a further embodiment, an increased nutrient use efficiency compared to a corresponding non-modified, e.g. a non-transformed, wild type plant is conferred if the activity of a polypeptide comprising the polypeptide shown in SEQ ID NO. 13552, or encoded by a nucleic acid molecule comprising the nucleic acid molecule shown in SEQ ID NO. 13551, or a homolog of said nucleic acid molecule or polypeptide, is increased or generated. For example, the activity of a corresponding nucleic acid molecule or a polypeptide derived from Zea mays is increased or generated, preferably comprising the nucleic acid molecule shown in SEQ ID NO. 13551 or polypeptide shown in SEQ ID NO. 13552, respectively, or a homolog thereof. E.g. an increased tolerance to abiotic environmental stress, in particular increased nutrient use efficiency as compared to a corresponding non-modified, e.g. a non-transformed, wild type plant cell, a plant or a part thereof is conferred if the activity “cullin or” if the activity of a nucleic acid molecule or a polypeptide comprising the nucleic acid or polypeptide or the consensus sequence or the polypeptide motif, as depicted in table I, II or IV, column 7 respective same line as SEQ ID NO. 13551 or SEQ ID NO. 13552, respectively, is increased or generated in a plant or part thereof. Preferably, the increase occurs cytoplasmic. Accordingly, in one embodiment an increased nitrogen use efficiency is conferred. Particularly, an increase of yield from 1.1-fold to 1.12-fold, for example plus at least 100% thereof, under conditions of nitrogen deficiency is conferred compared to a corresponding non-modified, e.g. non-transformed, wild type plant.

[0199] Accordingly, in a further embodiment, an increased nutrient use efficiency compared to a corresponding non-modified, e.g. a non-transformed, wild type plant is conferred if the activity of a polypeptide comprising the polypeptide shown in SEQ ID NO. 13246, or encoded by a nucleic acid molecule comprising the nucleic acid molecule shown in SEQ ID NO. 13245, or a homolog of said nucleic acid molecule or polypeptide, is increased or generated. For example, the activity of a corresponding nucleic acid molecule or a polypeptide derived from Arabidopsis thaliana is increased or generated, preferably comprising the nucleic acid molecule shown in SEQ ID NO. 13245 or polypeptide shown in SEQ ID NO. 13246, respectively, or a homolog thereof. E.g. an increased tolerance to abiotic environmental stress, in particular increased nutrient use efficiency as compared to a corresponding non-modified, e.g. a non-transformed, wild type plant cell, a plant or a part thereof is conferred if the activity “PRLI-interacting factor or” if the activity of a nucleic acid molecule or a polypeptide comprising the nucleic acid or polypeptide or the consensus sequence or the polypeptide motif, as depicted in table I, II or IV, column 7 respective same line as SEQ ID NO. 13245 or SEQ ID NO. 13246, respectively, is increased or generated in a plant or part thereof. Preferably, the increase occurs cytoplasmic. Accordingly, in one embodiment an increased nitrogen use efficiency is conferred. Particularly, an increase of yield from 1.1-fold to 1.32-fold, for example plus at least 100% thereof, under conditions of nitrogen deficiency is conferred compared to a corresponding non-modified, e.g. non-transformed, wild type plant.

[0200] Accordingly, in a further embodiment, an increased nutrient use efficiency compared to a corresponding non-modified, e.g. a non-transformed, wild type plant is conferred if the activity of a polypeptide comprising the polypeptide shown in SEQ ID NO. 10754, or encoded by a nucleic acid molecule comprising the nucleic acid molecule shown in SEQ ID NO. 10753, or a homolog of said nucleic acid molecule or polypeptide, is increased or generated. For example, the activity of a corresponding nucleic acid molecule or a polypeptide derived from Zea mays is increased or generated, preferably comprising the nucleic acid molecule shown in SEQ ID NO. 10753 or polypeptide shown in SEQ ID NO. 10754, respectively, or a homolog thereof. E.g. an increased tolerance to abiotic environmental stress, in particular increased nutrient use efficiency as compared to a corresponding non-modified, e.g. a non-transformed, wild type plant cell, a plant or a part thereof is conferred if the activity “60952769.R01.1-protein or” if the activity of a nucleic acid molecule or a polypeptide comprising the nucleic acid or polypeptide or the consensus sequence or the polypeptide motif, as depicted in table I, II or IV, column 7 respective same line as SEQ ID NO. 10753 or SEQ ID NO. 10754, respectively, is increased or generated in a plant or part thereof. Preferably, the increase occurs cytoplasmic. Accordingly, in one embodiment an increased nitrogen use efficiency is conferred. Particularly, an increase of yield from 1.1-fold to 1.18-fold, for example plus at least 100% thereof, under conditions of nitrogen deficiency is conferred compared to a corresponding non-modified, e.g. non-transformed, wild type plant.

[0201] Accordingly, in a further embodiment, an increased nutrient use efficiency compared to a corresponding non-modified, e.g. a non-transformed, wild type plant is conferred if the activity of a polypeptide comprising the polypeptide shown in SEQ ID NO. 13310, or encoded by a nucleic acid molecule comprising the nucleic acid molecule shown in SEQ ID NO. 13309, or a homolog of said nucleic acid molecule or polypeptide, is increased or generated. For example, the activity of a corresponding nucleic acid molecule or a polypeptide derived from Arabidopsis thaliana is increased or generated, preferably comprising the nucleic acid molecule shown in SEQ ID NO. 13309 or polypeptide shown in SEQ ID NO. 13310, respectively, or a homolog thereof. E.g. an increased tolerance to abiotic environmental stress, in particular increased nutrient use efficiency as compared to a corresponding non-modified, e.g. a non-transformed, wild type plant cell, a plant or a part thereof is conferred if the activity “AT5G42380-protein or” if the activity of a nucleic acid molecule or a polypeptide comprising the nucleic acid or polypeptide or the consensus sequence or the polypeptide motif, as depicted in table I, II or IV, column 7 respective same line as SEQ ID NO. 13309 or SEQ ID NO. 13310, respectively, is increased or generated in a plant or part thereof. Preferably, the increase occurs cytoplasmic. Accordingly, in one embodiment an increased nitrogen use efficiency is conferred. Particularly, an increase of yield from 1.1-fold to 1.33-fold, for example plus at least 100% thereof, under conditions of nitrogen deficiency is conferred compared to a corresponding non-modified, e.g. non-transformed, wild type plant.

[0202] Accordingly, in a further embodiment, an increased nutrient use efficiency compared to a corresponding non-modified, e.g. a non-transformed, wild type plant is conferred if the activity of a polypeptide comprising the polypeptide shown in SEQ ID NO. 10750, or encoded by a nucleic acid molecule comprising the nucleic acid molecule shown in SEQ ID NO. 10749, or a homolog of said nucleic acid molecule or polypeptide, is increased or generated. For example, the activity of a corresponding nucleic acid molecule or a polypeptide derived from Zea mays is increased or generated, preferably comprising the nucleic acid molecule shown in SEQ ID NO. 10749 or polypeptide shown in SEQ ID NO. 10750, respectively, or a homolog thereof. E.g. an increased tolerance to abiotic environmental stress, in particular increased nutrient use efficiency as compared to a corresponding non-modified, e.g. a non-transformed, wild type plant cell, a plant or a part thereof is conferred if the activity “57972199.R01.1-protein or” if the activity of a nucleic acid molecule or a polypeptide comprising the nucleic acid or polypeptide or the consensus sequence or the polypeptide motif, as depicted in table I, II or IV, column 7 respective same line as SEQ ID NO. 10749 or SEQ ID NO. 10750, respectively, is increased or generated in a plant or part thereof. Preferably, the increase occurs cytoplasmic. Accordingly, in one embodiment an increased nitrogen use efficiency is conferred. Particularly, an increase of yield from 1.1-fold to 1.14-fold, for example plus at least 100% thereof, under conditions of nitrogen deficiency is conferred compared to a corresponding non-modified, e.g. non-transformed, wild type plant.

[0203] Accordingly, in a further embodiment, an increased nutrient use efficiency compared to a corresponding non-modified, e.g. a non-transformed, wild type plant is conferred if the activity of a polypeptide comprising the polypeptide shown in SEQ ID NO. 13502, or encoded by a nucleic acid molecule comprising the nucleic acid molecule shown in SEQ ID NO. 13501, or a homolog of said nucleic acid molecule or polypeptide, is increased or generated. For example, the activity of a corresponding nucleic acid molecule or a polypeptide derived from Oryza sativa is increased or generated, preferably comprising the nucleic acid molecule shown in SEQ ID NO. 13501 or polypeptide shown in SEQ ID NO. 13502, respectively, or a homolog thereof. E.g. an increased tolerance to abiotic environmental stress, in particular increased nutrient use efficiency as compared to a corresponding non-modified, e.g. a non-transformed, wild type plant cell, a plant or a part thereof is conferred if the activity “OS02G44730-protein or” if the activity of a nucleic acid molecule or a polypeptide comprising the nucleic acid or polypeptide or the consensus sequence or the polypeptide motif, as depicted in table I, II or IV, column 7 respective same line as SEQ ID NO. 13501 or SEQ ID NO. 13502, respectively, is increased or generated in a plant or part thereof. Preferably, the increase occurs cytoplasmic. Accordingly, in one embodiment an increased nitrogen use efficiency is conferred. Particularly, an increase of yield from 1.1-fold to 1.14-fold, for example plus at least 100% thereof, under conditions of nitrogen deficiency is conferred compared to a corresponding non-modified, e.g. non-transformed, wild type plant.

[0204] Accordingly, in a further embodiment, an increased nutrient use efficiency compared to a corresponding non-modified, e.g. a non-transformed, wild type plant is conferred if the activity of a polypeptide comprising the polypeptide shown in SEQ ID NO. 13103, or encoded by a nucleic acid molecule comprising the nucleic acid molecule shown in SEQ ID NO. 13102, or a homolog of said nucleic acid molecule or polypeptide, is increased or generated. For example, the activity of a corresponding nucleic acid molecule or a polypeptide derived from Arabidopsis thaliana is increased or generated, preferably comprising the nucleic acid molecule shown in SEQ ID NO. 13102 or polypeptide shown in SEQ ID NO. 13103, respectively, or a homolog thereof. E.g. an increased tolerance to abiotic environmental stress, in particular increased nutrient use efficiency as compared to a corresponding non-modified, e.g. a non-transformed, wild type plant cell, a plant or a part thereof is conferred if the activity “ubiquitin-conjugating enzyme or” if the activity of a nucleic acid molecule or a polypeptide comprising the nucleic acid or polypeptide or the consensus sequence or the polypeptide motif, as depicted in table I, II or IV, column 7 respective same line as SEQ ID NO. 13102 or SEQ ID NO. 13103, respectively, is increased or generated in a plant or part thereof. Preferably, the increase occurs cytoplasmic. Accordingly, in one embodiment an increased nitrogen use efficiency is conferred. Particularly, an increase of yield from 1.1-fold to 1.17-fold, for example plus at least 100% thereof, under conditions of nitrogen deficiency is conferred compared to a corresponding non-modified, e.g. non-transformed, wild type plant.

[0205] In one embodiment, a nucleic acid molecule indicated in Table VIIIa or its homolog as indicated in Table I or the expression product is used in the method of the present invention to increased nutrient use efficiency, e.g. to increased the nitrogen use efficiency, of the plant compared with the wild type control.

[0206] For example, enhanced nitrogen use efficiency of the plant can be determined and quantified according to the following method: Transformed plants are grown in pots in a growth chamber (Svalöf Weibull, Svalöv, Sweden). In case the plants are Arabidopsis thaliana seeds thereof are sown in pots containing a 1:1 (v:v) mixture of nutrient depleted soil (“Einheitserde Typ 0”, 30% clay, Tantau, Wansdorf Germany) and sand. Germination is induced by a four day period at 4° C., in the dark. Subsequently the plants are grown under standard growth conditions. In case the plants are Arabidopsis thaliana, the standard growth conditions are: photoperiod of 16 h light and 8 h dark, 20° C., 60% relative humidity, and a photon flux density of 200 μE. In case the plants are Arabidopsis thaliana they are watered every second day with a N-depleted nutrient solution and after 9 to 10 days the plants are individualized. After a total time of 29 to 31 days the plants are harvested and rated by the fresh weight of the aerial parts of the plants, preferably the rosettes.

[0207] The nitrogen use efficiency for example be determined according to the method described herein. Further, the present invention relates also to a method for increasing the yield, comprising the following steps: (a) measuring the nitrogen content in the soil, and (b) determining, whether the nitrogen-content in the soil is optimal or suboptimal for the growth of an origin or wild type plant, e.g. a crop, and (c1) growing the plant of the invention in said soil, if the nitrogen-content is suboptimal for the growth of the origin or wild type plant, or (c2) growing the plant of the invention in the soil and comparing the yield with the yield of a standard, an origin or a wild type plant, selecting and growing the plant, which shows higher or the highest yield, if the nitrogen-content is optimal for the origin or wild type plant.

[0208] Plants (over)expressing nitrogen use efficiency-improving genes can be used for the enhancement of yield of said plants and improve, e.g. reduce nitrogen fertilizer utilization or make it more efficient.

[0209] Generally, adaptation to low temperature may be divided into chilling tolerance, and freezing tolerance. Improved or enhanced “freezing tolerance” or variations thereof refers herein to improved adaptation to temperatures near or below zero, namely preferably temperatures 4° C. or below, more preferably 3° C. or 2° C. or below, and particularly preferred at or 0 (zero)° C. or −4° C. or below, or even extremely low temperatures down to −10° C. or lower; hereinafter called “freezing temperature”. Further, an increased tolerance to low temperature may be demonstrated, for example, by an early vigor and allows the early planting and sowing of a corn, soy, oilseed rape, or cotton plant produced according to the method of the present invention.

[0210] In a further embodiment, an increased tolerance to abiotic environmental stress, in particular increased low temperature tolerance, compared to a corresponding non-modified, e.g. a non-transformed, wild type plant is conferred if the activity of a polypeptide comprising the polypeptide shown in SEQ ID NO. 608, or encoded by a nucleic acid molecule comprising the nucleic acid molecule shown in SEQ ID NO. 607, or a homolog of said nucleic acid molecule or polypeptide, is increased or generated. For example, the activity of a corresponding nucleic acid molecule or a polypeptide derived from Arabidopsis thaliana is increased or generated, preferably comprising the nucleic acid molecule shown in SEQ ID NO. 607 or polypeptide shown in SEQ ID NO. 608, respectively, or a homolog thereof. E.g. an increased tolerance to abiotic environmental stress, in particular increased low temperature tolerance, compared to a corresponding non-modified, e.g. a non-transformed, wild type plant is conferred if the activity “peptidyl-prolyl cis-trans isomerase family protein” or if the activity of a nucleic acid molecule or a polypeptide comprising the nucleic acid or polypeptide or the consensus sequence or the polypeptide motif, depicted in table I, II or IV, column 7, respective same line as SEQ ID NO.: 607 or SEQ ID NO.: 608, respectively, is increased or generated in a plant or part thereof. Preferably, the increase occurs cytoplasmic. Particularly, an increase of yield from 1.05-fold to 1.08-fold, for example plus at least 100% thereof, under conditions of low temperature is conferred compared to a corresponding non-modified, e.g. non-transformed, wild type plant.

[0211] In a further embodiment, an increased tolerance to abiotic environmental stress, in particular increased low temperature tolerance, compared to a corresponding non-modified, e.g. a non-transformed, wild type plant is conferred if the activity of a polypeptide comprising the polypeptide shown in SEQ ID NO. 642, or encoded by a nucleic acid molecule comprising the nucleic acid molecule shown in SEQ ID NO. 641, or a homolog of said nucleic acid molecule or polypeptide, is increased or generated. For example, the activity of a corresponding nucleic acid molecule or a polypeptide derived from Arabidopsis thaliana is increased or generated, preferably comprising the nucleic acid molecule shown in SEQ ID NO. 641 or polypeptide shown in SEQ ID NO. 642, respectively, or a homolog thereof. E.g. an increased tolerance to abiotic environmental stress, in particular increased low temperature tolerance, compared to a corresponding non-modified, e.g. a non-transformed, wild type plant is conferred if the activity “AT1G53885-protein” or if the activity of a nucleic acid molecule or a polypeptide comprising the nucleic acid or polypeptide or the consensus sequence or the polypeptide motif, depicted in table I, II or IV, column 7, respective same line as SEQ ID NO.: 641 or SEQ ID NO.: 642, respectively, is increased or generated in a plant or part thereof. Preferably, the increase occurs cytoplasmic. Particularly, an increase of yield from 1.05-fold to 1.07-fold, for example plus at least 100% thereof, under conditions of low temperature is conferred compared to a corresponding non-modified, e.g. non-transformed, wild type plant.

[0212] In a further embodiment, an increased tolerance to abiotic environmental stress, in particular increased low temperature tolerance, compared to a corresponding non-modified, e.g. a non-transformed, wild type plant is conferred if the activity of a polypeptide comprising the polypeptide shown in SEQ ID NO. 673, or encoded by a nucleic acid molecule comprising the nucleic acid molecule shown in SEQ ID NO. 672, or a homolog of said nucleic acid molecule or polypeptide, is increased or generated. For example, the activity of a corresponding nucleic acid molecule or a polypeptide derived from Arabidopsis thaliana is increased or generated, preferably comprising the nucleic acid molecule shown in SEQ ID NO. 672 or polypeptide shown in SEQ ID NO. 673, respectively, or a homolog thereof. E.g. an increased tolerance to abiotic environmental stress, in particular increased low temperature tolerance, compared to a corresponding non-modified, e.g. a non-transformed, wild type plant is conferred if the activity “peptidyl-prolyl cis-trans isomerase” or if the activity of a nucleic acid molecule or a polypeptide comprising the nucleic acid or polypeptide or the consensus sequence or the polypeptide motif, depicted in table I, II or IV, column 7, respective same line as SEQ ID NO.: 672 or SEQ ID NO.: 673, respectively, is increased or generated in a plant or part thereof. Preferably, the increase occurs cytoplasmic. Particularly, an increase of yield from 1.05-fold to 1.18-fold, for example plus at least 100% thereof, under conditions of low temperature is conferred compared to a corresponding non-modified, e.g. non-transformed, wild type plant.

[0213] In a further embodiment, an increased tolerance to abiotic environmental stress, in particular increased low temperature tolerance, compared to a corresponding non-modified, e.g. a non-transformed, wild type plant is conferred if the activity of a polypeptide comprising the polypeptide shown in SEQ ID NO. 1629, or encoded by a nucleic acid molecule comprising the nucleic acid molecule shown in SEQ ID NO. 1628, or a homolog of said nucleic acid molecule or polypeptide, is increased or generated. For example, the activity of a corresponding nucleic acid molecule or a polypeptide derived from Arabidopsis thaliana is increased or generated, preferably comprising the nucleic acid molecule shown in SEQ ID NO. 1628 or polypeptide shown in SEQ ID NO. 1629, respectively, or a homolog thereof. E.g. an increased tolerance to abiotic environmental stress, in particular increased low temperature tolerance, compared to a corresponding non-modified, e.g. a non-transformed, wild type plant is conferred if the activity “AT5G47440-protein” or if the activity of a nucleic acid molecule or a polypeptide comprising the nucleic acid or polypeptide or the consensus sequence or the polypeptide motif, depicted in table I, II or IV, column 7, respective same line as SEQ ID NO.: 1628 or SEQ ID NO.: 1629, respectively, is increased or generated in a plant or part thereof. Preferably, the increase occurs cytoplasmic. Particularly, an increase of yield from 1.05-fold to 1.07-fold, for example plus at least 100% thereof, under conditions of low temperature is conferred compared to a corresponding non-modified, e.g. non-transformed, wild type plant.

[0214] In a further embodiment, an increased tolerance to abiotic environmental stress, in particular increased low temperature tolerance, compared to a corresponding non-modified, e.g. a non-transformed, wild type plant is conferred if the activity of a polypeptide comprising the polypeptide shown in SEQ ID NO. 1710, or encoded by a nucleic acid molecule comprising the nucleic acid molecule shown in SEQ ID NO. 1709, or a homolog of said nucleic acid molecule or polypeptide, is increased or generated. For example, the activity of a corresponding nucleic acid molecule or a polypeptide derived from Escherichia coli is increased or generated, preferably comprising the nucleic acid molecule shown in SEQ ID NO. 1709 or polypeptide shown in SEQ ID NO. 1710, respectively, or a homolog thereof. E.g. an increased tolerance to abiotic environmental stress, in particular increased low temperature tolerance, compared to a corresponding non-modified, e.g. a non-transformed, wild type plant is conferred if the activity “4-diphosphocytidyl-2-C-methyl-D-erythritol kinase” or if the activity of a nucleic acid molecule or a polypeptide comprising the nucleic acid or polypeptide or the consensus sequence or the polypeptide motif, depicted in table I, II or IV, column 7, respective same line as SEQ ID NO.: 1709 or SEQ ID NO.: 1710, respectively, is increased or generated in a plant or part thereof. Preferably, the increase occurs plastidic. Particularly, an increase of yield from 1.05-fold to 1.24-fold, for example plus at least 100% thereof, under conditions of low temperature is conferred compared to a corresponding non-modified, e.g. non-transformed, wild type plant.

[0215] In a further embodiment, an increased tolerance to abiotic environmental stress, in particular increased low temperature tolerance, compared to a corresponding non-modified, e.g. a non-transformed, wild type plant is conferred if the activity of a polypeptide comprising the polypeptide shown in SEQ ID NO. 2227, or encoded by a nucleic acid molecule comprising the nucleic acid molecule shown in SEQ ID NO. 2226, or a homolog of said nucleic acid molecule or polypeptide, is increased or generated. For example, the activity of a corresponding nucleic acid molecule or a polypeptide derived from Escherichia coli is increased or generated, preferably comprising the nucleic acid molecule shown in SEQ ID NO. 2226 or polypeptide shown in SEQ ID NO. 2227, respectively, or a homolog thereof. E.g. an increased tolerance to abiotic environmental stress, in particular increased low temperature tolerance, compared to a corresponding non-modified, e.g. a non-transformed, wild type plant is conferred if the activity “3′-phosphoadenosine 5′-phosphate phosphatase” or if the activity of a nucleic acid molecule or a polypeptide comprising the nucleic acid or polypeptide or the consensus sequence or the polypeptide motif, depicted in table I, II or IV, column 7, respective same line as SEQ ID NO.: 2226 or SEQ ID NO.: 2227, respectively, is increased or generated in a plant or part thereof. Preferably, the increase occurs plastidic. Particularly, an increase of yield from 1.05-fold to 1.09-fold, for example plus at least 100% thereof, under conditions of low temperature is conferred compared to a corresponding non-modified, e.g. non-transformed, wild type plant.

[0216] In a further embodiment, an increased tolerance to abiotic environmental stress, in particular increased low temperature tolerance, compared to a corresponding non-modified, e.g. a non-transformed, wild type plant is conferred if the activity of a polypeptide comprising the polypeptide shown in SEQ ID NO. 3464, or encoded by a nucleic acid molecule comprising the nucleic acid molecule shown in SEQ ID NO. 3463, or a homolog of said nucleic acid molecule or polypeptide, is increased or generated. For example, the activity of a corresponding nucleic acid molecule or a polypeptide derived from Populus trichocarpa is increased or generated, preferably comprising the nucleic acid molecule shown in SEQ ID NO. 3463 or polypeptide shown in SEQ ID NO. 3464, respectively, or a homolog thereof. E.g. an increased tolerance to abiotic environmental stress, in particular increased low temperature tolerance, compared to a corresponding non-modified, e.g. a non-transformed, wild type plant is conferred if the activity “60S ribosomal protein” or if the activity of a nucleic acid molecule or a polypeptide comprising the nucleic acid or polypeptide or the consensus sequence or the polypeptide motif, depicted in table I, II or IV, column 7, respective same line as SEQ ID NO.: 3463 or SEQ ID NO.: 3464, respectively, is increased or generated in a plant or part thereof. Preferably, the increase occurs cytoplasmic. Particularly, an increase of yield from 1.05-fold to 1.09-fold, for example plus at least 100% thereof, under conditions of low temperature is conferred compared to a corresponding non-modified, e.g. non-transformed, wild type plant.

[0217] In a further embodiment, an increased tolerance to abiotic environmental stress, in particular increased low temperature tolerance, compared to a corresponding non-modified, e.g. a non-transformed, wild type plant is conferred if the activity of a polypeptide comprising the polypeptide shown in SEQ ID NO. 4631, or encoded by a nucleic acid molecule comprising the nucleic acid molecule shown in SEQ ID NO. 4630, or a homolog of said nucleic acid molecule or polypeptide, is increased or generated. For example, the activity of a corresponding nucleic acid molecule or a polypeptide derived from Thermus thermophilus is increased or generated, preferably comprising the nucleic acid molecule shown in SEQ ID NO. 4630 or polypeptide shown in SEQ ID NO. 4631, respectively, or a homolog thereof. E.g. an increased tolerance to abiotic environmental stress, in particular increased low temperature tolerance, compared to a corresponding non-modified, e.g. a non-transformed, wild type plant is conferred if the activity “S-ribosylhomocysteinase” or if the activity of a nucleic acid molecule or a polypeptide comprising the nucleic acid or polypeptide or the consensus sequence or the polypeptide motif, depicted in table I, II or IV, column 7, respective same line as SEQ ID NO.: 4630 or SEQ ID NO.: 4631, respectively, is increased or generated in a plant or part thereof. Preferably, the increase occurs cytoplasmic. Particularly, an increase of yield from 1.05-fold to 1.06-fold, for example plus at least 100% thereof, under conditions of low temperature is conferred compared to a corresponding non-modified, e.g. non-transformed, wild type plant.

[0218] In a further embodiment, an increased tolerance to abiotic environmental stress, in particular increased low temperature tolerance, compared to a corresponding non-modified, e.g. a non-transformed, wild type plant is conferred if the activity of a polypeptide comprising the polypeptide shown in SEQ ID NO. 5493, or encoded by a nucleic acid molecule comprising the nucleic acid molecule shown in SEQ ID NO. 5492, or a homolog of said nucleic acid molecule or polypeptide, is increased or generated. For example, the activity of a corresponding nucleic acid molecule or a polypeptide derived from Zea mays is increased or generated, preferably comprising the nucleic acid molecule shown in SEQ ID NO. 5492 or polypeptide shown in SEQ ID NO. 5493, respectively, or a homolog thereof. E.g. an increased tolerance to abiotic environmental stress, in particular increased low temperature tolerance, compared to a corresponding non-modified, e.g. a non-transformed, wild type plant is conferred if the activity “Thioredoxin H-type” or if the activity of a nucleic acid molecule or a polypeptide comprising the nucleic acid or polypeptide or the consensus sequence or the polypeptide motif, depicted in table I, II or IV, column 7, respective same line as SEQ ID NO.: 5492 or SEQ ID NO.: 5493, respectively, is increased or generated in a plant or part thereof. Preferably, the increase occurs cytoplasmic. Particularly, an increase of yield from 1.05-fold to 1.09-fold, for example plus at least 100% thereof, under conditions of low temperature is conferred compared to a corresponding non-modified, e.g. non-transformed, wild type plant.

[0219] In a further embodiment, an increased tolerance to abiotic environmental stress, in particular increased low temperature tolerance, compared to a corresponding non-modified, e.g. a non-transformed, wild type plant is conferred if the activity of a polypeptide comprising the polypeptide shown in SEQ ID NO. 5839, or encoded by a nucleic acid molecule comprising the nucleic acid molecule shown in SEQ ID NO. 5838, or a homolog of said nucleic acid molecule or polypeptide, is increased or generated. For example, the activity of a corresponding nucleic acid molecule or a polypeptide derived from Arabidopsis thaliana is increased or generated, preferably comprising the nucleic acid molecule shown in SEQ ID NO. 5838 or polypeptide shown in SEQ ID NO. 5839, respectively, or a homolog thereof. E.g. an increased tolerance to abiotic environmental stress, in particular increased low temperature tolerance, compared to a corresponding non-modified, e.g. a non-transformed, wild type plant is conferred if the activity “AT1G29250.1-protein” or if the activity of a nucleic acid molecule or a polypeptide comprising the nucleic acid or polypeptide or the consensus sequence or the polypeptide motif, depicted in table I, II or IV, column 7, respective same line as SEQ ID NO.: 5838 or SEQ ID NO.: 5839, respectively, is increased or generated in a plant or part thereof. Preferably, the increase occurs cytoplasmic. Particularly, an increase of yield from 1.05-fold to 1.20-fold, for example plus at least 100% thereof, under conditions of low temperature is conferred compared to a corresponding non-modified, e.g. non-transformed, wild type plant.

[0220] In a further embodiment, an increased tolerance to abiotic environmental stress, in particular increased low temperature tolerance, compared to a corresponding non-modified, e.g. a non-transformed, wild type plant is conferred if the activity of a polypeptide comprising the polypeptide shown in SEQ ID NO. 5983, or encoded by a nucleic acid molecule comprising the nucleic acid molecule shown in SEQ ID NO. 5982, or a homolog of said nucleic acid molecule or polypeptide, is increased or generated. For example, the activity of a corresponding nucleic acid molecule or a polypeptide derived from Arabidopsis thaliana is increased or generated, preferably comprising the nucleic acid molecule shown in SEQ ID NO. 5982 or polypeptide shown in SEQ ID NO. 5983, respectively, or a homolog thereof. E.g. an increased tolerance to abiotic environmental stress, in particular increased low temperature tolerance, compared to a corresponding non-modified, e.g. a non-transformed, wild type plant is conferred if the activity “serine acetyltransferase” or if the activity of a nucleic acid molecule or a polypeptide comprising the nucleic acid or polypeptide or the consensus sequence or the polypeptide motif, depicted in table I, II or IV, column 7, respective same line as SEQ ID NO.: 5982 or SEQ ID NO.: 5983, respectively, is increased or generated in a plant or part thereof. Preferably, the increase occurs cytoplasmic. Particularly, an increase of yield from 1.05-fold to 1.22-fold, for example plus at least 100% thereof, under conditions of low temperature is conferred compared to a corresponding non-modified, e.g. non-transformed, wild type plant.

[0221] In a further embodiment, an increased tolerance to abiotic environmental stress, in particular increased low temperature tolerance, compared to a corresponding non-modified, e.g. a non-transformed, wild type plant is conferred if the activity of a polypeptide comprising the polypeptide shown in SEQ ID NO. 7365, or encoded by a nucleic acid molecule comprising the nucleic acid molecule shown in SEQ ID NO. 7364, or a homolog of said nucleic acid molecule or polypeptide, is increased or generated. For example, the activity of a corresponding nucleic acid molecule or a polypeptide derived from Arabidopsis thaliana is increased or generated, preferably comprising the nucleic acid molecule shown in SEQ ID NO. 7364 or polypeptide shown in SEQ ID NO. 7365, respectively, or a homolog thereof. E.g. an increased tolerance to abiotic environmental stress, in particular increased low temperature tolerance, compared to a corresponding non-modified, e.g. a non-transformed, wild type plant is conferred if the activity “AT4G01870-protein” or if the activity of a nucleic acid molecule or a polypeptide comprising the nucleic acid or polypeptide or the consensus sequence or the polypeptide motif, depicted in table I, II or IV, column 7, respective same line as SEQ ID NO.: 7364 or SEQ ID NO.: 7365, respectively, is increased or generated in a plant or part thereof. Preferably, the increase occurs cytoplasmic. Particularly, an increase of yield from 1.05-fold to 1.11-fold, for example plus at least 100% thereof, under conditions of low temperature is conferred compared to a corresponding non-modified, e.g. non-transformed, wild type plant.

[0222] In a further embodiment, an increased tolerance to abiotic environmental stress, in particular increased low temperature tolerance, compared to a corresponding non-modified, e.g. a non-transformed, wild type plant is conferred if the activity of a polypeptide comprising the polypeptide shown in SEQ ID NO. 7435, or encoded by a nucleic acid molecule comprising the nucleic acid molecule shown in SEQ ID NO. 7434, or a homolog of said nucleic acid molecule or polypeptide, is increased or generated. For example, the activity of a corresponding nucleic acid molecule or a polypeptide derived from Arabidopsis thaliana is increased or generated, preferably comprising the nucleic acid molecule shown in SEQ ID NO. 7434 or polypeptide shown in SEQ ID NO. 7435, respectively, or a homolog thereof. E.g. an increased tolerance to abiotic environmental stress, in particular increased low temperature tolerance, compared to a corresponding non-modified, e.g. a non-transformed, wild type plant is conferred if the activity “protein kinase family protein” or if the activity of a nucleic acid molecule or a polypeptide comprising the nucleic acid or polypeptide or the consensus sequence or the polypeptide motif, depicted in table I, II or IV, column 7, respective same line as SEQ ID NO.: 7434 or SEQ ID NO.: 7435, respectively, is increased or generated in a plant or part thereof. Preferably, the increase occurs cytoplasmic. Particularly, an increase of yield from 1.05-fold to 1.07-fold, for example plus at least 100% thereof, under conditions of low temperature is conferred compared to a corresponding non-modified, e.g. non-transformed, wild type plant.

[0223] In a further embodiment, an increased tolerance to abiotic environmental stress, in particular increased low temperature tolerance, compared to a corresponding non-modified, e.g. a non-transformed, wild type plant is conferred if the activity of a polypeptide comprising the polypeptide shown in SEQ ID NO. 7514, or encoded by a nucleic acid molecule comprising the nucleic acid molecule shown in SEQ ID NO. 7513, or a homolog of said nucleic acid molecule or polypeptide, is increased or generated. For example, the activity of a corresponding nucleic acid molecule or a polypeptide derived from Arabidopsis thaliana is increased or generated, preferably comprising the nucleic acid molecule shown in SEQ ID NO. 7513 or polypeptide shown in SEQ ID NO. 7514, respectively, or a homolog thereof. E.g. an increased tolerance to abiotic environmental stress, in particular increased low temperature tolerance, compared to a corresponding non-modified, e.g. a non-transformed, wild type plant is conferred if the activity “AP2 domain-containing transcription factor” or if the activity of a nucleic acid molecule or a polypeptide comprising the nucleic acid or polypeptide or the consensus sequence or the polypeptide motif, depicted in table I, II or IV, column 7, respective same line as SEQ ID NO.: 7513 or SEQ ID NO.: 7514, respectively, is increased or generated in a plant or part thereof. Preferably, the increase occurs cytoplasmic. Particularly, an increase of yield from 1.05-fold to 1.31-fold, for example plus at least 100% thereof, under conditions of low temperature is conferred compared to a corresponding non-modified, e.g. non-transformed, wild type plant.

[0224] In a further embodiment, an increased tolerance to abiotic environmental stress, in particular increased low temperature tolerance, compared to a corresponding non-modified, e.g. a non-transformed, wild type plant is conferred if the activity of a polypeptide comprising the polypeptide shown in SEQ ID NO. 7546, or encoded by a nucleic acid molecule comprising the nucleic acid molecule shown in SEQ ID NO. 7545, or a homolog of said nucleic acid molecule or polypeptide, is increased or generated. For example, the activity of a corresponding nucleic acid molecule or a polypeptide derived from Populus trichocarpa is increased or generated, preferably comprising the nucleic acid molecule shown in SEQ ID NO. 7545 or polypeptide shown in SEQ ID NO. 7546, respectively, or a homolog thereof. E.g. an increased tolerance to abiotic environmental stress, in particular increased low temperature tolerance, compared to a corresponding non-modified, e.g. a non-transformed, wild type plant is conferred if the activity “Oligosaccharyltransferase” or if the activity of a nucleic acid molecule or a polypeptide comprising the nucleic acid or polypeptide or the consensus sequence or the polypeptide motif, depicted in table I, II or IV, column 7, respective same line as SEQ ID NO.: 7545 or SEQ ID NO.: 7546, respectively, is increased or generated in a plant or part thereof. Preferably, the increase occurs cytoplasmic. Particularly, an increase of yield from 1.05-fold to 1.13-fold, for example plus at least 100% thereof, under conditions of low temperature is conferred compared to a corresponding non-modified, e.g. non-transformed, wild type plant.

[0225] In a further embodiment, an increased tolerance to abiotic environmental stress, in particular increased low temperature tolerance, compared to a corresponding non-modified, e.g. a non-transformed, wild type plant is conferred if the activity of a polypeptide comprising the polypeptide shown in SEQ ID NO. 8288, or encoded by a nucleic acid molecule comprising the nucleic acid molecule shown in SEQ ID NO. 8287, or a homolog of said nucleic acid molecule or polypeptide, is increased or generated. For example, the activity of a corresponding nucleic acid molecule or a polypeptide derived from Arabidopsis thaliana is increased or generated, preferably comprising the nucleic acid molecule shown in SEQ ID NO. 8287 or polypeptide shown in SEQ ID NO. 8288, respectively, or a homolog thereof. E.g. an increased tolerance to abiotic environmental stress, in particular increased low temperature tolerance, compared to a corresponding non-modified, e.g. a non-transformed, wild type plant is conferred if the activity “plastid lipid-associated protein” or if the activity of a nucleic acid molecule or a polypeptide comprising the nucleic acid or polypeptide or the consensus sequence or the polypeptide motif, depicted in table I, II or IV, column 7, respective same line as SEQ ID NO.: 8287 or SEQ ID NO.: 8288, respectively, is increased or generated in a plant or part thereof. Preferably, the increase occurs cytoplasmic. Particularly, an increase of yield from 1.05-fold to 1.12-fold, for example plus at least 100% thereof, under conditions of low temperature is conferred compared to a corresponding non-modified, e.g. non-transformed, wild type plant.

[0226] In a further embodiment, an increased tolerance to abiotic environmental stress, in particular increased low temperature tolerance, compared to a corresponding non-modified, e.g. a non-transformed, wild type plant is conferred if the activity of a polypeptide comprising the polypeptide shown in SEQ ID NO. 8065, or encoded by a nucleic acid molecule comprising the nucleic acid molecule shown in SEQ ID NO. 8064, or a homolog of said nucleic acid molecule or polypeptide, is increased or generated. For example, the activity of a corresponding nucleic acid molecule or a polypeptide derived from Arabidopsis thaliana is increased or generated, preferably comprising the nucleic acid molecule shown in SEQ ID NO. 8064 or polypeptide shown in SEQ ID NO. 8065, respectively, or a homolog thereof. E.g. an increased tolerance to abiotic environmental stress, in particular increased low temperature tolerance, compared to a corresponding non-modified, e.g. a non-transformed, wild type plant is conferred if the activity “jasmonate-zim-domain protein” or if the activity of a nucleic acid molecule or a polypeptide comprising the nucleic acid or polypeptide or the consensus sequence or the polypeptide motif, depicted in table I, II or IV, column 7, respective same line as SEQ ID NO.: 8064 or SEQ ID NO.: 8065, respectively, is increased or generated in a plant or part thereof. Preferably, the increase occurs cytoplasmic. Particularly, an increase of yield from 1.05-fold to 1.10-fold, for example plus at least 100% thereof, under conditions of low temperature is conferred compared to a corresponding non-modified, e.g. non-transformed, wild type plant.

[0227] In a further embodiment, an increased tolerance to abiotic environmental stress, in particular increased low temperature tolerance, compared to a corresponding non-modified, e.g. a non-transformed, wild type plant is conferred if the activity of a polypeptide comprising the polypeptide shown in SEQ ID NO. 8105, or encoded by a nucleic acid molecule comprising the nucleic acid molecule shown in SEQ ID NO. 8104, or a homolog of said nucleic acid molecule or polypeptide, is increased or generated. For example, the activity of a corresponding nucleic acid molecule or a polypeptide derived from Arabidopsis thaliana is increased or generated, preferably comprising the nucleic acid molecule shown in SEQ ID NO. 8104 or polypeptide shown in SEQ ID NO. 8105, respectively, or a homolog thereof. E.g. an increased tolerance to abiotic environmental stress, in particular increased low temperature tolerance, compared to a corresponding non-modified, e.g. a non-transformed, wild type plant is conferred if the activity “505 chloroplast ribosomal protein L21” or if the activity of a nucleic acid molecule or a polypeptide comprising the nucleic acid or polypeptide or the consensus sequence or the polypeptide motif, depicted in table I, II or IV, column 7, respective same line as SEQ ID NO.: 8104 or SEQ ID NO.: 8105, respectively, is increased or generated in a plant or part thereof. Preferably, the increase occurs cytoplasmic. Particularly, an increase of yield from 1.05-fold to 1.08-fold, for example plus at least 100% thereof, under conditions of low temperature is conferred compared to a corresponding non-modified, e.g. non-transformed, wild type plant.

[0228] In a further embodiment, an increased tolerance to abiotic environmental stress, in particular increased low temperature tolerance, compared to a corresponding non-modified, e.g. a non-transformed, wild type plant is conferred if the activity of a polypeptide comprising the polypeptide shown in SEQ ID NO. 8409, or encoded by a nucleic acid molecule comprising the nucleic acid molecule shown in SEQ ID NO. 8408, or a homolog of said nucleic acid molecule or polypeptide, is increased or generated. For example, the activity of a corresponding nucleic acid molecule or a polypeptide derived from Arabidopsis thaliana is increased or generated, preferably comprising the nucleic acid molecule shown in SEQ ID NO. 8408 or polypeptide shown in SEQ ID NO. 8409, respectively, or a homolog thereof. E.g. an increased tolerance to abiotic environmental stress, in particular increased low temperature tolerance, compared to a corresponding non-modified, e.g. a non-transformed, wild type plant is conferred if the activity “small heat shock protein” or if the activity of a nucleic acid molecule or a polypeptide comprising the nucleic acid or polypeptide or the consensus sequence or the polypeptide motif, depicted in table I, II or IV, column 7, respective same line as SEQ ID NO.: 8408 or SEQ ID NO.: 8409, respectively, is increased or generated in a plant or part thereof. Preferably, the increase occurs cytoplasmic. Particularly, an increase of yield from 1.05-fold to 1.11-fold, for example plus at least 100% thereof, under conditions of low temperature is conferred compared to a corresponding non-modified, e.g. non-transformed, wild type plant.

[0229] In a further embodiment, an increased tolerance to abiotic environmental stress, in particular increased low temperature tolerance, compared to a corresponding non-modified, e.g. a non-transformed, wild type plant is conferred if the activity of a polypeptide comprising the polypeptide shown in SEQ ID NO. 8843, or encoded by a nucleic acid molecule comprising the nucleic acid molecule shown in SEQ ID NO. 8842, or a homolog of said nucleic acid molecule or polypeptide, is increased or generated. For example, the activity of a corresponding nucleic acid molecule or a polypeptide derived from Populus trichocarpa is increased or generated, preferably comprising the nucleic acid molecule shown in SEQ ID NO. 8842 or polypeptide shown in SEQ ID NO. 8843, respectively, or a homolog thereof. E.g. an increased tolerance to abiotic environmental stress, in particular increased low temperature tolerance, compared to a corresponding non-modified, e.g. a non-transformed, wild type plant is conferred if the activity “rubisco subunit binding-protein beta subunit” or if the activity of a nucleic acid molecule or a polypeptide comprising the nucleic acid or polypeptide or the consensus sequence or the polypeptide motif, depicted in table I, II or IV, column 7, respective same line as SEQ ID NO.: 8842 or SEQ ID NO.: 8843, respectively, is increased or generated in a plant or part thereof. Preferably, the increase occurs cytoplasmic. Particularly, an increase of yield from 1.05-fold to 1.15-fold, for example plus at least 100% thereof, under conditions of low temperature is conferred compared to a corresponding non-modified, e.g. non-transformed, wild type plant.

[0230] In a further embodiment, an increased tolerance to abiotic environmental stress, in particular increased low temperature tolerance, compared to a corresponding non-modified, e.g. a non-transformed, wild type plant is conferred if the activity of a polypeptide comprising the polypeptide shown in SEQ ID NO. 10881, or encoded by a nucleic acid molecule comprising the nucleic acid molecule shown in SEQ ID NO. 10880, or a homolog of said nucleic acid molecule or polypeptide, is increased or generated. For example, the activity of a corresponding nucleic acid molecule or a polypeptide derived from Arabidopsis thaliana is increased or generated, preferably comprising the nucleic acid molecule shown in SEQ ID NO. 10880 or polypeptide shown in SEQ ID NO. 10881, respectively, or a homolog thereof. E.g. an increased tolerance to abiotic environmental stress, in particular increased low temperature tolerance, compared to a corresponding non-modified, e.g. a non-transformed, wild type plant is conferred if the activity “universal stress protein family protein” or if the activity of a nucleic acid molecule or a polypeptide comprising the nucleic acid or polypeptide or the consensus sequence or the polypeptide motif, depicted in table I, II or IV, column 7, respective same line as SEQ ID NO.: 10880 or SEQ ID NO.: 10881, respectively, is increased or generated in a plant or part thereof. Preferably, the increase occurs cytoplasmic. Particularly, an increase of yield from 1.05-fold to 1.07-fold, for example plus at least 100% thereof, under conditions of low temperature is conferred compared to a corresponding non-modified, e.g. non-transformed, wild type plant.

[0231] In a further embodiment, an increased tolerance to abiotic environmental stress, in particular increased low temperature tolerance, compared to a corresponding non-modified, e.g. a non-transformed, wild type plant is conferred if the activity of a polypeptide comprising the polypeptide shown in SEQ ID NO. 10966, or encoded by a nucleic acid molecule comprising the nucleic acid molecule shown in SEQ ID NO. 10965, or a homolog of said nucleic acid molecule or polypeptide, is increased or generated. For example, the activity of a corresponding nucleic acid molecule or a polypeptide derived from Arabidopsis thaliana is increased or generated, preferably comprising the nucleic acid molecule shown in SEQ ID NO. 10965 or polypeptide shown in SEQ ID NO. 10966, respectively, or a homolog thereof. E.g. an increased tolerance to abiotic environmental stress, in particular increased low temperature tolerance, compared to a corresponding non-modified, e.g. a non-transformed, wild type plant is conferred if the activity “heat shock protein” or if the activity of a nucleic acid molecule or a polypeptide comprising the nucleic acid or polypeptide or the consensus sequence or the polypeptide motif, depicted in table I, II or IV, column 7, respective same line as SEQ ID NO.: 10965 or SEQ ID NO.: 10966, respectively, is increased or generated in a plant or part thereof. Preferably, the increase occurs cytoplasmic. Particularly, an increase of yield from 1.05-fold to 1.15-fold, for example plus at least 100% thereof, under conditions of low temperature is conferred compared to a corresponding non-modified, e.g. non-transformed, wild type plant.

[0232] In a further embodiment, an increased tolerance to abiotic environmental stress, in particular increased low temperature tolerance, compared to a corresponding non-modified, e.g. a non-transformed, wild type plant is conferred if the activity of a polypeptide comprising the polypeptide shown in SEQ ID NO. 12197, or encoded by a nucleic acid molecule comprising the nucleic acid molecule shown in SEQ ID NO. 12196, or a homolog of said nucleic acid molecule or polypeptide, is increased or generated. For example, the activity of a corresponding nucleic acid molecule or a polypeptide derived from Arabidopsis thaliana is increased or generated, preferably comprising the nucleic acid molecule shown in SEQ ID NO. 12196 or polypeptide shown in SEQ ID NO. 12197, respectively, or a homolog thereof. E.g. an increased tolerance to abiotic environmental stress, in particular increased low temperature tolerance, compared to a corresponding non-modified, e.g. a non-transformed, wild type plant is conferred if the activity “AT2G35300-protein” or if the activity of a nucleic acid molecule or a polypeptide comprising the nucleic acid or polypeptide or the consensus sequence or the polypeptide motif, depicted in table I, II or IV, column 7, respective same line as SEQ ID NO.: 12196 or SEQ ID NO.: 12197, respectively, is increased or generated in a plant or part thereof. Preferably, the increase occurs cytoplasmic. Particularly, an increase of yield from 1.05-fold to 1.10-fold, for example plus at least 100% thereof, under conditions of low temperature is conferred compared to a corresponding non-modified, e.g. non-transformed, wild type plant.

[0233] In a further embodiment, an increased tolerance to abiotic environmental stress, in particular increased low temperature tolerance, compared to a corresponding non-modified, e.g. a non-transformed, wild type plant is conferred if the activity of a polypeptide comprising the polypeptide shown in SEQ ID NO. 13132, or encoded by a nucleic acid molecule comprising the nucleic acid molecule shown in SEQ ID NO. 13131, or a homolog of said nucleic acid molecule or polypeptide, is increased or generated. For example, the activity of a corresponding nucleic acid molecule or a polypeptide derived from Arabidopsis thaliana is increased or generated, preferably comprising the nucleic acid molecule shown in SEQ ID NO. 13131 or polypeptide shown in SEQ ID NO. 13132, respectively, or a homolog thereof. E.g. an increased tolerance to abiotic environmental stress, in particular increased low temperature tolerance, compared to a corresponding non-modified, e.g. a non-transformed, wild type plant is conferred if the activity “delta-8 sphingolipid desaturase” or if the activity of a nucleic acid molecule or a polypeptide comprising the nucleic acid or polypeptide or the consensus sequence or the polypeptide motif, depicted in table I, II or IV, column 7, respective same line as SEQ ID NO.: 13131 or SEQ ID NO.: 13132, respectively, is increased or generated in a plant or part thereof. Preferably, the increase occurs cytoplasmic. Particularly, an increase of yield from 1.05-fold to 1.08-fold, for example plus at least 100% thereof, under conditions of low temperature is conferred compared to a corresponding non-modified, e.g. non-transformed, wild type plant.

[0234] In a further embodiment, an increased tolerance to abiotic environmental stress, in particular increased low temperature tolerance, compared to a corresponding non-modified, e.g. a non-transformed, wild type plant is conferred if the activity of a polypeptide comprising the polypeptide shown in SEQ ID NO. 13437, or encoded by a nucleic acid molecule comprising the nucleic acid molecule shown in SEQ ID NO. 13436, or a homolog of said nucleic acid molecule or polypeptide, is increased or generated. For example, the activity of a corresponding nucleic acid molecule or a polypeptide derived from Populus trichocarpa is increased or generated, preferably comprising the nucleic acid molecule shown in SEQ ID NO. 13436 or polypeptide shown in SEQ ID NO. 13437, respectively, or a homolog thereo. E.g. an increased tolerance to abiotic environmental stress, in particular increased low temperature tolerance, compared to a corresponding non-modified, e.g. a non-transformed, wild type plant is conferred if the activity “CDS5394-protein” or if the activity of a nucleic acid molecule or a polypeptide comprising the nucleic acid or polypeptide or the consensus sequence or the polypeptide motif, depicted in table I, II or IV, column 7, respective same line as SEQ ID NO.: 13436 or SEQ ID NO.: 13437, respectively, is increased or generated in a plant or part thereof. Preferably, the increase occurs cytoplasmic. Particularly, an increase of yield from 1.05-fold to 1.12-fold, for example plus at least 100% thereof, under conditions of low temperature is conferred compared to a corresponding non-modified, e.g. non-transformed, wild type plant.

[0235] In a further embodiment, an increased tolerance to abiotic environmental stress, in particular increased low temperature tolerance, compared to a corresponding non-modified, e.g. a non-transformed, wild type plant is conferred if the activity of a polypeptide comprising the polypeptide shown in SEQ ID NO. 13478, or encoded by a nucleic acid molecule comprising the nucleic acid molecule shown in SEQ ID NO. 13477, or a homolog of said nucleic acid molecule or polypeptide, is increased or generated. For example, the activity of a corresponding nucleic acid molecule or a polypeptide derived from Populus trichocarpa is increased or generated, preferably comprising the nucleic acid molecule shown in SEQ ID NO. 13477 or polypeptide shown in SEQ ID NO. 13478, respectively, or a homolog thereof. E.g. an increased tolerance to abiotic environmental stress, in particular increased low temperature tolerance, compared to a corresponding non-modified, e.g. a non-transformed, wild type plant is conferred if the activity “CDS5401_TRUNCATEDprotein” or if the activity of a nucleic acid molecule or a polypeptide comprising the nucleic acid or polypeptide or the consensus sequence or the polypeptide motif, depicted in table I, II or IV, column 7, respective same line as SEQ ID NO.: 13477 or SEQ ID NO.: 13478, respectively, is increased or generated in a plant or part thereof. Preferably, the increase occurs cytoplasmic. Particularly, an increase of yield from 1.05-fold to 1.16-fold, for example plus at least 100% thereof, under conditions of low temperature is conferred compared to a corresponding non-modified, e.g. non-transformed, wild type plant.

[0236] In a further embodiment, an increased tolerance to abiotic environmental stress, in particular increased low temperature tolerance, compared to a corresponding non-modified, e.g. a non-transformed, wild type plant is conferred if the activity of a polypeptide comprising the polypeptide shown in SEQ ID NO. 13552, or encoded by a nucleic acid molecule comprising the nucleic acid molecule shown in SEQ ID NO. 13551, or a homolog of said nucleic acid molecule or polypeptide, is increased or generated. For example, the activity of a corresponding nucleic acid molecule or a polypeptide derived from Zea mays is increased or generated, preferably comprising the nucleic acid molecule shown in SEQ ID NO. 13551 or polypeptide shown in SEQ ID NO. 13552, respectively, or a homolog thereof. E.g. an increased tolerance to abiotic environmental stress, in particular increased low temperature tolerance, compared to a corresponding non-modified, e.g. a non-transformed, wild type plant is conferred if the activity “cullin” or if the activity of a nucleic acid molecule or a polypeptide comprising the nucleic acid or polypeptide or the consensus sequence or the polypeptide motif, depicted in table I, II or IV, column 7, respective same line as SEQ ID NO.: 13551 or SEQ ID NO.: 13552, respectively, is increased or generated in a plant or part thereof. Preferably, the increase occurs cytoplasmic. Particularly, an increase of yield from 1.05-fold to 1.14-fold, for example plus at least 100% thereof, under conditions of low temperature is conferred compared to a corresponding non-modified, e.g. non-transformed, wild type plant.

[0237] In a further embodiment, an increased tolerance to abiotic environmental stress, in particular increased low temperature tolerance, compared to a corresponding non-modified, e.g. a non-transformed, wild type plant is conferred if the activity of a polypeptide comprising the polypeptide shown in SEQ ID NO. 13246, or encoded by a nucleic acid molecule comprising the nucleic acid molecule shown in SEQ ID NO. 13245, or a homolog of said nucleic acid molecule or polypeptide, is increased or generated. For example, the activity of a corresponding nucleic acid molecule or a polypeptide derived from Arabidopsis thaliana is increased or generated, preferably comprising the nucleic acid molecule shown in SEQ ID NO. 13245 or polypeptide shown in SEQ ID NO. 13246, respectively, or a homolog thereof. E.g. an increased tolerance to abiotic environmental stress, in particular increased low temperature tolerance, compared to a corresponding non-modified, e.g. a non-transformed, wild type plant is conferred if the activity “PRLI-interacting factor” or if the activity of a nucleic acid molecule or a polypeptide comprising the nucleic acid or polypeptide or the consensus sequence or the polypeptide motif, depicted in table I, II or IV, column 7, respective same line as SEQ ID NO.: 13245 or SEQ ID NO.: 13246, respectively, is increased or generated in a plant or part thereof. Preferably, the increase occurs cytoplasmic. Particularly, an increase of yield from 1.05-fold to 1.25-fold, for example plus at least 100% thereof, under conditions of low temperature is conferred compared to a corresponding non-modified, e.g. non-transformed, wild type plant.

[0238] In one embodiment, a nucleic acid molecule indicated as indicated in Table I or the expression product is used in the method of the present invention to increase stress tolerance, e.g. increase low temperature, of a plant compared to the wild type control.

[0239] The ratios indicated above particularly refer to an increased yield actually measured as increase of biomass, especially as fresh weight biomass of aerial parts.

[0240] Enhanced tolerance to low temperature may, for example, be determined according to the following method: Transformed plants are grown in pots in a growth chamber (e.g. York, Mannheim, Germany). In case the plants are Arabidopsis thaliana seeds thereof are sown in pots containing a 3.5:1 (v:v) mixture of nutrient rich soil (GS90, Tantau, Wansdorf, Germany) and sand. Plants are grown under standard growth conditions. In case the plants are Arabidopsis thaliana, the standard growth conditions are: photoperiod of 16 h light and 8 h dark, 20° C., 60% relative humidity, and a photon flux density of 200 μmol/m²s. Plants are grown and cultured. In case the plants are Arabidopsis thaliana they are watered every second day. After 9 to 10 days the plants are individualized. Cold (e.g. chilling at 11-12° C.) is applied 14 days after sowing until the end of the experiment. After a total growth period of 29 to 31 days the plants are harvested and rated by the fresh weight of the aerial parts of the plants, in the case of Arabidopsis preferably the rosettes.

[0241] Surprisingly it was found, that the transgenic expression of the nucleic acid molecule of the invention derived from an organism indicated in column 4, in a plant such as A. thaliana, for example, conferred increased yield.

[0242] Accordingly, in one embodiment, an increased yield as compared to a correspondingly non-modified, e.g. a non-transformed, wild type plant is conferred according to method of the invention, by increasing or generating the activity of a polypeptide comprising the yield-related polypeptide shown in SEQ ID NO.: 64, or encoded by the yield-related nucleic acid molecule (or gene) comprising the nucleic acid shown in SEQ ID NO.: 63, or a homolog of said nucleic acid molecule or polypeptide, e.g. derived from Arabidopsis thaliana. Thus, in one embodiment, the activity “2-oxoglutarate-dependent dioxygenase” or the activity of a nucleic acid molecule or a polypeptide comprising the nucleic acid or polypeptide or the consensus sequence or the polypeptide motif, depicted in table I, II or IV, column 7, respective same line as SEQ ID NO.: 63, or SEQ ID NO.: 64, respectively, is increased or generated in a plant cell, plant or part thereof. Preferably, the increase occurs cytoplasmic.

[0243] Accordingly, in one embodiment, an increased yield as compared to a correspondingly non-modified, e.g. a non-transformed, wild type plant is conferred according to method of the invention, by increasing or generating the activity of a polypeptide comprising the yield-related polypeptide shown in SEQ ID NO.: 385, or encoded by the yield-related nucleic acid molecule (or gene) comprising the nucleic acid shown in SEQ ID NO.: 384, or a homolog of said nucleic acid molecule or polypeptide, e.g. derived from Arabidopsis thaliana. Thus, in one embodiment, the activity “Oxygen-evolving enhancer protein” or the activity of a nucleic acid molecule or a polypeptide comprising the nucleic acid or polypeptide or the consensus sequence or the polypeptide motif, depicted in table I, II or IV, column 7, respective same line as SEQ ID NO.: 384, or SEQ ID NO.: 385, respectively, is increased or generated in a plant cell, plant or part thereof. Preferably, the increase occurs cytoplasmic.

[0244] Accordingly, in one embodiment, an increased yield as compared to a correspondingly non-modified, e.g. a non-transformed, wild type plant is conferred according to method of the invention, by increasing or generating the activity of a polypeptide comprising the yield-related polypeptide shown in SEQ ID NO.: 505, or encoded by the yield-related nucleic acid molecule (or gene) comprising the nucleic acid shown in SEQ ID NO.: 504, or a homolog of said nucleic acid molecule or polypeptide, e.g. derived from Arabidopsis thaliana. Thus, in one embodiment, the activity “2-oxoglutarate-dependent dioxygenase” or the activity of a nucleic acid molecule or a polypeptide comprising the nucleic acid or polypeptide or the consensus sequence or the polypeptide motif, depicted in table I, II or IV, column 7, respective same line as SEQ ID NO.: 504, or SEQ ID NO.: 505, respectively, is increased or generated in a plant cell, plant or part thereof. Preferably, the increase occurs cytoplasmic.

[0245] Accordingly, in one embodiment, an increased yield as compared to a correspondingly non-modified, e.g. a non-transformed, wild type plant is conferred according to method of the invention, by increasing or generating the activity of a polypeptide comprising the yield-related polypeptide shown in SEQ ID NO.: 608, or encoded by the yield-related nucleic acid molecule (or gene) comprising the nucleic acid shown in SEQ ID NO.: 607, or a homolog of said nucleic acid molecule or polypeptide, e.g. derived from Arabidopsis thaliana. Thus, in one embodiment, the activity “peptidyl-prolyl cis-trans isomerase family protein” or the activity of a nucleic acid molecule or a polypeptide comprising the nucleic acid or polypeptide or the consensus sequence or the polypeptide motif, depicted in table I, II or IV, column 7, respective same line as SEQ ID NO.: 607, or SEQ ID NO.: 608, respectively, is increased or generated in a plant cell, plant or part thereof. Preferably, the increase occurs cytoplasmic.

[0246] Accordingly, in one embodiment, an increased yield as compared to a correspondingly non-modified, e.g. a non-transformed, wild type plant is conferred according to method of the invention, by increasing or generating the activity of a polypeptide comprising the yield-related polypeptide shown in SEQ ID NO.: 642, or encoded by the yield-related nucleic acid molecule (or gene) comprising the nucleic acid shown in SEQ ID NO.: 641, or a homolog of said nucleic acid molecule or polypeptide, e.g. derived from Arabidopsis thaliana. Thus, in one embodiment, the activity “AT1G53885-protein” or the activity of a nucleic acid molecule or a polypeptide comprising the nucleic acid or polypeptide or the consensus sequence or the polypeptide motif, depicted in table I, II or IV, column 7, respective same line as SEQ ID NO.: 641, or SEQ ID NO.: 642, respectively, is increased or generated in a plant cell, plant or part thereof. Preferably, the increase occurs cytoplasmic.

[0247] Accordingly, in one embodiment, an increased yield as compared to a correspondingly non-modified, e.g. a non-transformed, wild type plant is conferred according to method of the invention, by increasing or generating the activity of a polypeptide comprising the yield-related polypeptide shown in SEQ ID NO.: 673, or encoded by the yield-related nucleic acid molecule (or gene) comprising the nucleic acid shown in SEQ ID NO.: 672, or a homolog of said nucleic acid molecule or polypeptide, e.g. derived from Arabidopsis thaliana. Thus, in one embodiment, the activity “peptidyl-prolyl cis-trans isomerase” or the activity of a nucleic acid molecule or a polypeptide comprising the nucleic acid or polypeptide or the consensus sequence or the polypeptide motif, depicted in table I, II or IV, column 7, respective same line as SEQ ID NO.: 672, or SEQ ID NO.: 673, respectively, is increased or generated in a plant cell, plant or part thereof. Preferably, the increase occurs cytoplasmic.

[0248] Accordingly, in one embodiment, an increased yield as compared to a correspondingly non-modified, e.g. a non-transformed, wild type plant is conferred according to method of the invention, by increasing or generating the activity of a polypeptide comprising the yield-related polypeptide shown in SEQ ID NO.: 1552, or encoded by the yield-related nucleic acid molecule (or gene) comprising the nucleic acid shown in SEQ ID NO.: 1551, or a homolog of said nucleic acid molecule or polypeptide, e.g. derived from Arabidopsis thaliana. Thus, in one embodiment, the activity “Polypyrimidine tract binding protein” or the activity of a nucleic acid molecule or a polypeptide comprising the nucleic acid or polypeptide or the consensus sequence or the polypeptide motif, depicted in table I, II or IV, column 7, respective same line as SEQ ID NO.: 1551, or SEQ ID NO.: 1552, respectively, is increased or generated in a plant cell, plant or part thereof. Preferably, the increase occurs cytoplasmic.

[0249] Accordingly, in one embodiment, an increased yield as compared to a correspondingly non-modified, e.g. a non-transformed, wild type plant is conferred according to method of the invention, by increasing or generating the activity of a polypeptide comprising the yield-related polypeptide shown in SEQ ID NO.: 1629, or encoded by the yield-related nucleic acid molecule (or gene) comprising the nucleic acid shown in SEQ ID NO.: 1628, or a homolog of said nucleic acid molecule or polypeptide, e.g. derived from Arabidopsis thaliana. Thus, in one embodiment, the activity “AT5G47440-protein” or the activity of a nucleic acid molecule or a polypeptide comprising the nucleic acid or polypeptide or the consensus sequence or the polypeptide motif, depicted in table I, II or IV, column 7, respective same line as SEQ ID NO.: 1628, or SEQ ID NO.: 1629, respectively, is increased or generated in a plant cell, plant or part thereof. Preferably, the increase occurs cytoplasmic.

[0250] Accordingly, in one embodiment, an increased yield as compared to a correspondingly non-modified, e.g. a non-transformed, wild type plant is conferred according to method of the invention, by increasing or generating the activity of a polypeptide comprising the yield-related polypeptide shown in SEQ ID NO.: 1710, or preferably, in SEQ ID NO.: 2220, or encoded by the yield-related nucleic acid molecule (or gene) comprising the nucleic acid shown in SEQ ID NO.: 1709, or, preferably, in SEQ ID NO.: 2219, a homolog of said nucleic acid molecule or polypeptide, e.g. derived from Escherichia coli or modified as shown in SEQ ID NO.: 2219 and SEQ ID NO.: 2220. Thus, in one embodiment, the activity “4-diphosphocytidyl-2-C-methyl-D-erythritol kinase” or the activity of a nucleic acid molecule or a polypeptide comprising the nucleic acid or polypeptide or the consensus sequence or the polypeptide motif, depicted in table I, II or IV, column 7, respective same line as SEQ ID NO.: 1709 or 2219, or SEQ ID NO.: 1710 or 2220, respectively, is increased or generated in a plant cell, plant or part thereof. Preferably, the increase occurs plastidic.

[0251] Accordingly, in one embodiment, an increased yield as compared to a correspondingly non-modified, e.g. a non-transformed, wild type plant is conferred accoriding to method of the invention, by increasing or generating the activity of a polypeptide comprising the yield-related polypeptide shown in SEQ ID NO.: 2227, or, preferably as in SEQ ID NO.: 2447, or encoded by the yield-related nucleic acid molecule (or gene) comprising the nucleic acid shown in SEQ ID NO.: 2226, or preferably as in SEQ ID NO.: 2446, or a homolog of said nucleic acid molecule or polypeptide, e.g. derived from Escherichia coli or modified as shown in SEQ ID NO.: 2447 or SEQ ID NO.: 2446. Thus, in one embodiment, the activity “3′-phosphoadenosine 5′-phosphate phosphatase” or the activity of a nucleic acid molecule or a polypeptide comprising the nucleic acid or polypeptide or the consensus sequence or the polypeptide motif, depicted in table I, II or IV, column 7, respective same line as SEQ ID NO.: 2226 or 2446, or SEQ ID NO.: 2227 or 2447, respectively, is increased or generated in a plant cell, plant or part thereof. Preferably, the increase occurs plastidic.

[0252] Accordingly, in one embodiment, an increased yield as compared to a correspondingly non-modified, e.g. a non-transformed, wild type plant is conferred accoriding to method of the invention, by increasing or generating the activity of a polypeptide comprising the yield-related polypeptide shown in SEQ ID NO.: 2458, or encoded by the yield-related nucleic acid molecule (or gene) comprising the nucleic acid shown in SEQ ID NO.: 2457, or a homolog of said nucleic acid molecule or polypeptide, e.g. derived from Populus trichocarpa. Thus, in one embodiment, the activity “3-ketoacyl-CoA thiolase” or the activity of a nucleic acid molecule or a polypeptide comprising the nucleic acid or polypeptide or the consensus sequence or the polypeptide motif, depicted in table I, II or IV, column 7, respective same line as SEQ ID NO.: 2457, or SEQ ID NO.: 2458, respectively, is increased or generated in a plant cell, plant or part thereof. Preferably, the increase occurs cytoplasmic.

[0253] Accordingly, in one embodiment, an increased yield as compared to a correspondingly non-modified, e.g. a non-transformed, wild type plant is conferred accoriding to method of the invention, by increasing or generating the activity of a polypeptide comprising the yield-related polypeptide shown in SEQ ID NO.: 3464, or encoded by the yield-related nucleic acid molecule (or gene) comprising the nucleic acid shown in SEQ ID NO.: 3463, or a homolog of said nucleic acid molecule or polypeptide, e.g. derived from Populus trichocarpa. Thus, in one embodiment, the activity “60S ribosomal protein” or the activity of a nucleic acid molecule or a polypeptide comprising the nucleic acid or polypeptide or the consensus sequence or the polypeptide motif, depicted in table I, II or IV, column 7, respective same line as SEQ ID NO.: 3463, or SEQ ID NO.: 3464, respectively, is increased or generated in a plant cell, plant or part thereof. Preferably, the increase occurs cytoplasmic.

[0254] Accordingly, in one embodiment, an increased yield as compared to a correspondingly non-modified, e.g. a non-transformed, wild type plant is conferred accoriding to method of the invention, by increasing or generating the activity of a polypeptide comprising the yield-related polypeptide shown in SEQ ID NO.: 3795, or encoded by the yield-related nucleic acid molecule (or gene) comprising the nucleic acid shown in SEQ ID NO.: 3794, or a homolog of said nucleic acid molecule or polypeptide, e.g. derived from Populus trichocarpa. Thus, in one embodiment, the activity “serine hydroxymethyltransferase” or the activity of a nucleic acid molecule or a polypeptide comprising the nucleic acid or polypeptide or the consensus sequence or the polypeptide motif, depicted in table I, II or IV, column 7, respective same line as SEQ ID NO.: 3794, or SEQ ID NO.: 3795, respectively, is increased or generated in a plant cell, plant or part thereof. Preferably, the increase occurs cytoplasmic.

[0255] Accordingly, in one embodiment, an increased yield as compared to a correspondingly non-modified, e.g. a non-transformed, wild type plant is conferred accoriding to method of the invention, by increasing or generating the activity of a polypeptide comprising the yield-related polypeptide shown in SEQ ID NO.: 4631, or encoded by the yield-related nucleic acid molecule (or gene) comprising the nucleic acid shown in SEQ ID NO.: 4630, or a homolog of said nucleic acid molecule or polypeptide, e.g. derived from Thermus thermophilus. Thus, in one embodiment, the activity “S-ribosylhomocysteinase” or the activity of a nucleic acid molecule or a polypeptide comprising the nucleic acid or polypeptide or the consensus sequence or the polypeptide motif, depicted in table I, II or IV, column 7, respective same line as SEQ ID NO.: 4630, or SEQ ID NO.: 4631, respectively, is increased or generated in a plant cell, plant or part thereof. Preferably, the increase occurs cytoplasmic.

[0256] Accordingly, in one embodiment, an increased yield as compared to a correspondingly non-modified, e.g. a non-transformed, wild type plant is conferred accoriding to method of the invention, by increasing or generating the activity of a polypeptide comprising the yield-related polypeptide shown in SEQ ID NO.: 5043, or encoded by the yield-related nucleic acid molecule (or gene) comprising the nucleic acid shown in SEQ ID NO.: 5042, or a homolog of said nucleic acid molecule or polypeptide, e.g. derived from Saccharomyces cerevisiae. Thus, in one embodiment, the activity “Vacuolar protein” or the activity of a nucleic acid molecule or a polypeptide comprising the nucleic acid or polypeptide or the consensus sequence or the polypeptide motif, depicted in table I, II or IV, column 7, respective same line as SEQ ID NO.: 5042, or SEQ ID NO.: 5043, respectively, is increased or generated in a plant cell, plant or part thereof. Preferably, the increase occurs cytoplasmic.

[0257] Accordingly, in one embodiment, an increased yield as compared to a correspondingly non-modified, e.g. a non-transformed, wild type plant is conferred accoriding to method of the invention, by increasing or generating the activity of a polypeptide comprising the yield-related polypeptide shown in SEQ ID NO.: 5070, or encoded by the yield-related nucleic acid molecule (or gene) comprising the nucleic acid shown in SEQ ID NO.: 5069, or a homolog of said nucleic acid molecule or polypeptide, e.g. derived from Saccharomyces cerevisiae. Thus, in one embodiment, the activity “GTPase” or the activity of a nucleic acid molecule or a polypeptide comprising the nucleic acid or polypeptide or the consensus sequence or the polypeptide motif, depicted in table I, II or IV, column 7, respective same line as SEQ ID NO.: 5069, or SEQ ID NO.: 5070, respectively, is increased or generated in a plant cell, plant or part thereof. Preferably, the increase occurs cytoplasmic.

[0258] Accordingly, in one embodiment, an increased yield as compared to a correspondingly non-modified, e.g. a non-transformed, wild type plant is conferred accoriding to method of the invention, by increasing or generating the activity of a polypeptide comprising the yield-related polypeptide shown in SEQ ID NO.: 5493, or encoded by the yield-related nucleic acid molecule (or gene) comprising the nucleic acid shown in SEQ ID NO.: 5492, or a homolog of said nucleic acid molecule or polypeptide, e.g. derived from Zea mays. Thus, in one embodiment, the activity “Thioredoxin H-type” or the activity of a nucleic acid molecule or a polypeptide comprising the nucleic acid or polypeptide or the consensus sequence or the polypeptide motif, depicted in table I, II or IV, column 7, respective same line as SEQ ID NO.: 5492, or SEQ ID NO.: 5493, respectively, is increased or generated in a plant cell, plant or part thereof. Preferably, the increase occurs cytoplasmic.

[0259] Accordingly, in one embodiment, an increased yield as compared to a correspondingly non-modified, e.g. a non-transformed, wild type plant is conferred accoriding to method of the invention, by increasing or generating the activity of a polypeptide comprising the yield-related polypeptide shown in SEQ ID NO.: 5839, or encoded by the yield-related nucleic acid molecule (or gene) comprising the nucleic acid shown in SEQ ID NO.: 5838, or a homolog of said nucleic acid molecule or polypeptide, e.g. derived from Arabidopsis thaliana. Thus, in one embodiment, the activity “AT1G29250.1-protein” or the activity of a nucleic acid molecule or a polypeptide comprising the nucleic acid or polypeptide or the consensus sequence or the polypeptide motif, depicted in table I, II or IV, column 7, respective same line as SEQ ID NO.: 5838, or SEQ ID NO.: 5839, respectively, is increased or generated in a plant cell, plant or part thereof. Preferably, the increase occurs cytoplasmic.

[0260] Accordingly, in one embodiment, an increased yield as compared to a correspondingly non-modified, e.g. a non-transformed, wild type plant is conferred accoriding to method of the invention, by increasing or generating the activity of a polypeptide comprising the yield-related polypeptide shown in SEQ ID NO.: 5983, or encoded by the yield-related nucleic acid molecule (or gene) comprising the nucleic acid shown in SEQ ID NO.: 5982, or a homolog of said nucleic acid molecule or polypeptide, e.g. derived from Arabidopsis thaliana. Thus, in one embodiment, the activity “serine acetyltransferase” or the activity of a nucleic acid molecule or a polypeptide comprising the nucleic acid or polypeptide or the consensus sequence or the polypeptide motif, depicted in table I, II or IV, column 7, respective same line as SEQ ID NO.: 5982, or SEQ ID NO.: 5983, respectively, is increased or generated in a plant cell, plant or part thereof. Preferably, the increase occurs cytoplasmic.

[0261] Accordingly, in one embodiment, an increased yield as compared to a correspondingly non-modified, e.g. a non-transformed, wild type plant is conferred accoriding to method of the invention, by increasing or generating the activity of a polypeptide comprising the yield-related polypeptide shown in SEQ ID NO.: 6495, or encoded by the yield-related nucleic acid molecule (or gene) comprising the nucleic acid shown in SEQ ID NO.: 6494, or a homolog of said nucleic acid molecule or polypeptide, e.g. derived from Arabidopsis thaliana. Thus, in one embodiment, the activity “histone H2B” or the activity of a nucleic acid molecule or a polypeptide comprising the nucleic acid or polypeptide or the consensus sequence or the polypeptide motif, depicted in table I, II or IV, column 7, respective same line as SEQ ID NO.: 6494, or SEQ ID NO.: 6495, respectively, is increased or generated in a plant cell, plant or part thereof. Preferably, the increase occurs cytoplasmic.

[0262] Accordingly, in one embodiment, an increased yield as compared to a correspondingly non-modified, e.g. a non-transformed, wild type plant is conferred accoriding to method of the invention, by increasing or generating the activity of a polypeptide comprising the yield-related polypeptide shown in SEQ ID NO.: 7365, or encoded by the yield-related nucleic acid molecule (or gene) comprising the nucleic acid shown in SEQ ID NO.: 7364, or a homolog of said nucleic acid molecule or polypeptide, e.g. derived from Arabidopsis thaliana. Thus, in one embodiment, the activity “AT4G01870-protein” or the activity of a nucleic acid molecule or a polypeptide comprising the nucleic acid or polypeptide or the consensus sequence or the polypeptide motif, depicted in table I, II or IV, column 7, respective same line as SEQ ID NO.: 7364, or SEQ ID NO.: 7365, respectively, is increased or generated in a plant cell, plant or part thereof. Preferably, the increase occurs cytoplasmic.

[0263] Accordingly, in one embodiment, an increased yield as compared to a correspondingly non-modified, e.g. a non-transformed, wild type plant is conferred accoriding to method of the invention, by increasing or generating the activity of a polypeptide comprising the yield-related polypeptide shown in SEQ ID NO.: 7435, or encoded by the yield-related nucleic acid molecule (or gene) comprising the nucleic acid shown in SEQ ID NO.: 7434, or a homolog of said nucleic acid molecule or polypeptide, e.g. derived from Arabidopsis thaliana. Thus, in one embodiment, the activity “protein kinase family protein” or the activity of a nucleic acid molecule or a polypeptide comprising the nucleic acid or polypeptide or the consensus sequence or the polypeptide motif, depicted in table I, II or IV, column 7, respective same line as SEQ ID NO.: 7434, or SEQ ID NO.: 7435, respectively, is increased or generated in a plant cell, plant or part thereof. Preferably, the increase occurs cytoplasmic.

[0264] Accordingly, in one embodiment, an increased yield as compared to a correspondingly non-modified, e.g. a non-transformed, wild type plant is conferred accoriding to method of the invention, by increasing or generating the activity of a polypeptide comprising the yield-related polypeptide shown in SEQ ID NO.: 7514, or encoded by the yield-related nucleic acid molecule (or gene) comprising the nucleic acid shown in SEQ ID NO.: 7513, or a homolog of said nucleic acid molecule or polypeptide, e.g. derived from Arabidopsis thaliana. Thus, in one embodiment, the activity “AP2 domain-containing transcription factor” or the activity of a nucleic acid molecule or a polypeptide comprising the nucleic acid or polypeptide or the consensus sequence or the polypeptide motif, depicted in table I, II or IV, column 7, respective same line as SEQ ID NO.: 7513, or SEQ ID NO.: 7514, respectively, is increased or generated in a plant cell, plant or part thereof. Preferably, the increase occurs cytoplasmic.

[0265] Accordingly, in one embodiment, an increased yield as compared to a correspondingly non-modified, e.g. a non-transformed, wild type plant is conferred accoriding to method of the invention, by increasing or generating the activity of a polypeptide comprising the yield-related polypeptide shown in SEQ ID NO.: 7546, or encoded by the yield-related nucleic acid molecule (or gene) comprising the nucleic acid shown in SEQ ID NO.: 7545, or a homolog of said nucleic acid molecule or polypeptide, e.g. derived from Populus trichocarpa. Thus, in one embodiment, the activity “Oligosaccharyltransferase” or the activity of a nucleic acid molecule or a polypeptide comprising the nucleic acid or polypeptide or the consensus sequence or the polypeptide motif, depicted in table I, II or IV, column 7, respective same line as SEQ ID NO.: 7545, or SEQ ID NO.: 7546, respectively, is increased or generated in a plant cell, plant or part thereof. Preferably, the increase occurs cytoplasmic.

[0266] Accordingly, in one embodiment, an increased yield as compared to a correspondingly non-modified, e.g. a non-transformed, wild type plant is conferred accoriding to method of the invention, by increasing or generating the activity of a polypeptide comprising the yield-related polypeptide shown in SEQ ID NO.: 7722, or encoded by the yield-related nucleic acid molecule (or gene) comprising the nucleic acid shown in SEQ ID NO.: 7721, or a homolog of said nucleic acid molecule or polypeptide, e.g. derived from Arabidopsis thaliana. Thus, in one embodiment, the activity “ABC transporter family protein” or the activity of a nucleic acid molecule or a polypeptide comprising the nucleic acid or polypeptide or the consensus sequence or the polypeptide motif, depicted in table I, II or IV, column 7, respective same line as SEQ ID NO.: 7721, or SEQ ID NO.: 7722, respectively, is increased or generated in a plant cell, plant or part thereof. Preferably, the increase occurs cytoplasmic.

[0267] Accordingly, in one embodiment, an increased yield as compared to a correspondingly non-modified, e.g. a non-transformed, wild type plant is conferred accoriding to method of the invention, by increasing or generating the activity of a polypeptide comprising the yield-related polypeptide shown in SEQ ID NO.: 8288, or encoded by the yield-related nucleic acid molecule (or gene) comprising the nucleic acid shown in SEQ ID NO.: 8287, or a homolog of said nucleic acid molecule or polypeptide, e.g. derived from Arabidopsis thaliana. Thus, in one embodiment, the activity “plastid lipid-associated protein” or the activity of a nucleic acid molecule or a polypeptide comprising the nucleic acid or polypeptide or the consensus sequence or the polypeptide motif, depicted in table I, II or IV, column 7, respective same line as SEQ ID NO.: 8287, or SEQ ID NO.: 8288, respectively, is increased or generated in a plant cell, plant or part thereof. Preferably, the increase occurs cytoplasmic.

[0268] Accordingly, in one embodiment, an increased yield as compared to a correspondingly non-modified, e.g. a non-transformed, wild type plant is conferred accoriding to method of the invention, by increasing or generating the activity of a polypeptide comprising the yield-related polypeptide shown in SEQ ID NO.: 7865, or encoded by the yield-related nucleic acid molecule (or gene) comprising the nucleic acid shown in SEQ ID NO.: 7864, or a homolog of said nucleic acid molecule or polypeptide, e.g. derived from Arabidopsis thaliana. Thus, in one embodiment, the activity “galactinol synthase” or the activity of a nucleic acid molecule or a polypeptide comprising the nucleic acid or polypeptide or the consensus sequence or the polypeptide motif, depicted in table I, II or IV, column 7, respective same line as SEQ ID NO.: 7864, or SEQ ID NO.: 7865, respectively, is increased or generated in a plant cell, plant or part thereof. Preferably, the increase occurs cytoplasmic.

[0269] Accordingly, in one embodiment, an increased yield as compared to a correspondingly non-modified, e.g. a non-transformed, wild type plant is conferred accoriding to method of the invention, by increasing or generating the activity of a polypeptide comprising the yield-related polypeptide shown in SEQ ID NO.: 8065, or encoded by the yield-related nucleic acid molecule (or gene) comprising the nucleic acid shown in SEQ ID NO.: 8064, or a homolog of said nucleic acid molecule or polypeptide, e.g. derived from Arabidopsis thaliana. Thus, in one embodiment, the activity “jasmonate-zim-domain protein” or the activity of a nucleic acid molecule or a polypeptide comprising the nucleic acid or polypeptide or the consensus sequence or the polypeptide motif, depicted in table I, II or IV, column 7, respective same line as SEQ ID NO.: 8064, or SEQ ID NO.: 8065, respectively, is increased or generated in a plant cell, plant or part thereof. Preferably, the increase occurs cytoplasmic.

[0270] Accordingly, in one embodiment, an increased yield as compared to a correspondingly non-modified, e.g. a non-transformed, wild type plant is conferred accoriding to method of the invention, by increasing or generating the activity of a polypeptide comprising the yield-related polypeptide shown in SEQ ID NO.: 8105, or encoded by the yield-related nucleic acid molecule (or gene) comprising the nucleic acid shown in SEQ ID NO.: 8104, or a homolog of said nucleic acid molecule or polypeptide, e.g. derived from Arabidopsis thaliana. Thus, in one embodiment, the activity “505 chloroplast ribosomal protein L21” or the activity of a nucleic acid molecule or a polypeptide comprising the nucleic acid or polypeptide or the consensus sequence or the polypeptide motif, depicted in table I, II or IV, column 7, respective same line as SEQ ID NO.: 8104, or SEQ ID NO.: 8105, respectively, is increased or generated in a plant cell, plant or part thereof. Preferably, the increase occurs cytoplasmic.

[0271] Accordingly, in one embodiment, an increased yield as compared to a correspondingly non-modified, e.g. a non-transformed, wild type plant is conferred accoriding to method of the invention, by increasing or generating the activity of a polypeptide comprising the yield-related polypeptide shown in SEQ ID NO.: 8153, or encoded by the yield-related nucleic acid molecule (or gene) comprising the nucleic acid shown in SEQ ID NO.: 8152, or a homolog of said nucleic acid molecule or polypeptide, e.g. derived from Arabidopsis thaliana. Thus, in one embodiment, the activity “cold response protein” or the activity of a nucleic acid molecule or a polypeptide comprising the nucleic acid or polypeptide or the consensus sequence or the polypeptide motif, depicted in table I, II or IV, column 7, respective same line as SEQ ID NO.: 8152, or SEQ ID NO.: 8153, respectively, is increased or generated in a plant cell, plant or part thereof. Preferably, the increase occurs cytoplasmic.

[0272] Accordingly, in one embodiment, an increased yield as compared to a correspondingly non-modified, e.g. a non-transformed, wild type plant is conferred accoriding to method of the invention, by increasing or generating the activity of a polypeptide comprising the yield-related polypeptide shown in SEQ ID NO.: 8207, or encoded by the yield-related nucleic acid molecule (or gene) comprising the nucleic acid shown in SEQ ID NO.: 8206, or a homolog of said nucleic acid molecule or polypeptide, e.g. derived from Arabidopsis thaliana. Thus, in one embodiment, the activity “heat shock transcription factor” or the activity of a nucleic acid molecule or a polypeptide comprising the nucleic acid or polypeptide or the consensus sequence or the polypeptide motif, depicted in table I, II or IV, column 7, respective same line as SEQ ID NO.: 8206, or SEQ ID NO.: 8207, respectively, is increased or generated in a plant cell, plant or part thereof. Preferably, the increase occurs cytoplasmic.

[0273] Accordingly, in one embodiment, an increased yield as compared to a correspondingly non-modified, e.g. a non-transformed, wild type plant is conferred accoriding to method of the invention, by increasing or generating the activity of a polypeptide comprising the yield-related polypeptide shown in SEQ ID NO.: 8409, or encoded by the yield-related nucleic acid molecule (or gene) comprising the nucleic acid shown in SEQ ID NO.: 8408, or a homolog of said nucleic acid molecule or polypeptide, e.g. derived from Arabidopsis thaliana. Thus, in one embodiment, the activity “small heat shock protein” or the activity of a nucleic acid molecule or a polypeptide comprising the nucleic acid or polypeptide or the consensus sequence or the polypeptide motif, depicted in table I, II or IV, column 7, respective same line as SEQ ID NO.: 8408, or SEQ ID NO.: 8409, respectively, is increased or generated in a plant cell, plant or part thereof. Preferably, the increase occurs cytoplasmic.

[0274] Accordingly, in one embodiment, an increased yield as compared to a correspondingly non-modified, e.g. a non-transformed, wild type plant is conferred accoriding to method of the invention, by increasing or generating the activity of a polypeptide comprising the yield-related polypeptide shown in SEQ ID NO.: 8843, or encoded by the yield-related nucleic acid molecule (or gene) comprising the nucleic acid shown in SEQ ID NO.: 8842, or a homolog of said nucleic acid molecule or polypeptide, e.g. derived from Populus trichocarpa. Thus, in one embodiment, the activity “rubisco subunit binding-protein beta subunit” or the activity of a nucleic acid molecule or a polypeptide comprising the nucleic acid or polypeptide or the consensus sequence or the polypeptide motif, depicted in table I, II or IV, column 7, respective same line as SEQ ID NO.: 8842, or SEQ ID NO.: 8843, respectively, is increased or generated in a plant cell, plant or part thereof. Preferably, the increase occurs cytoplasmic.

[0275] Accordingly, in one embodiment, an increased yield as compared to a correspondingly non-modified, e.g. a non-transformed, wild type plant is conferred accoriding to method of the invention, by increasing or generating the activity of a polypeptide comprising the yield-related polypeptide shown in SEQ ID NO.: 9855, or encoded by the yield-related nucleic acid molecule (or gene) comprising the nucleic acid shown in SEQ ID NO.: 9854, or a homolog of said nucleic acid molecule or polypeptide, e.g. derived from Oryza sativa. Thus, in one embodiment, the activity “sugar transporter” or the activity of a nucleic acid molecule or a polypeptide comprising the nucleic acid or polypeptide or the consensus sequence or the polypeptide motif, depicted in table I, II or IV, column 7, respective same line as SEQ ID NO.: 9854, or SEQ ID NO.: 9855, respectively, is increased or generated in a plant cell, plant or part thereof. Preferably, the increase occurs cytoplasmic.

[0276] Accordingly, in one embodiment, an increased yield as compared to a correspondingly non-modified, e.g. a non-transformed, wild type plant is conferred accoriding to method of the invention, by increasing or generating the activity of a polypeptide comprising the yield-related polypeptide shown in SEQ ID NO.: 9982, or encoded by the yield-related nucleic acid molecule (or gene) comprising the nucleic acid shown in SEQ ID NO.: 9981, or a homolog of said nucleic acid molecule or polypeptide, e.g. derived from Saccharomyces cerevisiae. Thus, in one embodiment, the activity “mitochondrial asparaginyl-tRNA synthetase” or the activity of a nucleic acid molecule or a polypeptide comprising the nucleic acid or polypeptide or the consensus sequence or the polypeptide motif, depicted in table I, II or IV, column 7, respective same line as SEQ ID NO.: 9981, or SEQ ID NO.: 9982, respectively, is increased or generated in a plant cell, plant or part thereof. Preferably, the increase occurs cytoplasmic.

[0277] Accordingly, in one embodiment, an increased yield as compared to a correspondingly non-modified, e.g. a non-transformed, wild type plant is conferred accoriding to method of the invention, by increasing or generating the activity of a polypeptide comprising the yield-related polypeptide shown in SEQ ID NO.: 10799, or encoded by the yield-related nucleic acid molecule (or gene) comprising the nucleic acid shown in SEQ ID NO.: 10798, or a homolog of said nucleic acid molecule or polypeptide, e.g. derived from Arabidopsis thaliana. Thus, in one embodiment, the activity “protein kinase” or the activity of a nucleic acid molecule or a polypeptide comprising the nucleic acid or polypeptide or the consensus sequence or the polypeptide motif, depicted in table I, II or IV, column 7, respective same line as SEQ ID NO.: 10798, or SEQ ID NO.: 10799, respectively, is increased or generated in a plant cell, plant or part thereof. Preferably, the increase occurs cytoplasmic.

[0278] Accordingly, in one embodiment, an increased yield as compared to a correspondingly non-modified, e.g. a non-transformed, wild type plant is conferred accoriding to method of the invention, by increasing or generating the activity of a polypeptide comprising the yield-related polypeptide shown in SEQ ID NO.: 10839, or encoded by the yield-related nucleic acid molecule (or gene) comprising the nucleic acid shown in SEQ ID NO.: 10838, or a homolog of said nucleic acid molecule or polypeptide, e.g. derived from Arabidopsis thaliana. Thus, in one embodiment, the activity “haspin-related protein” or the activity of a nucleic acid molecule or a polypeptide comprising the nucleic acid or polypeptide or the consensus sequence or the polypeptide motif, depicted in table I, II or IV, column 7, respective same line as SEQ ID NO.: 10838, or SEQ ID NO.: 10839, respectively, is increased or generated in a plant cell, plant or part thereof. Preferably, the increase occurs cytoplasmic.

[0279] Accordingly, in one embodiment, an increased yield as compared to a correspondingly non-modified, e.g. a non-transformed, wild type plant is conferred accoriding to method of the invention, by increasing or generating the activity of a polypeptide comprising the yield-related polypeptide shown in SEQ ID NO.: 10881, or encoded by the yield-related nucleic acid molecule (or gene) comprising the nucleic acid shown in SEQ ID NO.: 10880, or a homolog of said nucleic acid molecule or polypeptide, e.g. derived from Arabidopsis thaliana. Thus, in one embodiment, the activity “universal stress protein family protein” or the activity of a nucleic acid molecule or a polypeptide comprising the nucleic acid or polypeptide or the consensus sequence or the polypeptide motif, depicted in table I, II or IV, column 7, respective same line as SEQ ID NO.: 10880, or SEQ ID NO.: 10881, respectively, is increased or generated in a plant cell, plant or part thereof. Preferably, the increase occurs cytoplasmic.

[0280] Accordingly, in one embodiment, an increased yield as compared to a correspondingly non-modified, e.g. a non-transformed, wild type plant is conferred accoriding to method of the invention, by increasing or generating the activity of a polypeptide comprising the yield-related polypeptide shown in SEQ ID NO.: 10966, or encoded by the yield-related nucleic acid molecule (or gene) comprising the nucleic acid shown in SEQ ID NO.: 10965, or a homolog of said nucleic acid molecule or polypeptide, e.g. derived from Arabidopsis thaliana. Thus, in one embodiment, the activity “heat shock protein” or the activity of a nucleic acid molecule or a polypeptide comprising the nucleic acid or polypeptide or the consensus sequence or the polypeptide motif, depicted in table I, II or IV, column 7, respective same line as SEQ ID NO.: 10965, or SEQ ID NO.: 10966, respectively, is increased or generated in a plant cell, plant or part thereof. Preferably, the increase occurs cytoplasmic.

[0281] Accordingly, in one embodiment, an increased yield as compared to a correspondingly non-modified, e.g. a non-transformed, wild type plant is conferred accoriding to method of the invention, by increasing or generating the activity of a polypeptide comprising the yield-related polypeptide shown in SEQ ID NO.: 11419, or encoded by the yield-related nucleic acid molecule (or gene) comprising the nucleic acid shown in SEQ ID NO.: 11418, or a homolog of said nucleic acid molecule or polypeptide, e.g. derived from Arabidopsis thaliana. Thus, in one embodiment, the activity “argonaute protein” or the activity of a nucleic acid molecule or a polypeptide comprising the nucleic acid or polypeptide or the consensus sequence or the polypeptide motif, depicted in table I, II or IV, column 7, respective same line as SEQ ID NO.: 11418, or SEQ ID NO.: 11419, respectively, is increased or generated in a plant cell, plant or part thereof. Preferably, the increase occurs cytoplasmic.

[0282] Accordingly, in one embodiment, an increased yield as compared to a correspondingly non-modified, e.g. a non-transformed, wild type plant is conferred accoriding to method of the invention, by increasing or generating the activity of a polypeptide comprising the yield-related polypeptide shown in SEQ ID NO.: 11753, or encoded by the yield-related nucleic acid molecule (or gene) comprising the nucleic acid shown in SEQ ID NO.: 11752, or a homolog of said nucleic acid molecule or polypeptide, e.g. derived from Arabidopsis thaliana. Thus, in one embodiment, the activity “glutathione-S-transferase” or the activity of a nucleic acid molecule or a polypeptide comprising the nucleic acid or polypeptide or the consensus sequence or the polypeptide motif, depicted in table I, II or IV, column 7, respective same line as SEQ ID NO.: 11752, or SEQ ID NO.: 11753, respectively, is increased or generated in a plant cell, plant or part thereof. Preferably, the increase occurs cytoplasmic.

[0283] Accordingly, in one embodiment, an increased yield as compared to a correspondingly non-modified, e.g. a non-transformed, wild type plant is conferred accoriding to method of the invention, by increasing or generating the activity of a polypeptide comprising the yield-related polypeptide shown in SEQ ID NO.: 12197, or encoded by the yield-related nucleic acid molecule (or gene) comprising the nucleic acid shown in SEQ ID NO.: 12196, or a homolog of said nucleic acid molecule or polypeptide, e.g. derived from Arabidopsis thaliana. Thus, in one embodiment, the activity “AT2G35300-protein” or the activity of a nucleic acid molecule or a polypeptide comprising the nucleic acid or polypeptide or the consensus sequence or the polypeptide motif, depicted in table I, II or IV, column 7, respective same line as SEQ ID NO.: 12196, or SEQ ID NO.: 12197, respectively, is increased or generated in a plant cell, plant or part thereof. Preferably, the increase occurs cytoplasmic.

[0284] Accordingly, in one embodiment, an increased yield as compared to a correspondingly non-modified, e.g. a non-transformed, wild type plant is conferred accoriding to method of the invention, by increasing or generating the activity of a polypeptide comprising the yield-related polypeptide shown in SEQ ID NO.: 12317, or encoded by the yield-related nucleic acid molecule (or gene) comprising the nucleic acid shown in SEQ ID NO.: 12316, or a homolog of said nucleic acid molecule or polypeptide, e.g. derived from Arabidopsis thaliana. Thus, in one embodiment, the activity “ubiquitin-protein ligase” or the activity of a nucleic acid molecule or a polypeptide comprising the nucleic acid or polypeptide or the consensus sequence or the polypeptide motif, depicted in table I, II or IV, column 7, respective same line as SEQ ID NO.: 12316, or SEQ ID NO.: 12317, respectively, is increased or generated in a plant cell, plant or part thereof. Preferably, the increase occurs cytoplasmic.

[0285] Accordingly, in one embodiment, an increased yield as compared to a correspondingly non-modified, e.g. a non-transformed, wild type plant is conferred accoriding to method of the invention, by increasing or generating the activity of a polypeptide comprising the yield-related polypeptide shown in SEQ ID NO.: 12574, or encoded by the yield-related nucleic acid molecule (or gene) comprising the nucleic acid shown in SEQ ID NO.: 12573, or a homolog of said nucleic acid molecule or polypeptide, e.g. derived from Arabidopsis thaliana. Thus, in one embodiment, the activity “AT3G04620-protein” or the activity of a nucleic acid molecule or a polypeptide comprising the nucleic acid or polypeptide or the consensus sequence or the polypeptide motif, depicted in table I, II or IV, column 7, respective same line as SEQ ID NO.: 12573, or SEQ ID NO.: 12574, respectively, is increased or generated in a plant cell, plant or part thereof. Preferably, the increase occurs cytoplasmic.

[0286] Accordingly, in one embodiment, an increased yield as compared to a correspondingly non-modified, e.g. a non-transformed, wild type plant is conferred accoriding to method of the invention, by increasing or generating the activity of a polypeptide comprising the yield-related polypeptide shown in SEQ ID NO.: 12669, or encoded by the yield-related nucleic acid molecule (or gene) comprising the nucleic acid shown in SEQ ID NO.: 12668, or a homolog of said nucleic acid molecule or polypeptide, e.g. derived from Arabidopsis thaliana. Thus, in one embodiment, the activity “Cytochrome P450” or the activity of a nucleic acid molecule or a polypeptide comprising the nucleic acid or polypeptide or the consensus sequence or the polypeptide motif, depicted in table I, II or IV, column 7, respective same line as SEQ ID NO.: 12668, or SEQ ID NO.: 12669, respectively, is increased or generated in a plant cell, plant or part thereof. Preferably, the increase occurs cytoplasmic.

[0287] Accordingly, in one embodiment, an increased yield as compared to a correspondingly non-modified, e.g. a non-transformed, wild type plant is conferred accoriding to method of the invention, by increasing or generating the activity of a polypeptide comprising the yield-related polypeptide shown in SEQ ID NO.: 13132, or encoded by the yield-related nucleic acid molecule (or gene) comprising the nucleic acid shown in SEQ ID NO.: 13131, or a homolog of said nucleic acid molecule or polypeptide, e.g. derived from Arabidopsis thaliana. Thus, in one embodiment, the activity “delta-8 sphingolipid desaturase” or the activity of a nucleic acid molecule or a polypeptide comprising the nucleic acid or polypeptide or the consensus sequence or the polypeptide motif, depicted in table I, II or IV, column 7, respective same line as SEQ ID NO.: 13131, or SEQ ID NO.: 13132, respectively, is increased or generated in a plant cell, plant or part thereof. Preferably, the increase occurs cytoplasmic.

[0288] Accordingly, in one embodiment, an increased yield as compared to a correspondingly non-modified, e.g. a non-transformed, wild type plant is conferred accoriding to method of the invention, by increasing or generating the activity of a polypeptide comprising the yield-related polypeptide shown in SEQ ID NO.: 13277, or encoded by the yield-related nucleic acid molecule (or gene) comprising the nucleic acid shown in SEQ ID NO.: 13276, or a homolog of said nucleic acid molecule or polypeptide, e.g. derived from Arabidopsis thaliana. Thus, in one embodiment, the activity “jasmonate-zim-domain protein” or the activity of a nucleic acid molecule or a polypeptide comprising the nucleic acid or polypeptide or the consensus sequence or the polypeptide motif, depicted in table I, II or IV, column 7, respective same line as SEQ ID NO.: 13276, or SEQ ID NO.: 13277, respectively, is increased or generated in a plant cell, plant or part thereof. Preferably, the increase occurs cytoplasmic.

[0289] Accordingly, in one embodiment, an increased yield as compared to a correspondingly non-modified, e.g. a non-transformed, wild type plant is conferred accoriding to method of the invention, by increasing or generating the activity of a polypeptide comprising the yield-related polypeptide shown in SEQ ID NO.: 13437, or encoded by the yield-related nucleic acid molecule (or gene) comprising the nucleic acid shown in SEQ ID NO.: 13436, or a homolog of said nucleic acid molecule or polypeptide, e.g. derived from Populus trichocarpa. Thus, in one embodiment, the activity “CDS5394-protein” or the activity of a nucleic acid molecule or a polypeptide comprising the nucleic acid or polypeptide or the consensus sequence or the polypeptide motif, depicted in table I, II or IV, column 7, respective same line as SEQ ID NO.: 13436, or SEQ ID NO.: 13437, respectively, is increased or generated in a plant cell, plant or part thereof. Preferably, the increase occurs cytoplasmic.

[0290] Accordingly, in one embodiment, an increased yield as compared to a correspondingly non-modified, e.g. a non-transformed, wild type plant is conferred accoriding to method of the invention, by increasing or generating the activity of a polypeptide comprising the yield-related polypeptide shown in SEQ ID NO.: 13478, or encoded by the yield-related nucleic acid molecule (or gene) comprising the nucleic acid shown in SEQ ID NO.: 13477, or a homolog of said nucleic acid molecule or polypeptide, e.g. derived from Populus trichocarpa. Thus, in one embodiment, the activity “CDS5401_TRUNCATED-protein” or the activity of a nucleic acid molecule or a polypeptide comprising the nucleic acid or polypeptide or the consensus sequence or the polypeptide motif, depicted in table I, II or IV, column 7, respective same line as SEQ ID NO.: 13477, or SEQ ID NO.: 13478, respectively, is increased or generated in a plant cell, plant or part thereof. Preferably, the increase occurs cytoplasmic.

[0291] Accordingly, in one embodiment, an increased yield as compared to a correspondingly non-modified, e.g. a non-transformed, wild type plant is conferred accoriding to method of the invention, by increasing or generating the activity of a polypeptide comprising the yield-related polypeptide shown in SEQ ID NO.: 13552, or encoded by the yield-related nucleic acid molecule (or gene) comprising the nucleic acid shown in SEQ ID NO.: 13551, or a homolog of said nucleic acid molecule or polypeptide, e.g. derived from Zea mays. Thus, in one embodiment, the activity “cullin” or the activity of a nucleic acid molecule or a polypeptide comprising the nucleic acid or polypeptide or the consensus sequence or the polypeptide motif, depicted in table I, II or IV, column 7, respective same line as SEQ ID NO.: 13551, or SEQ ID NO.: 13552, respectively, is increased or generated in a plant cell, plant or part thereof. Preferably, the increase occurs cytoplasmic.

[0292] Accordingly, in one embodiment, an increased yield as compared to a correspondingly non-modified, e.g. a non-transformed, wild type plant is conferred accoriding to method of the invention, by increasing or generating the activity of a polypeptide comprising the yield-related polypeptide shown in SEQ ID NO.: 13246, or encoded by the yield-related nucleic acid molecule (or gene) comprising the nucleic acid shown in SEQ ID NO.: 13245, or a homolog of said nucleic acid molecule or polypeptide, e.g. derived from Arabidopsis thaliana. Thus, in one embodiment, the activity “PRLI-interacting factor” or the activity of a nucleic acid molecule or a polypeptide comprising the nucleic acid or polypeptide or the consensus sequence or the polypeptide motif, depicted in table I, II or IV, column 7, respective same line as SEQ ID NO.: 13245, or SEQ ID NO.: 13246, respectively, is increased or generated in a plant cell, plant or part thereof. Preferably, the increase occurs cytoplasmic.

[0293] Accordingly, in one embodiment, an increased yield as compared to a correspondingly non-modified, e.g. a non-transformed, wild type plant is conferred accoriding to method of the invention, by increasing or generating the activity of a polypeptide comprising the yield-related polypeptide shown in SEQ ID NO.: 10754, or encoded by the yield-related nucleic acid molecule (or gene) comprising the nucleic acid shown in SEQ ID NO.: 10753, or a homolog of said nucleic acid molecule or polypeptide, e.g. derived from Zea mays. Thus, in one embodiment, the activity “60952769.R01.1-protein” or the activity of a nucleic acid molecule or a polypeptide comprising the nucleic acid or polypeptide or the consensus sequence or the polypeptide motif, depicted in table I, II or IV, column 7, respective same line as SEQ ID NO.: 10753, or SEQ ID NO.: 10754, respectively, is increased or generated in a plant cell, plant or part thereof. Preferably, the increase occurs cytoplasmic.

[0294] Accordingly, in one embodiment, an increased yield as compared to a correspondingly non-modified, e.g. a non-transformed, wild type plant is conferred accoriding to method of the invention, by increasing or generating the activity of a polypeptide comprising the yield-related polypeptide shown in SEQ ID NO.: 13310, or encoded by the yield-related nucleic acid molecule (or gene) comprising the nucleic acid shown in SEQ ID NO.: 13309, or a homolog of said nucleic acid molecule or polypeptide, e.g. derived from Arabidopsis thaliana. Thus, in one embodiment, the activity “AT5G42380-protein” or the activity of a nucleic acid molecule or a polypeptide comprising the nucleic acid or polypeptide or the consensus sequence or the polypeptide motif, depicted in table I, II or IV, column 7, respective same line as SEQ ID NO.: 13309, or SEQ ID NO.: 13310, respectively, is increased or generated in a plant cell, plant or part thereof. Preferably, the increase occurs cytoplasmic.

[0295] Accordingly, in one embodiment, an increased yield as compared to a correspondingly non-modified, e.g. a non-transformed, wild type plant is conferred accoriding to method of the invention, by increasing or generating the activity of a polypeptide comprising the yield-related polypeptide shown in SEQ ID NO.: 10750, or encoded by the yield-related nucleic acid molecule (or gene) comprising the nucleic acid shown in SEQ ID NO.: 10749, or a homolog of said nucleic acid molecule or polypeptide, e.g. derived from Zea mays. Thus, in one embodiment, the activity “57972199.R01.1-protein” or the activity of a nucleic acid molecule or a polypeptide comprising the nucleic acid or polypeptide or the consensus sequence or the polypeptide motif, depicted in table I, II or IV, column 7, respective same line as SEQ ID NO.: 10749, or SEQ ID NO.: 10750, respectively, is increased or generated in a plant cell, plant or part thereof. Preferably, the increase occurs cytoplasmic.

[0296] Accordingly, in one embodiment, an increased yield as compared to a correspondingly non-modified, e.g. a non-transformed, wild type plant is conferred accoriding to method of the invention, by increasing or generating the activity of a polypeptide comprising the yield-related polypeptide shown in SEQ ID NO.: 13502, or encoded by the yield-related nucleic acid molecule (or gene) comprising the nucleic acid shown in SEQ ID NO.: 13501, or a homolog of said nucleic acid molecule or polypeptide, e.g. derived from Oryza sativa. Thus, in one embodiment, the activity “OS02G44730-protein” or the activity of a nucleic acid molecule or a polypeptide comprising the nucleic acid or polypeptide or the consensus sequence or the polypeptide motif, depicted in table I, II or IV, column 7, respective same line as SEQ ID NO.: 13501, or SEQ ID NO.: 13502, respectively, is increased or generated in a plant cell, plant or part thereof. Preferably, the increase occurs cytoplasmic.

[0297] Accordingly, in one embodiment, an increased yield as compared to a correspondingly non-modified, e.g. a non-transformed, wild type plant is conferred accoriding to method of the invention, by increasing or generating the activity of a polypeptide comprising the yield-related polypeptide shown in SEQ ID NO.: 13103, or encoded by the yield-related nucleic acid molecule (or gene) comprising the nucleic acid shown in SEQ ID NO.: 13102, or a homolog of said nucleic acid molecule or polypeptide, e.g. derived from Arabidopsis thaliana. Thus, in one embodiment, the activity “ubiquitin-conjugating enzyme” or the activity of a nucleic acid molecule or a polypeptide comprising the nucleic acid or polypeptide or the consensus sequence or the polypeptide motif, depicted in table I, II or IV, column 7, respective same line as SEQ ID NO.: 13102, or SEQ ID NO.: 13103, respectively, is increased or generated in a plant cell, plant or part thereof. Preferably, the increase occurs cytoplasmic.

[0298] Thus, in one embodiment, the present invention provides a method for producing a plant showing increased or improved yield as compared to the corresponding origin or wild type plant, by increasing or generating one or more activities selected from the group consisting of 2-oxoglutarate-dependent dioxygenase, 3-ketoacyl-CoA thiolase, 3′-phosphoadenosine 5′-phosphate phosphatase, 4-diphosphocytidyl-2-C-methyl-D-erythritol kinase, 50S chloroplast ribosomal protein L21, 57972199.R01.1-protein, 60952769.R01.1-protein, 60S ribosomal protein, ABC transporter family protein, AP2 domain-containing transcription factor, argonaute protein, AT1G29250.1-protein, AT1G53885-protein, AT2G35300-protein, AT3G04620-protein, AT4G01870-protein, AT5G42380-protein, AT5G47440-protein, CDS5394-protein, CDS5401_TRUNCATED-protein, cold response protein, cullin, Cytochrome P450, delta-8 sphingolipid desaturase, galactinol synthase, glutathione-5-transferase, GTPase, haspin-related protein, heat shock protein, heat shock transcription factor, histone H2B, jasmonate-zim-domain protein, mitochondrial asparaginyl-tRNA synthetase, Oligosaccharyltransferase, OS02G44730-protein, Oxygen-evolving enhancer protein, peptidyl-prolyl cis-trans isomerase, peptidyl-prolyl cis-trans isomerase family protein, plastid lipid-associated protein, Polypyrimidine tract binding protein, PRLI-interacting factor, protein kinase, protein kinase family protein, rubisco subunit binding-protein beta subunit, serine acetyltransferase, serine hydroxymethyltransferase, small heat shock protein, S-ribosylhomocysteinase, sugar transporter, Thioredoxin H-type, ubiquitin-conjugating enzyme, ubiquitin-protein ligase, universal stress protein family protein, and Vacuolar protein, e.g. which is conferred by one or more polynucleotide(s) selected from the group as shown in table I, column 5 or 7 or by one or more protein(s), each comprising a polypeptide encoded by one or more nucleic acid sequence(s) selected from the group as shown in table I, column 5 or 7, or by one or more protein(s) each comprising a polypeptide selected from the group as depicted in table II, column 5 and 7, or a protein having a sequence corresponding to the consensus sequence shown in table IV, column 7 in the and (b) optionally, growing the plant cell, plant or part thereof under conditions which permit the development of the plant cell, the plant or the part thereof, and (c) regenerating a plant with increased yield, e.g. with an increased yield-related trait, for example enhanced tolerance to abiotic environmental stress, for example an increased drought tolerance and/or low temperature tolerance and/or an increased nutrient use efficiency, intrinsic yield and/or another increased yield-related trait as compared to a corresponding, e.g. non-transformed, wild type plant or a part thereof.

[0299] Accordingly, in one further embodiment, the said method for producing a plant or a part thereof for the regeneration of said plant, the plant showing an increased yield, said method comprises (i) growing the plant or part thereof together with a, e.g. non-transformed, wild type plant under conditions of abiotic environmental stress or deficiency; and (ii) selecting a plant with increased yield as compared to a corresponding, e.g. non-transformed, wild type plant, for example after the, e.g. non-transformed, wild type plant shows visual symptoms of deficiency and/or death.

[0300] Further, the present invention relates to a method for producing a plant with increased yield as compared to a corresponding origin or wild type plant, e.g. a transgenic plant, which comprises: (a) increasing or generating, in a plant cell nucleus, a plant cell, a plant or a part thereof, one or more activities of a polypeptide selected from the group consisting of 2-oxoglutarate-dependent dioxygenase, 3-ketoacyl-CoA thiolase, 3′-phosphoadenosine 5′-phosphate phosphatase, 4-diphosphocytidyl-2-C-methyl-D-erythritol kinase, 50S chloroplast ribosomal protein L21, 57972199.R01.1-protein, 60952769.R01.1-protein, 60S ribosomal protein, ABC transporter family protein, AP2 domain-containing transcription factor, argonaute protein, AT1G29250.1-protein, AT1G53885-protein, AT2G35300-protein, AT3G04620-protein, AT4G01870-protein, AT5G42380-protein, AT5G47440-protein, CDS5394-protein, CDS5401_TRUNCATED-protein, cold response protein, cullin, Cytochrome P450, delta-8 sphingolipid desaturase, galactinol synthase, glutathione-5-transferase, GTPase, haspin-related protein, heat shock protein, heat shock transcription factor, histone H2B, jasmonate-zim-domain protein, mitochondrial asparaginyl-tRNA synthetase, Oligosaccharyltransferase, OS02G44730-protein, Oxygen-evolving enhancer protein, peptidyl-prolyl cis-trans isomerase, peptidyl-prolyl cis-trans isomerase family protein, plastid lipid-associated protein, Polypyrimidine tract binding protein, PRLI-interacting factor, protein kinase, protein kinase family protein, rubisco subunit binding-protein beta subunit, serine acetyltransferase, serine hydroxymethyltransferase, small heat shock protein, S-ribosylhomocysteinase, sugar transporter, Thioredoxin H-type, ubiquitin-conjugating enzyme, ubiquitin-protein ligase, universal stress protein family protein, and Vacuolar protein, e.g. by the methods mentioned herein; and (b) cultivating or growing the plant cell, the plant or the part thereof under conditions which permit the development of the plant cell, the plant or the part thereof; and (c) recovering a plant from said plant cell nucleus, said plant cell, or said plant part, which shows increased yield as compared to a corresponding, e.g. non-transformed, origin or wild type plant; and (d) optionally, selecting the plant or a part thereof, showing increased yield, for example showing an increased or improved yield-related trait, e.g. an improved nutrient use efficiency and/or abiotic stress resistance, as compared to a corresponding, e.g. non-transformed, wild type plant cell, e.g. which shows visual symptoms of deficiency and/or death.

[0301] Furthermore, the present invention also relates to a method for the identification of a plant with an increased yield comprising screening a population of one or more plant cell nuclei, plant cells, plant tissues or plants or parts thereof for said “activity”, comparing the level of activity with the activity level in a reference; identifying one or more plant cell nuclei, plant cells, plant tissues or plants or parts thereof with the activity increased compared to the reference, optionally producing a plant from the identified plant cell nuclei, cell or tissue.

[0302] In one further embodiment, the present invention also relates to a method for the identification of a plant with an increased yield comprising screening a population of one or more plant cell nuclei, plant cells, plant tissues or plants or parts thereof for the expression level of an nucleic acid coding for an polypeptide conferring said activity, comparing the level of expression with a reference; identifying one or more plant cell nuclei, plant cells, plant tissues or plants or parts thereof with the expression level increased compared to the reference, optionally producing a plant from the identified plant cell nuclei, cell or tissue.

[0303] Accordingly, in a preferred embodiment, the present invention provides a method for producing a transgenic cell for the regeneration or production of a plant with increased yield, e.g. tolerance to abiotic environmental stress and/or another increased yieldrelated trait, as compared to a corresponding, e.g. non-transformed, wild type cell by increasing or generating one or more polypeptide activities selected from the group consisting of 2-oxoglutarate-dependent dioxygenase, 3-ketoacyl-CoA thiolase, 3′-phosphoadenosine 5′-phosphate phosphatase, 4-diphosphocytidyl-2-C-methyl-D-erythritol kinase, 50S chloroplast ribosomal protein L21, 57972199.R01.1-protein, 60952769.R01.1-protein, 60S ribosomal protein, ABC transporter family protein, AP2 domain-containing transcription factor, argonaute protein, AT1G29250.1-protein, AT1G53885-protein, AT2G35300-protein, AT3G04620-protein, AT4G01870-protein, AT5G42380-protein, AT5G47440-protein, CDS5394-protein, CDS5401_TRUNCATED-protein, cold response protein, cullin, Cytochrome P450, delta-8 sphingolipid desaturase, galactinol synthase, glutathione-S-transferase, GTPase, haspin-related protein, heat shock protein, heat shock transcription factor, histone H2B, jasmonate-zim-domain protein, mitochondrial asparaginyl-tRNA synthetase, Oligosaccharyltransferase, OS02G44730-protein, Oxygen-evolving enhancer protein, peptidyl-prolyl cis-trans isomerase, peptidyl-prolyl cis-trans isomerase family protein, plastid lipid-associated protein, Polypyrimidine tract binding protein, PRLI-interacting factor, protein kinase, protein kinase family protein, rubisco subunit binding-protein beta subunit, serine acetyltransferase, serine hydroxymethyltransferase, small heat shock protein, S-ribosylhomocysteinase, sugar transporter, Thioredoxin H-type, ubiquitin-conjugating enzyme, ubiquitin-protein ligase, universal stress protein family protein, and Vacuolar protein. The cell can be for example a host cell, e.g. a transgenic host cell. A host cell can be for example a microorganism, e.g. derived from fungi or bacteria, or a plant cell particular useful for transformation. Furthermore, in one embodiment, the present invention provides a transgenic plant showing one or more increased yield-related trait as compared to the corresponding, e.g. non-transformed, origin or wild type plant cell or plant, having an increased or newly generated one or more “activities” selected from the above mentioned group of “activities” in the sub-cellular compartment and tissue indicated herein of said plant.

[0304] Accordingly, in an embodiment, the present invention provides a method for producing a cell for the regeneration or production of a plant with an increased yield-trait, e.g. tolerance to abiotic environmental stress and/or another increased yield-related trait, as compared to a corresponding, e.g. non-transformed, wild type plant cell by increasing or generating one or more polypeptides or activities selected from the group consisting of 2-oxoglutarate-dependent dioxygenase, 3-ketoacyl-CoA thiolase, 3′-phosphoadenosine 5′-phosphate phosphatase, 4-diphosphocytidyl-2-C-methyl-D-erythritol kinase, 50S chloroplast ribosomal protein L21, 57972199.R01.1-protein, 60952769.R01.1-protein, 60S ribosomal protein, ABC transporter family protein, AP2 domain-containing transcription factor, argonaute protein, AT1G29250.1-protein, AT1G53885-protein, AT2G35300-protein, AT3G04620-protein, AT4G01870-protein, AT5G42380-protein, AT5G47440-protein, CDS5394-protein, CDS5401_TRUNCATED-protein, cold response protein, cullin, Cytochrome P450, delta-8 sphingolipid desaturase, galactinol synthase, glutathione-S-transferase, GTPase, haspin-related protein, heat shock protein, heat shock transcription factor, histone H2B, jasmonate-zim-domain protein, mitochondrial asparaginyl-tRNA synthetase, Oligosaccharyltransferase, OS02G44730-protein, Oxygen-evolving enhancer protein, peptidyl-prolyl cis-trans isomerase, peptidyl-prolyl cis-trans isomerase family protein, plastid lipid-associated protein, Polypyrimidine tract binding protein, PRLI-interacting factor, protein kinase, protein kinase family protein, rubisco subunit binding-protein beta subunit, serine acetyltransferase, serine hydroxymethyltransferase, small heat shock protein, S-ribosylhomocysteinase, sugar transporter, Thioredoxin H-type, ubiquitin-conjugating enzyme, ubiquitin-protein ligase, universal stress protein family protein, and Vacuolar protein.

[0305] Said cell for the regeneration or production of a plant can be for example a host cell, e.g. a transgenic host cell. A host cell can be for example a microorganism, e.g. derived from fungi or bacteria, or a plant cell particular useful for transformation.

[0306] Thus, the present invention fulfills the need to identify new, unique genes capable of conferring increased yield, e.g. with an increased yield-related trait, for example enhanced tolerance to abiotic environmental stress, for example an increased drought tolerance and/or low temperature tolerance and/or an increased nutrient use efficiency, intrinsic yield and/or another increased yield-related trait, to plants, upon expression or overexpression of exogenous genes. Accordingly, the present invention provides novel homologs of the genes described in Table I, e.g. in table IB.

[0307] In one embodiment the increase in activity of the polypeptide amounts in an organelle such as a plastid. In another embodiment the increase in activity of the polypeptide amounts in the cytoplasm.

[0308] The specific activity of a polypeptide encoded by a nucleic acid molecule of the present invention or of the polypeptide of the present invention can be tested as described in the examples. In particular, the expression of a protein in question in a cell, e.g. a plant cell in comparison to a control is an easy test and can be performed as described in the state of the art.

[0309] The sequence of AT1G06620_modified from Arabidopsis thaliana, e.g. as shown in column 5 of table I, is described as 2-oxoglutarate-dependent dioxygenase. Accordingly, in one embodiment, the process of the present invention for producing a plant with increased yield comprises increasing or generating the activity of a gene product conferring the activity “2-oxoglutarate-dependent dioxygenase” from Arabidopsis thaliana or its functional equivalent or its homolog, e.g. the increase of

(a) a gene product of a gene comprising the nucleic acid molecule as shown in column 5 of table I, and being depicted in the same respective line as said AT1G06620_modified or a functional equivalent or a homologue thereof as shown depicted in column 7 of table I, preferably a homologue or functional equivalent as shown depicted in column 7 of table I B, and being depicted in the same respective line as said AT1G06620_modified, e.g. cytoplasmic; or
(b) a polypeptide comprising a polypeptide, a consensus sequence or a polypeptide motif as shown depicted in column 5 of table II or column 7 of table IV, and being depicted in the same respective line as said AT1G06620_modified or a functional equivalent or a homologue thereof as depicted in column 7 of table II, preferably a homologue or functional equivalent as depicted in column 7 of table II B, and being depicted in the same respective line as said AT1G06620_modified, e.g. cytoplasmic.

[0310] The sequence of AT1G06680.1 from Arabidopsis thaliana, e.g. as shown in column 5 of table I, is described as Oxygen-evolving enhancer protein.

Accordingly, in one embodiment, the process of the present invention for producing a plant with increased yield comprises increasing or generating the activity of a gene product conferring the activity “Oxygen-evolving enhancer protein” from Arabidopsis thaliana or its functional equivalent or its homolog, e.g. the increase of
(a) a gene product of a gene comprising the nucleic acid molecule as shown in column 5 of table I, and being depicted in the same respective line as said AT1G06680.1 or a functional equivalent or a homologue thereof as shown depicted in column 7 of table I, preferably a homologue or functional equivalent as shown depicted in column 7 of table I B, and being depicted in the same respective line as said AT1G06680.1, e.g. cytoplasmic; or
(b) a polypeptide comprising a polypeptide, a consensus sequence or a polypeptide motif as shown depicted in column 5 of table II or column 7 of table IV, and being depicted in the same respective line as said AT1G06680.1 or a functional equivalent or a homologue thereof as depicted in column 7 of table II, preferably a homologue or functional equivalent as depicted in column 7 of table II B, and being depicted in the same respective line as said AT1G06680.1, e.g. cytoplasmic.

[0311] The sequence of AT1G14130.1 from Arabidopsis thaliana, e.g. as shown in column 5 of table I, is described as 2-oxoglutarate-dependent dioxygenase. Accordingly, in one embodiment, the process of the present invention for producing a plant with increased yield comprises increasing or generating the activity of a gene product conferring the activity “2-oxoglutarate-dependent dioxygenase” from Arabidopsis thaliana or its functional equivalent or its homolog, e.g. the increase of

(a) a gene product of a gene comprising the nucleic acid molecule as shown in column 5 of table I, and being depicted in the same respective line as said AT1G14130.1 or a functional equivalent or a homologue thereof as shown depicted in column 7 of table I, preferably a homologue or functional equivalent as shown depicted in column 7 of table I B, and being depicted in the same respective line as said AT1G14130.1, e.g. cytoplasmic; or
(b) a polypeptide comprising a polypeptide, a consensus sequence or a polypeptide motif as shown depicted in column 5 of table II or column 7 of table IV, and being depicted in the same respective line as said AT1G14130.1 or a functional equivalent or a homologue thereof as depicted in column 7 of table II, preferably a homologue or functional equivalent as depicted in column 7 of table II B, and being depicted in the same respective line as said AT1G14130.1, e.g. cytoplasmic.

[0312] The sequence of AT1G20810.1_modified from Arabidopsis thaliana, e.g. as shown in column 5 of table I, is described as peptidyl-prolyl cis-trans isomerase family protein

Accordingly, in one embodiment, the process of the present invention for producing a plant with increased yield comprises increasing or generating the activity of a gene product conferring the activity “peptidyl-prolyl cis-trans isomerase family protein” from Arabidopsis thaliana or its functional equivalent or its homolog, e.g. the increase of
(a) a gene product of a gene comprising the nucleic acid molecule as shown in column 5 of table I, and being depicted in the same respective line as said AT1G20810.1_modified or a functional equivalent or a homologue thereof as shown depicted in column 7 of table I, preferably a homologue or functional equivalent as shown depicted in column 7 of table I B, and being depicted in the same respective line as said AT1G20810.1_modified, e.g. cytoplasmic; or
(b) a polypeptide comprising a polypeptide, a consensus sequence or a polypeptide motif as shown depicted in column 5 of table II or column 7 of table IV, and being depicted in the same respective line as said AT1G20810.1_modified or a functional equivalent or a homologue thereof as depicted in column 7 of table II, preferably a homologue or functional equivalent as depicted in column 7 of table II B, and being depicted in the same respective line as said AT1G20810.1_modified, e.g. cytoplasmic.

[0313] The sequence of AT1G53885 from Arabidopsis thaliana, e.g. as shown in column 5 of table I, is published: sequences from S. cerevisiae have been published. Its activity is described as AT1G53885-protein.

Accordingly, in one embodiment, the process of the present invention for producing a plant with increased yield comprises increasing or generating the activity of a gene product conferring the activity “AT1G53885-protein” from Arabidopsis thaliana or its functional equivalent or its homolog, e.g. the increase of
(a) a gene product of a gene comprising the nucleic acid molecule as shown in column 5 of table I, and being depicted in the same respective line as said AT1G53885 or a functional equivalent or a homologue thereof as shown depicted in column 7 of table I, preferably a homologue or functional equivalent as shown depicted in column 7 of table I B, and being depicted in the same respective line as said AT1G53885, e.g. cytoplasmic; or
(b) a polypeptide comprising a polypeptide, a consensus sequence or a polypeptide motif as shown depicted in column 5 of table II or column 7 of table IV, and being depicted in the same respective line as said AT1G53885 or a functional equivalent or a homologue thereof as depicted in column 7 of table II, preferably a homologue or functional equivalent as depicted in column 7 of table II B, and being depicted in the same respective line as said AT1G53885, e.g. cytoplasmic.

[0314] The sequence of AT2G38730.1 from Arabidopsis thaliana, e.g. as shown in column 5 of table I, is published: sequences from S. cerevisiae have been published. Its activity is described as peptidyl-prolyl cis-trans isomerase.

Accordingly, in one embodiment, the process of the present invention for producing a plant with increased yield comprises increasing or generating the activity of a gene product conferring the activity “peptidyl-prolyl cis-trans isomerase” from Arabidopsis thaliana or its functional equivalent or its homolog, e.g. the increase of
(a) a gene product of a gene comprising the nucleic acid molecule as shown in column 5 of table I, and being depicted in the same respective line as said AT2G38730.1 or a functional equivalent or a homologue thereof as shown depicted in column 7 of table I, preferably a homologue or functional equivalent as shown depicted in column 7 of table I B, and being depicted in the same respective line as said AT2G38730.1, e.g. cytoplasmic; or
(b) a polypeptide comprising a polypeptide, a consensus sequence or a polypeptide motif as shown depicted in column 5 of table II or column 7 of table IV, and being depicted in the same respective line as said AT2G38730.1 or a functional equivalent or a homologue thereof as depicted in column 7 of table II, preferably a homologue or functional equivalent as depicted in column 7 of table II B, and being depicted in the same respective line as said AT2G38730.1, e.g. cytoplasmic.

[0315] The sequence of AT3G01150.1_truncated from Arabidopsis thaliana, e.g. as shown in column 5 of table I, is published: sequences from S. cerevisiae have been published. Its activity is described as Polypyrimidine tract binding protein.

Accordingly, in one embodiment, the process of the present invention for producing a plant with increased yield comprises increasing or generating the activity of a gene product conferring the activity “Polypyrimidine tract binding protein” from Arabidopsis thaliana or its functional equivalent or its homolog, e.g. the increase of
(a) a gene product of a gene comprising the nucleic acid molecule as shown in column 5 of table I, and being depicted in the same respective line as said AT3G01150.1_truncated or a functional equivalent or a homologue thereof as shown depicted in column 7 of table I, preferably a homologue or functional equivalent as shown depicted in column 7 of table I B, and being depicted in the same respective line as said AT3G01150.1_truncated, e.g. cytoplasmic; or
(b) a polypeptide comprising a polypeptide, a consensus sequence or a polypeptide motif as shown depicted in column 5 of table II or column 7 of table IV, and being depicted in the same respective line as said AT3G01150.1_truncated or a functional equivalent or a homologue thereof as depicted in column 7 of table II, preferably a homologue or functional equivalent as depicted in column 7 of table II B, and being depicted in the same respective line as said AT3G01150.1_truncated, e.g. cytoplasmic.

[0316] The sequence of AT5G47440_modified from Arabidopsis thaliana, e.g. as shown in column 5 of table I, is published. Its activity is described as AT5G47440-protein. Accordingly, in one embodiment, the process of the present invention for producing a plant with increased yield comprises increasing or generating the activity of a gene product conferring the activity “AT5G47440-protein” from Arabidopsis thaliana or its functional equivalent or its homolog, e.g. the increase of

(a) a gene product of a gene comprising the nucleic acid molecule as shown in column 5 of table I, and being depicted in the same respective line as said AT5G47440_modified or a functional equivalent or a homologue thereof as shown depicted in column 7 of table I, preferably a homologue or functional equivalent as shown depicted in column 7 of table I B, and being depicted in the same respective line as said AT5G47440_modified, e.g. cytoplasmic; or
(b) a polypeptide comprising a polypeptide, a consensus sequence or a polypeptide motif as shown depicted in column 5 of table II or column 7 of table IV, and being depicted in the same respective line as said AT5G47440_modified or a functional equivalent or a homologue thereof as depicted in column 7 of table II, preferably a homologue or functional equivalent as depicted in column 7 of table II B, and being depicted in the same respective line as said AT5G47440_modified, e.g. cytoplasmic.

[0317] The sequence of B1208 from Escherichia coli, e.g. as shown in column 5 of table I, is published: Blattner et al., Science 277 (5331), 1453 (1997). Its activity is described as 4-diphosphocytidyl-2-C-methyl-D-erythritol kinase.

Accordingly, in one embodiment, the process of the present invention for producing a plant with increased yield comprises increasing or generating the activity of a gene product conferring the activity “4-diphosphocytidyl-2-C-methyl-D-erythritol kinase” from Escherichia coli or its functional equivalent or its homolog, e.g. the increase of
(a) a gene product of a gene comprising the nucleic acid molecule as shown in column 5 of table I, and being depicted in the same respective line as said B1208 or a functional equivalent or a homologue thereof as shown depicted in column 7 of table I, preferably a homologue or functional equivalent as shown depicted in column 7 of table I B, and being depicted in the same respective line as said B1208, e.g. plastidic; or
(b) a polypeptide comprising a polypeptide, a consensus sequence or a polypeptide motif as shown depicted in column 5 of table II or column 7 of table IV, and being depicted in the same respective line as said B1208 or a functional equivalent or a homologue thereof as depicted in column 7 of table II, preferably a homologue or functional equivalent as depicted in column 7 of table II B, and being depicted in the same respective line as said B1208, e.g. plastidic.

[0318] The sequence of B4214 from Escherichia coli, e.g. as shown in column 5 of table I, is published: Blattner et al., Science 277 (5331), 1453 (1997). Its activity is described as 3′-phosphoadenosine 5′-phosphate phosphatase.

Accordingly, in one embodiment, the process of the present invention for producing a plant with increased yield comprises increasing or generating the activity of a gene product conferring the activity “3′-phosphoadenosine 5′-phosphate phosphatase” from Escherichia coli or its functional equivalent or its homolog, e.g. the increase of
(a) a gene product of a gene comprising the nucleic acid molecule as shown in column 5 of table I, and being depicted in the same respective line as said B4214 or a functional equivalent or a homologue thereof as shown depicted in column 7 of table I, preferably a homologue or functional equivalent as shown depicted in column 7 of table I B, and being depicted in the same respective line as said B4214, e.g. plastidic; or
(b) a polypeptide comprising a polypeptide, a consensus sequence or a polypeptide motif as shown depicted in column 5 of table II or column 7 of table IV, and being depicted in the same respective line as said B4214 or a functional equivalent or a homologue thereof as depicted in column 7 of table II, preferably a homologue or functional equivalent as depicted in column 7 of table II B, and being depicted in the same respective line as said B4214, e.g. plastidic.

[0319] The sequence of CDS5293_modified from Populus trichocarpa, e.g. as shown in column 5 of table I, is described as 3-ketoacyl-CoA thiolase.

Accordingly, in one embodiment, the process of the present invention for producing a plant with increased yield comprises increasing or generating the activity of a gene product conferring the activity “3-ketoacyl-CoA thiolase” from Populus trichocarpa or its functional equivalent or its homolog, e.g. the increase of
(a) a gene product of a gene comprising the nucleic acid molecule as shown in column 5 of table I, and being depicted in the same respective line as said CDS5293_modified or a functional equivalent or a homologue thereof as shown depicted in column 7 of table I, preferably a homologue or functional equivalent as shown depicted in column 7 of table I B, and being depicted in the same respective line as said CDS5293_modified, e.g. cytoplasmic; or
(b) a polypeptide comprising a polypeptide, a consensus sequence or a polypeptide motif as shown depicted in column 5 of table II or column 7 of table IV, and being depicted in the same respective line as said CDS5293_modified or a functional equivalent or a homologue thereof as depicted in column 7 of table II, preferably a homologue or functional equivalent as depicted in column 7 of table II B, and being depicted in the same respective line as said CDS5293_modified, e.g. cytoplasmic.

[0320] The sequence of CDS5305 from Populus trichocarpa, e.g. as shown in column 5 of table I, is described as 60S ribosomal protein.

Accordingly, in one embodiment, the process of the present invention for producing a plant with increased yield comprises increasing or generating the activity of a gene product conferring the activity “60S ribosomal protein” from Populus trichocarpa or its functional equivalent or its homolog, e.g. the increase of
(a) a gene product of a gene comprising the nucleic acid molecule as shown in column 5 of table I, and being depicted in the same respective line as said CDS5305 or a functional equivalent or a homologue thereof as shown depicted in column 7 of table I, preferably a homologue or functional equivalent as shown depicted in column 7 of table I B, and being depicted in the same respective line as said CDS5305, e.g. cytoplasmic; or
(b) a polypeptide comprising a polypeptide, a consensus sequence or a polypeptide motif as shown depicted in column 5 of table II or column 7 of table IV, and being depicted in the same respective line as said CDS5305 or a functional equivalent or a homologue thereof as depicted in column 7 of table II, preferably a homologue or functional equivalent as depicted in column 7 of table II B, and being depicted in the same respective line as said CDS5305, e.g. cytoplasmic.

[0321] The sequence of CDS5397 from Populus trichocarpa, e.g. as shown in column 5 of table I, is described as serine hydroxymethyltransferase.

Accordingly, in one embodiment, the process of the present invention for producing a plant with increased yield comprises increasing or generating the activity of a gene product conferring the activity “serine hydroxymethyltransferase” from Populus trichocarpa or its functional equivalent or its homolog, e.g. the increase of
(a) a gene product of a gene comprising the nucleic acid molecule as shown in column 5 of table I, and being depicted in the same respective line as said CDS5397 or a functional equivalent or a homologue thereof as shown depicted in column 7 of table I, preferably a homologue or functional equivalent as shown depicted in column 7 of table I B, and being depicted in the same respective line as said CDS5397, e.g. cytoplasmic; or
(b) a polypeptide comprising a polypeptide, a consensus sequence or a polypeptide motif as shown depicted in column 5 of table II or column 7 of table IV, and being depicted in the same respective line as said CDS5397 or a functional equivalent or a homologue thereof as depicted in column 7 of table II, preferably a homologue or functional equivalent as depicted in column 7 of table II B, and being depicted in the same respective line as said CDS5397, e.g. cytoplasmic.

[0322] The sequence of TTC1186 from Thermus thermophilus, e.g. as shown in column 5 of table I, is described as S-ribosylhomocysteinase.

Accordingly, in one embodiment, the process of the present invention for producing a plant with increased yield comprises increasing or generating the activity of a gene product conferring the activity “S-ribosylhomocysteinase” from Thermus thermophilus or its functional equivalent or its homolog, e.g. the increase of
(a) a gene product of a gene comprising the nucleic acid molecule as shown in column 5 of table I, and being depicted in the same respective line as said TTC1186 or a functional equivalent or a homologue thereof as shown depicted in column 7 of table I, preferably a homologue or functional equivalent as shown depicted in column 7 of table I B, and being depicted in the same respective line as said TTC1186, e.g. cytoplasmic; or
(b) a polypeptide comprising a polypeptide, a consensus sequence or a polypeptide motif as shown depicted in column 5 of table II or column 7 of table IV, and being depicted in the same respective line as said TTC1186 or a functional equivalent or a homologue thereof as depicted in column 7 of table II, preferably a homologue or functional equivalent as depicted in column 7 of table II B, and being depicted in the same respective line as said TTC1186, e.g. cytoplasmic.

[0323] The sequence of YKL124W from Saccharomyces cerevisiae, e.g. as shown in column 5 of table I, is published: sequences from S. cerevisiae have been published in Goffeau et al., Science 274 (5287), 546 (1996). Its activity is described as Vacuolar protein. Accordingly, in one embodiment, the process of the present invention for producing a plant with increased yield comprises increasing or generating the activity of a gene product conferring the activity “Vacuolar protein” from Saccharomyces cerevisiae or its functional equivalent or its homolog, e.g. the increase of

(a) a gene product of a gene comprising the nucleic acid molecule as shown in column 5 of table I, and being depicted in the same respective line as said YKL124W or a functional equivalent or a homologue thereof as shown depicted in column 7 of table I, preferably a homologue or functional equivalent as shown depicted in column 7 of table I B, and being depicted in the same respective line as said YKL124W, e.g. cytoplasmic; or
(b) a polypeptide comprising a polypeptide, a consensus sequence or a polypeptide motif as shown depicted in column 5 of table II or column 7 of table IV, and being depicted in the same respective line as said YKL124W or a functional equivalent or a homologue thereof as depicted in column 7 of table II, preferably a homologue or functional equivalent as depicted in column 7 of table II B, and being depicted in the same respective line as said YKL124W, e.g. cytoplasmic.

[0324] The sequence of YNL093W from Saccharomyces cerevisiae, e.g. as shown in column 5 of table I, is published: sequences from S. cerevisiae have been published in G offeau et al., Science 274 (5287), 546 (1996). Its activity is described as GTPase.

Accordingly, in one embodiment, the process of the present invention for producing a plant with increased yield comprises increasing or generating the activity of a gene product conferring the activity “GTPase” from Saccharomyces cerevisiae or its functional equivalent or its homolog, e.g. the increase of
(a) a gene product of a gene comprising the nucleic acid molecule as shown in column 5 of table I, and being depicted in the same respective line as said YNL093W or a functional equivalent or a homologue thereof as shown depicted in column 7 of table I, preferably a homologue or functional equivalent as shown depicted in column 7 of table I B, and being depicted in the same respective line as said YNL093W, e.g. cytoplasmic; or
(b) a polypeptide comprising a polypeptide, a consensus sequence or a polypeptide motif as shown depicted in column 5 of table II or column 7 of table IV, and being depicted in the same respective line as said YNL093W or a functional equivalent or a homologue thereof as depicted in column 7 of table II, preferably a homologue or functional equivalent as depicted in column 7 of table II B, and being depicted in the same respective line as said YNL093W, e.g. cytoplasmic.

[0325] The sequence of ZM_{—}7266_BQ538406_CORN_LOFI_{—}344_{—}730_B from Zea mays, e.g. as shown in column 5 of table I, is described as Thioredoxin H-type. Accordingly, in one embodiment, the process of the present invention for producing a plant with increased yield comprises increasing or generating the activity of a gene product conferring the activity “Thioredoxin H-type” from Zea mays or its functional equivalent or its homolog, e.g. the increase of

(a) a gene product of a gene comprising the nucleic acid molecule as shown in column 5 of table I, and being depicted in the same respective line as said ZM_{—}7266_BQ538406_CORN_LOFI_{—}344_{—}730_B or a functional equivalent or a homologue thereof as shown depicted in column 7 of table I, preferably a homologue or functional equivalent as shown depicted in column 7 of table I B, and being depicted in the same respective line as said ZM_{—}7266_BQ538406_CORN_LOFI_{—}344_{—}730_B, e.g. cytoplasmic; or
(b) a polypeptide comprising a polypeptide, a consensus sequence or a polypeptide motif as shown depicted in column 5 of table II or column 7 of table IV, and being depicted in the same respective line as said ZM_{—}7266_BQ538406_CORN_LOFI_{—}344_{—}730_B or a functional equivalent or a homologue thereof as depicted in column 7 of table II, preferably a homologue or functional equivalent as depicted in column 7 of table II B, and being depicted in the same respective line as said ZM_{—}7266_BQ538406_CORN_LOFI_{—}344_{—}730_B, e.g. cytoplasmic.

[0326] The sequence of AT1G29250.1 from Arabidopsis thaliana, e.g. as shown in column 5 of table I, is described as AT1G29250.1-protein.

Accordingly, in one embodiment, the process of the present invention for producing a plant with increased yield comprises increasing or generating the activity of a gene product conferring the activity “AT1G29250.1-protein” from Arabidopsis thaliana or its functional equivalent or its homolog, e.g. the increase of
(a) a gene product of a gene comprising the nucleic acid molecule as shown in column 5 of table I, and being depicted in the same respective line as said AT1G29250.1 or a functional equivalent or a homologue thereof as shown depicted in column 7 of table I, preferably a homologue or functional equivalent as shown depicted in column 7 of table I B, and being depicted in the same respective line as said AT1G29250.1, e.g. cytoplasmic; or
(b) a polypeptide comprising a polypeptide, a consensus sequence or a polypeptide motif as shown depicted in column 5 of table II or column 7 of table IV, and being depicted in the same respective line as said AT1G29250.1 or a functional equivalent or a homologue thereof as depicted in column 7 of table II, preferably a homologue or functional equivalent as depicted in column 7 of table II B, and being depicted in the same respective line as said AT1G29250.1, e.g. cytoplasmic.

[0327] The sequence of AT1G55920.1 from Arabidopsis thaliana, e.g. as shown in column 5 of table I, is described as serine acetyltransferase.

Accordingly, in one embodiment, the process of the present invention for producing a plant with increased yield comprises increasing or generating the activity of a gene product conferring the activity “serine acetyltransferase” from Arabidopsis thaliana or its functional equivalent or its homolog, e.g. the increase of
(a) a gene product of a gene comprising the nucleic acid molecule as shown in column 5 of table I, and being depicted in the same respective line as said AT1G55920.1 or a functional equivalent or a homologue thereof as shown depicted in column 7 of table I, preferably a homologue or functional equivalent as shown depicted in column 7 of table I B, and being depicted in the same respective line as said AT1G55920.1, e.g. cytoplasmic; or
(b) a polypeptide comprising a polypeptide, a consensus sequence or a polypeptide motif as shown depicted in column 5 of table II or column 7 of table IV, and being depicted in the same respective line as said AT1G55920.1 or a functional equivalent or a homologue thereof as depicted in column 7 of table II, preferably a homologue or functional equivalent as depicted in column 7 of table II B, and being depicted in the same respective line as said AT1G55920.1, e.g. cytoplasmic.

[0328] The sequence of AT3G09480 from Arabidopsis thaliana, e.g. as shown in column 5 of table I, is described as histone H2B.

Accordingly, in one embodiment, the process of the present invention for producing a plant with increased yield comprises increasing or generating the activity of a gene product conferring the activity “histone H2B” from Arabidopsis thaliana or its functional equivalent or its homolog, e.g. the increase of
(a) a gene product of a gene comprising the nucleic acid molecule as shown in column 5 of table I, and being depicted in the same respective line as said AT3G09480 or a functional equivalent or a homologue thereof as shown depicted in column 7 of table I, preferably a homologue or functional equivalent as shown depicted in column 7 of table I B, and being depicted in the same respective line as said AT3G09480, e.g. cytoplasmic; or
(b) a polypeptide comprising a polypeptide, a consensus sequence or a polypeptide motif as shown depicted in column 5 of table II or column 7 of table IV, and being depicted in the same respective line as said AT3G09480 or a functional equivalent or a homologue thereof as depicted in column 7 of table II, preferably a homologue or functional equivalent as depicted in column 7 of table II B, and being depicted in the same respective line as said AT3G09480, e.g. cytoplasmic.

[0329] The sequence of AT4G01870 from Arabidopsis thaliana, e.g. as shown in column 5 of table I, is described as AT4G01870-protein.

Accordingly, in one embodiment, the process of the present invention for producing a plant with increased yield comprises increasing or generating the activity of a gene product conferring the activity “AT4G01870-protein” from Arabidopsis thaliana or its functional equivalent or its homolog, e.g. the increase of
(a) a gene product of a gene comprising the nucleic acid molecule as shown in column 5 of table I, and being depicted in the same respective line as said AT4G01870 or a functional equivalent or a homologue thereof as shown depicted in column 7 of table I, preferably a homologue or functional equivalent as shown depicted in column 7 of table I B, and being depicted in the same respective line as said AT4G01870, e.g. cytoplasmic; or
(b) a polypeptide comprising a polypeptide, a consensus sequence or a polypeptide motif as shown depicted in column 5 of table II or column 7 of table IV, and being depicted in the same respective line as said AT4G01870 or a functional equivalent or a homologue thereof as depicted in column 7 of table II, preferably a homologue or functional equivalent as depicted in column 7 of table II B, and being depicted in the same respective line as said AT4G01870, e.g. cytoplasmic.

[0330] The sequence of AT4G11890 from Arabidopsis thaliana, e.g. as shown in column 5 of table I, is described as protein kinase family protein.

Accordingly, in one embodiment, the process of the present invention for producing a plant with increased yield comprises increasing or generating the activity of a gene product conferring the activity “protein kinase family protein” from Arabidopsis thaliana or its functional equivalent or its homolog, e.g. the increase of
(a) a gene product of a gene comprising the nucleic acid molecule as shown in column 5 of table I, and being depicted in the same respective line as said AT4G11890 or a functional equivalent or a homologue thereof as shown depicted in column 7 of table I, preferably a homologue or functional equivalent as shown depicted in column 7 of table I B, and being depicted in the same respective line as said AT4G11890, e.g. cytoplasmic; or
(b) a polypeptide comprising a polypeptide, a consensus sequence or a polypeptide motif as shown depicted in column 5 of table II or column 7 of table IV, and being depicted in the same respective line as said AT4G11890 or a functional equivalent or a homologue thereof as depicted in column 7 of table II, preferably a homologue or functional equivalent as depicted in column 7 of table II B, and being depicted in the same respective line as said AT4G11890, e.g. cytoplasmic.

[0331] The sequence of AT5G07310 from Arabidopsis thaliana, e.g. as shown in column 5 of table I, is described as AP2 domain-containing transcription factor.

Accordingly, in one embodiment, the process of the present invention for producing a plant with increased yield comprises increasing or generating the activity of a gene product conferring the activity “AP2 domain-containing transcription factor” from Arabidopsis thaliana or its functional equivalent or its homolog, e.g. the increase of
(a) a gene product of a gene comprising the nucleic acid molecule as shown in column 5 of table I, and being depicted in the same respective line as said AT5G07310 or a functional equivalent or a homologue thereof as shown depicted in column 7 of table I, preferably a homologue or functional equivalent as shown depicted in column 7 of table I B, and being depicted in the same respective line as said AT5G07310, e.g. cytoplasmic; or
(b) a polypeptide comprising a polypeptide, a consensus sequence or a polypeptide motif as shown depicted in column 5 of table II or column 7 of table IV, and being depicted in the same respective line as said AT5G07310 or a functional equivalent or a homologue thereof as depicted in column 7 of table II, preferably a homologue or functional equivalent as depicted in column 7 of table II B, and being depicted in the same respective line as said AT5G07310, e.g. cytoplasmic.

[0332] The sequence of CDS5422 from Populus trichocarpa, e.g. as shown in column 5 of table I, is described as Oligosaccharyltransferase.

Accordingly, in one embodiment, the process of the present invention for producing a plant with increased yield comprises increasing or generating the activity of a gene product conferring the activity “Oligosaccharyltransferase” from Populus trichocarpa or its functional equivalent or its homolog, e.g. the increase of
(a) a gene product of a gene comprising the nucleic acid molecule as shown in column 5 of table I, and being depicted in the same respective line as said CDS5422 or a functional equivalent or a homologue thereof as shown depicted in column 7 of table I, preferably a homologue or functional equivalent as shown depicted in column 7 of table I B, and being depicted in the same respective line as said CDS5422, e.g. cytoplasmic; or
(b) a polypeptide comprising a polypeptide, a consensus sequence or a polypeptide motif as shown depicted in column 5 of table II or column 7 of table IV, and being depicted in the same respective line as said CDS5422 or a functional equivalent or a homologue thereof as depicted in column 7 of table II, preferably a homologue or functional equivalent as depicted in column 7 of table II B, and being depicted in the same respective line as said CDS5422, e.g. cytoplasmic.

[0333] The sequence of AT1G03905.1 from Arabidopsis thaliana, e.g. as shown in column 5 of table I, is described as ABC transporter family protein.

Accordingly, in one embodiment, the process of the present invention for producing a plant with increased yield comprises increasing or generating the activity of a gene product conferring the activity “ABC transporter family protein” from Arabidopsis thaliana or its functional equivalent or its homolog, e.g. the increase of
(a) a gene product of a gene comprising the nucleic acid molecule as shown in column 5 of table I, and being depicted in the same respective line as said AT1G03905.1 or a functional equivalent or a homologue thereof as shown depicted in column 7 of table I, preferably a homologue or functional equivalent as shown depicted in column 7 of table I B, and being depicted in the same respective line as said AT1G03905.1, e.g. cytoplasmic; or
(b) a polypeptide comprising a polypeptide, a consensus sequence or a polypeptide motif as shown depicted in column 5 of table II or column 7 of table IV, and being depicted in the same respective line as said AT1G03905.1 or a functional equivalent or a homologue thereof as depicted in column 7 of table II, preferably a homologue or functional equivalent as depicted in column 7 of table II B, and being depicted in the same respective line as said AT1G03905.1, e.g. cytoplasmic.

[0334] The sequence of AT4G22240.1 from Arabidopsis thaliana, e.g. as shown in column 5 of table I, is described as plastid lipid-associated protein.

Accordingly, in one embodiment, the process of the present invention for producing a plant with increased yield comprises increasing or generating the activity of a gene product conferring the activity “plastid lipid-associated protein” from Arabidopsis thaliana or its functional equivalent or its homolog, e.g. the increase of
(a) a gene product of a gene comprising the nucleic acid molecule as shown in column 5 of table I, and being depicted in the same respective line as said AT4G22240.1 or a functional equivalent or a homologue thereof as shown depicted in column 7 of table I, preferably a homologue or functional equivalent as shown depicted in column 7 of table I B, and being depicted in the same respective line as said AT4G22240.1, e.g. cytoplasmic; or
(b) a polypeptide comprising a polypeptide, a consensus sequence or a polypeptide motif as shown depicted in column 5 of table II or column 7 of table IV, and being depicted in the same respective line as said AT4G22240.1 or a functional equivalent or a homologue thereof as depicted in column 7 of table II, preferably a homologue or functional equivalent as depicted in column 7 of table II B, and being depicted in the same respective line as said AT4G22240.1, e.g. cytoplasmic.

[0335] The sequence of AT1G09350.1 from Arabidopsis thaliana, e.g. as shown in column 5 of table I, is described as galactinol synthase.

Accordingly, in one embodiment, the process of the present invention for producing a plant with increased yield comprises increasing or generating the activity of a gene product conferring the activity “galactinol synthase” from Arabidopsis thaliana or its functional equivalent or its homolog, e.g. the increase of
(a) a gene product of a gene comprising the nucleic acid molecule as shown in column 5 of table I, and being depicted in the same respective line as said AT1G09350.1 or a functional equivalent or a homologue thereof as shown depicted in column 7 of table I, preferably a homologue or functional equivalent as shown depicted in column 7 of table I B, and being depicted in the same respective line as said AT1G09350.1, e.g. cytoplasmic; or
(b) a polypeptide comprising a polypeptide, a consensus sequence or a polypeptide motif as shown depicted in column 5 of table II or column 7 of table IV, and being depicted in the same respective line as said AT1G09350.1 or a functional equivalent or a homologue thereof as depicted in column 7 of table II, preferably a homologue or functional equivalent as depicted in column 7 of table II B, and being depicted in the same respective line as said AT1G09350.1, e.g. cytoplasmic.

[0336] The sequence of AT1G30135.1 from Arabidopsis thaliana, e.g. as shown in column 5 of table I, is described as jasmonate-zim-domain protein.

Accordingly, in one embodiment, the process of the present invention for producing a plant with increased yield comprises increasing or generating the activity of a gene product conferring the activity “jasmonate-zim-domain protein” from Arabidopsis thaliana or its functional equivalent or its homolog, e.g. the increase of
(a) a gene product of a gene comprising the nucleic acid molecule as shown in column 5 of table I, and being depicted in the same respective line as said AT1G30135.1 or a functional equivalent or a homologue thereof as shown depicted in column 7 of table I, preferably a homologue or functional equivalent as shown depicted in column 7 of table I B, and being depicted in the same respective line as said AT1G30135.1, e.g. cytoplasmic; or
(b) a polypeptide comprising a polypeptide, a consensus sequence or a polypeptide motif as shown depicted in column 5 of table II or column 7 of table IV, and being depicted in the same respective line as said AT1G30135.1 or a functional equivalent or a homologue thereof as depicted in column 7 of table II, preferably a homologue or functional equivalent as depicted in column 7 of table II B, and being depicted in the same respective line as said AT1G30135.1, e.g. cytoplasmic.

[0337] The sequence of AT1G35680.1 from Arabidopsis thaliana, e.g. as shown in column 5 of table I, is described as 50S chloroplast ribosomal protein L21.

Accordingly, in one embodiment, the process of the present invention for producing a plant with increased yield comprises increasing or generating the activity of a gene product conferring the activity “50S chloroplast ribosomal protein L21” from Arabidopsis thaliana or its functional equivalent or its homolog, e.g. the increase of
(a) a gene product of a gene comprising the nucleic acid molecule as shown in column 5 of table I, and being depicted in the same respective line as said AT1G35680.1 or a functional equivalent or a homologue thereof as shown depicted in column 7 of table I, preferably a homologue or functional equivalent as shown depicted in column 7 of table I B, and being depicted in the same respective line as said AT1G35680.1, e.g. cytoplasmic; or
(b) a polypeptide comprising a polypeptide, a consensus sequence or a polypeptide motif as shown depicted in column 5 of table II or column 7 of table IV, and being depicted in the same respective line as said AT1G35680.1 or a functional equivalent or a homologue thereof as depicted in column 7 of table II, preferably a homologue or functional equivalent as depicted in column 7 of table II B, and being depicted in the same respective line as said AT1G35680.1, e.g. cytoplasmic.

[0338] The sequence of AT2G42540.1 from Arabidopsis thaliana, e.g. as shown in column 5 of table I, is described as cold response protein.

Accordingly, in one embodiment, the process of the present invention for producing a plant with increased yield comprises increasing or generating the activity of a gene product conferring the activity “cold response protein” from Arabidopsis thaliana or its functional equivalent or its homolog, e.g. the increase of
(a) a gene product of a gene comprising the nucleic acid molecule as shown in column 5 of table I, and being depicted in the same respective line as said AT2G42540.1 or a functional equivalent or a homologue thereof as shown depicted in column 7 of table I, preferably a homologue or functional equivalent as shown depicted in column 7 of table I B, and being depicted in the same respective line as said AT2G42540.1, e.g. cytoplasmic; or
(b) a polypeptide comprising a polypeptide, a consensus sequence or a polypeptide motif as shown depicted in column 5 of table II or column 7 of table IV, and being depicted in the same respective line as said AT2G42540.1 or a functional equivalent or a homologue thereof as depicted in column 7 of table II, preferably a homologue or functional equivalent as depicted in column 7 of table II B, and being depicted in the same respective line as said AT2G42540.1, e.g. cytoplasmic.

[0339] The sequence of AT3G02990.1 from Arabidopsis thaliana, e.g. as shown in column 5 of table I, is described as heat shock transcription factor.

Accordingly, in one embodiment, the process of the present invention for producing a plant with increased yield comprises increasing or generating the activity of a gene product conferring the activity “heat shock transcription factor” from Arabidopsis thaliana or its functional equivalent or its homolog, e.g. the increase of
(a) a gene product of a gene comprising the nucleic acid molecule as shown in column 5 of table I, and being depicted in the same respective line as said AT3G02990.1 or a functional equivalent or a homologue thereof as shown depicted in column 7 of table I, preferably a homologue or functional equivalent as shown depicted in column 7 of table I B, and being depicted in the same respective line as said AT3G02990.1, e.g. cytoplasmic; or
(b) a polypeptide comprising a polypeptide, a consensus sequence or a polypeptide motif as shown depicted in column 5 of table II or column 7 of table IV, and being depicted in the same respective line as said AT3G02990.1 or a functional equivalent or a homologue thereof as depicted in column 7 of table II, preferably a homologue or functional equivalent as depicted in column 7 of table II B, and being depicted in the same respective line as said AT3G02990.1, e.g. cytoplasmic.

[0340] The sequence of At5g37670.1 from Arabidopsis thaliana, e.g. as shown in column 5 of table I, is described as small heat shock protein.

Accordingly, in one embodiment, the process of the present invention for producing a plant with increased yield comprises increasing or generating the activity of a gene product conferring the activity “small heat shock protein” from Arabidopsis thaliana or its functional equivalent or its homolog, e.g. the increase of
(a) a gene product of a gene comprising the nucleic acid molecule as shown in column 5 of table I, and being depicted in the same respective line as said At5g37670.1 or a functional equivalent or a homologue thereof as shown depicted in column 7 of table I, preferably a homologue or functional equivalent as shown depicted in column 7 of table I B, and being depicted in the same respective line as said At5g37670.1, e.g. cytoplasmic; or
(b) a polypeptide comprising a polypeptide, a consensus sequence or a polypeptide motif as shown depicted in column 5 of table II or column 7 of table IV, and being depicted in the same respective line as said At5g37670.1 or a functional equivalent or a homologue thereof as depicted in column 7 of table II, preferably a homologue or functional equivalent as depicted in column 7 of table II B, and being depicted in the same respective line as said At5g37670.1, e.g. cytoplasmic.

[0341] The sequence of CDS5376 from Populus trichocarpa, e.g. as shown in column 5 of table I, is described as rubisco subunit binding-protein beta subunit.

Accordingly, in one embodiment, the process of the present invention for producing a plant with increased yield comprises increasing or generating the activity of a gene product conferring the activity “rubisco subunit binding-protein beta subunit” from Populus trichocarpa or its functional equivalent or its homolog, e.g. the increase of
(a) a gene product of a gene comprising the nucleic acid molecule as shown in column 5 of table I, and being depicted in the same respective line as said CDS5376 or a functional equivalent or a homologue thereof as shown depicted in column 7 of table I, preferably a homologue or functional equivalent as shown depicted in column 7 of table I B, and being depicted in the same respective line as said CDS5376, e.g. cytoplasmic; or
(b) a polypeptide comprising a polypeptide, a consensus sequence or a polypeptide motif as shown depicted in column 5 of table II or column 7 of table IV, and being depicted in the same respective line as said CDS5376 or a functional equivalent or a homologue thereof as depicted in column 7 of table II, preferably a homologue or functional equivalent as depicted in column 7 of table II B, and being depicted in the same respective line as said CDS5376, e.g. cytoplasmic.

[0342] The sequence of LOC_Os02g13560.1 from Oryza sativa, e.g. as shown in column 5 of table I, is described as sugar transporter.

Accordingly, in one embodiment, the process of the present invention for producing a plant with increased yield comprises increasing or generating the activity of a gene product conferring the activity “sugar transporter” from Oryza sativa or its functional equivalent or its homolog, e.g. the increase of
(a) a gene product of a gene comprising the nucleic acid molecule as shown in column 5 of table I, and being depicted in the same respective line as said LOC_Os02g13560.1 or a functional equivalent or a homologue thereof as shown depicted in column 7 of table I, preferably a homologue or functional equivalent as shown depicted in column 7 of table I B, and being depicted in the same respective line as said LOC_Os02g13560.1, e.g. cytoplasmic; or
(b) a polypeptide comprising a polypeptide, a consensus sequence or a polypeptide motif as shown depicted in column 5 of table II or column 7 of table IV, and being depicted in the same respective line as said LOC_Os02g13560.1 or a functional equivalent or a homologue thereof as depicted in column 7 of table II, preferably a homologue or functional equivalent as depicted in column 7 of table II B, and being depicted in the same respective line as said LOC_Os02g13560.1, e.g. cytoplasmic.

[0343] The sequence of YCR024c from Saccharomyces cerevisiae, e.g. as shown in column 5 of table I, is published: sequences from S. cerevisiae have been published in Goffeau et al., Science 274 (5287), 546 (1996). Its activity is described as mitochondrial asparaginyl-tRNA synthetase.

Accordingly, in one embodiment, the process of the present invention for producing a plant with increased yield comprises increasing or generating the activity of a gene product conferring the activity “mitochondrial asparaginyl-tRNA synthetase” from Saccharomyces cerevisiae or its functional equivalent or its homolog, e.g. the increase of
(a) a gene product of a gene comprising the nucleic acid molecule as shown in column 5 of table I, and being depicted in the same respective line as said YCR024c or a functional equivalent or a homologue thereof as shown depicted in column 7 of table I, preferably a homologue or functional equivalent as shown depicted in column 7 of table I B, and being depicted in the same respective line as said YCR024c, e.g. cytoplasmic; or
(b) a polypeptide comprising a polypeptide, a consensus sequence or a polypeptide motif as shown depicted in column 5 of table II or column 7 of table IV, and being depicted in the same respective line as said YCR024c or a functional equivalent or a homologue thereof as depicted in column 7 of table II, preferably a homologue or functional equivalent as depicted in column 7 of table II B, and being depicted in the same respective line as said YCR024c, e.g. cytoplasmic.

[0344] The sequence of AT1G05100_truncated from Arabidopsis thaliana, e.g. as shown in column 5 of table I, is described as protein kinase.

Accordingly, in one embodiment, the process of the present invention for producing a plant with increased yield comprises increasing or generating the activity of a gene product conferring the activity “protein kinase” from Arabidopsis thaliana or its functional equivalent or its homolog, e.g. the increase of
(a) a gene product of a gene comprising the nucleic acid molecule as shown in column 5 of table I, and being depicted in the same respective line as said AT1G05100_truncated or a functional equivalent or a homologue thereof as shown depicted in column 7 of table I, preferably a homologue or functional equivalent as shown depicted in column 7 of table I B, and being depicted in the same respective line as said AT1G05100_truncated, e.g. cytoplasmic; or
(b) a polypeptide comprising a polypeptide, a consensus sequence or a polypeptide motif as shown depicted in column 5 of table II or column 7 of table IV, and being depicted in the same respective line as said AT1G05100_truncated or a functional equivalent or a homologue thereof as depicted in column 7 of table II, preferably a homologue or functional equivalent as depicted in column 7 of table II B, and being depicted in the same respective line as said AT1G05100_truncated, e.g. cytoplasmic.

[0345] The sequence of AT1G09450 from Arabidopsis thaliana, e.g. as shown in column 5 of table I, is described as haspin-related protein.

Accordingly, in one embodiment, the process of the present invention for producing a plant with increased yield comprises increasing or generating the activity of a gene product conferring the activity “haspin-related protein” from Arabidopsis thaliana or its functional equivalent or its homolog, e.g. the increase of
(a) a gene product of a gene comprising the nucleic acid molecule as shown in column 5 of table I, and being depicted in the same respective line as said AT1G09450 or a functional equivalent or a homologue thereof as shown depicted in column 7 of table I, preferably a homologue or functional equivalent as shown depicted in column 7 of table I B, and being depicted in the same respective line as said AT1G09450, e.g. cytoplasmic; or
(b) a polypeptide comprising a polypeptide, a consensus sequence or a polypeptide motif as shown depicted in column 5 of table II or column 7 of table IV, and being depicted in the same respective line as said AT1G09450 or a functional equivalent or a homologue thereof as depicted in column 7 of table II, preferably a homologue or functional equivalent as depicted in column 7 of table II B, and being depicted in the same respective line as said AT1G09450, e.g. cytoplasmic.

[0346] The sequence of AT1G44760 from Arabidopsis thaliana, e.g. as shown in column 5 of table I, is described as universal stress protein family protein.

Accordingly, in one embodiment, the process of the present invention for producing a plant with increased yield comprises increasing or generating the activity of a gene product conferring the activity “universal stress protein family protein” from Arabidopsis thaliana or its functional equivalent or its homolog, e.g. the increase of
(a) a gene product of a gene comprising the nucleic acid molecule as shown in column 5 of table I, and being depicted in the same respective line as said AT1G44760 or a functional equivalent or a homologue thereof as shown depicted in column 7 of table I, preferably a homologue or functional equivalent as shown depicted in column 7 of table I B, and being depicted in the same respective line as said AT1G44760, e.g. cytoplasmic; or
(b) a polypeptide comprising a polypeptide, a consensus sequence or a polypeptide motif as shown depicted in column 5 of table II or column 7 of table IV, and being depicted in the same respective line as said AT1G44760 or a functional equivalent or a homologue thereof as depicted in column 7 of table II, preferably a homologue or functional equivalent as depicted in column 7 of table II B, and being depicted in the same respective line as said AT1G44760, e.g. cytoplasmic.

[0347] The sequence of AT1G54050.1 from Arabidopsis thaliana, e.g. as shown in column 5 of table I, is described as heat shock protein.

Accordingly, in one embodiment, the process of the present invention for producing a plant with increased yield comprises increasing or generating the activity of a gene product conferring the activity “heat shock protein” from Arabidopsis thaliana or its functional equivalent or its homolog, e.g. the increase of
(a) a gene product of a gene comprising the nucleic acid molecule as shown in column 5 of table I, and being depicted in the same respective line as said AT1G54050.1 or a functional equivalent or a homologue thereof as shown depicted in column 7 of table I, preferably a homologue or functional equivalent as shown depicted in column 7 of table I B, and being depicted in the same respective line as said AT1G54050.1, e.g. cytoplasmic; or
(b) a polypeptide comprising a polypeptide, a consensus sequence or a polypeptide motif as shown depicted in column 5 of table II or column 7 of table IV, and being depicted in the same respective line as said AT1G54050.1 or a functional equivalent or a homologue thereof as depicted in column 7 of table II, preferably a homologue or functional equivalent as depicted in column 7 of table II B, and being depicted in the same respective line as said AT1G54050.1, e.g. cytoplasmic.

[0348] The sequence of AT2G27040 from Arabidopsis thaliana, e.g. as shown in column 5 of table I, is described as argonaute protein.

Accordingly, in one embodiment, the process of the present invention for producing a plant with increased yield comprises increasing or generating the activity of a gene product conferring the activity “argonaute protein” from Arabidopsis thaliana or its functional equivalent or its homolog, e.g. the increase of
(a) a gene product of a gene comprising the nucleic acid molecule as shown in column 5 of table I, and being depicted in the same respective line as said AT2G27040 or a functional equivalent or a homologue thereof as shown depicted in column 7 of table I, preferably a homologue or functional equivalent as shown depicted in column 7 of table I B, and being depicted in the same respective line as said AT2G27040, e.g. cytoplasmic; or
(b) a polypeptide comprising a polypeptide, a consensus sequence or a polypeptide motif as shown depicted in column 5 of table II or column 7 of table IV, and being depicted in the same respective line as said AT2G27040 or a functional equivalent or a homologue thereof as depicted in column 7 of table II, preferably a homologue or functional equivalent as depicted in column 7 of table II B, and being depicted in the same respective line as said AT2G27040, e.g. cytoplasmic.

[0349] The sequence of AT2G29490 from Arabidopsis thaliana, e.g. as shown in column 5 of table I, is described as glutathione-S-transferase.

Accordingly, in one embodiment, the process of the present invention for producing a plant with increased yield comprises increasing or generating the activity of a gene product conferring the activity “glutathione-S-transferase” from Arabidopsis thaliana or its functional equivalent or its homolog, e.g. the increase of
(a) a gene product of a gene comprising the nucleic acid molecule as shown in column 5 of table I, and being depicted in the same respective line as said AT2G29490 or a functional equivalent or a homologue thereof as shown depicted in column 7 of table I, preferably a homologue or functional equivalent as shown depicted in column 7 of table I B, and being depicted in the same respective line as said AT2G29490, e.g. cytoplasmic; or
(b) a polypeptide comprising a polypeptide, a consensus sequence or a polypeptide motif as shown depicted in column 5 of table II or column 7 of table IV, and being depicted in the same respective line as said AT2G29490 or a functional equivalent or a homologue thereof as depicted in column 7 of table II, preferably a homologue or functional equivalent as depicted in column 7 of table II B, and being depicted in the same respective line as said AT2G29490, e.g. cytoplasmic.

[0350] The sequence of AT2G35300 from Arabidopsis thaliana, e.g. as shown in column 5 of table I, is described as AT2G35300-protein.

Accordingly, in one embodiment, the process of the present invention for producing a plant with increased yield comprises increasing or generating the activity of a gene product conferring the activity “AT2G35300-protein” from Arabidopsis thaliana or its functional equivalent or its homolog, e.g. the increase of
(a) a gene product of a gene comprising the nucleic acid molecule as shown in column 5 of table I, and being depicted in the same respective line as said AT2G35300 or a functional equivalent or a homologue thereof as shown depicted in column 7 of table I, preferably a homologue or functional equivalent as shown depicted in column 7 of table I B, and being depicted in the same respective line as said AT2G35300, e.g. cytoplasmic; or
(b) a polypeptide comprising a polypeptide, a consensus sequence or a polypeptide motif as shown depicted in column 5 of table II or column 7 of table IV, and being depicted in the same respective line as said AT2G35300 or a functional equivalent or a homologue thereof as depicted in column 7 of table II, preferably a homologue or functional equivalent as depicted in column 7 of table II B, and being depicted in the same respective line as said AT2G35300, e.g. cytoplasmic.

[0351] The sequence of AT2G35930 from Arabidopsis thaliana, e.g. as shown in column 5 of table I, is described as ubiquitin-protein ligase.

Accordingly, in one embodiment, the process of the present invention for producing a plant with increased yield comprises increasing or generating the activity of a gene product conferring the activity “ubiquitin-protein ligase” from Arabidopsis thaliana or its functional equivalent or its homolog, e.g. the increase of
(a) a gene product of a gene comprising the nucleic acid molecule as shown in column 5 of table I, and being depicted in the same respective line as said AT2G35930 or a functional equivalent or a homologue thereof as shown depicted in column 7 of table I, preferably a homologue or functional equivalent as shown depicted in column 7 of table I B, and being depicted in the same respective line as said AT2G35930, e.g. cytoplasmic; or
(b) a polypeptide comprising a polypeptide, a consensus sequence or a polypeptide motif as shown depicted in column 5 of table II or column 7 of table IV, and being depicted in the same respective line as said AT2G35930 or a functional equivalent or a homologue thereof as depicted in column 7 of table II, preferably a homologue or functional equivalent as depicted in column 7 of table II B, and being depicted in the same respective line as said AT2G35930, e.g. cytoplasmic.

[0352] The sequence of AT3G04620 from Arabidopsis thaliana, e.g. as shown in column 5 of table I, is described as AT3G04620-protein.

Accordingly, in one embodiment, the process of the present invention for producing a plant with increased yield comprises increasing or generating the activity of a gene product conferring the activity “AT3G04620-protein” from Arabidopsis thaliana or its functional equivalent or its homolog, e.g. the increase of
(a) a gene product of a gene comprising the nucleic acid molecule as shown in column 5 of table I, and being depicted in the same respective line as said AT3G04620 or a functional equivalent or a homologue thereof as shown depicted in column 7 of table I, preferably a homologue or functional equivalent as shown depicted in column 7 of table I B, and being depicted in the same respective line as said AT3G04620, e.g. cytoplasmic; or
(b) a polypeptide comprising a polypeptide, a consensus sequence or a polypeptide motif as shown depicted in column 5 of table II or column 7 of table IV, and being depicted in the same respective line as said AT3G04620 or a functional equivalent or a homologue thereof as depicted in column 7 of table II, preferably a homologue or functional equivalent as depicted in column 7 of table II B, and being depicted in the same respective line as said AT3G04620, e.g. cytoplasmic.

[0353] The sequence of AT3G20960 from Arabidopsis thaliana, e.g. as shown in column 5 of table I, is described as Cytochrome P450.

Accordingly, in one embodiment, the process of the present invention for producing a plant with increased yield comprises increasing or generating the activity of a gene product conferring the activity “Cytochrome P450” from Arabidopsis thaliana or its functional equivalent or its homolog, e.g. the increase of
(a) a gene product of a gene comprising the nucleic acid molecule as shown in column 5 of table I, and being depicted in the same respective line as said AT3G20960 or a functional equivalent or a homologue thereof as shown depicted in column 7 of table I, preferably a homologue or functional equivalent as shown depicted in column 7 of table I B, and being depicted in the same respective line as said AT3G20960, e.g. cytoplasmic; or
(b) a polypeptide comprising a polypeptide, a consensus sequence or a polypeptide motif as shown depicted in column 5 of table II or column 7 of table IV, and being depicted in the same respective line as said AT3G20960 or a functional equivalent or a homologue thereof as depicted in column 7 of table II, preferably a homologue or functional equivalent as depicted in column 7 of table II B, and being depicted in the same respective line as said AT3G20960, e.g. cytoplasmic.

[0354] The sequence of AT3G61580.1 from Arabidopsis thaliana, e.g. as shown in column 5 of table I, is described as delta-8 sphingolipid desaturase.

Accordingly, in one embodiment, the process of the present invention for producing a plant with increased yield comprises increasing or generating the activity of a gene product conferring the activity “delta-8 sphingolipid desaturase” from Arabidopsis thaliana or its functional equivalent or its homolog, e.g. the increase of
(a) a gene product of a gene comprising the nucleic acid molecule as shown in column 5 of table I, and being depicted in the same respective line as said AT3G61580.1 or a functional equivalent or a homologue thereof as shown depicted in column 7 of table I, preferably a homologue or functional equivalent as shown depicted in column 7 of table I B, and being depicted in the same respective line as said AT3G61580.1, e.g. cytoplasmic; or
(b) a polypeptide comprising a polypeptide, a consensus sequence or a polypeptide motif as shown depicted in column 5 of table II or column 7 of table IV, and being depicted in the same respective line as said AT3G61580.1 or a functional equivalent or a homologue thereof as depicted in column 7 of table II, preferably a homologue or functional equivalent as depicted in column 7 of table II B, and being depicted in the same respective line as said AT3G61580.1, e.g. cytoplasmic.

[0355] The sequence of AT5G13220 from Arabidopsis thaliana, e.g. as shown in column 5 of table I, is described as jasmonate-zim-domain protein.

Accordingly, in one embodiment, the process of the present invention for producing a plant with increased yield comprises increasing or generating the activity of a gene product conferring the activity “jasmonate-zim-domain protein” from Arabidopsis thaliana or its functional equivalent or its homolog, e.g. the increase of
(a) a gene product of a gene comprising the nucleic acid molecule as shown in column 5 of table I, and being depicted in the same respective line as said AT5G13220 or a functional equivalent or a homologue thereof as shown depicted in column 7 of table I, preferably a homologue or functional equivalent as shown depicted in column 7 of table I B, and being depicted in the same respective line as said AT5G13220, e.g. cytoplasmic; or
(b) a polypeptide comprising a polypeptide, a consensus sequence or a polypeptide motif as shown depicted in column 5 of table II or column 7 of table IV, and being depicted in the same respective line as said AT5G13220 or a functional equivalent or a homologue thereof as depicted in column 7 of table II, preferably a homologue or functional equivalent as depicted in column 7 of table II B, and being depicted in the same respective line as said AT5G13220, e.g. cytoplasmic.

[0356] The sequence of CDS5394 from Populus trichocarpa, e.g. as shown in column 5 of table I, is described as CDS5394-protein.

Accordingly, in one embodiment, the process of the present invention for producing a plant with increased yield comprises increasing or generating the activity of a gene product conferring the activity “CDS5394-protein” from Populus trichocarpa or its functional equivalent or its homolog, e.g. the increase of
(a) a gene product of a gene comprising the nucleic acid molecule as shown in column 5 of table I, and being depicted in the same respective line as said CDS5394 or a functional equivalent or a homologue thereof as shown depicted in column 7 of table I, preferably a homologue or functional equivalent as shown depicted in column 7 of table I B, and being depicted in the same respective line as said CDS5394, e.g. cytoplasmic; or
(b) a polypeptide comprising a polypeptide, a consensus sequence or a polypeptide motif as shown depicted in column 5 of table II or column 7 of table IV, and being depicted in the same respective line as said CDS5394 or a functional equivalent or a homologue thereof as depicted in column 7 of table II, preferably a homologue or functional equivalent as depicted in column 7 of table II B, and being depicted in the same respective line as said CDS5394, e.g. cytoplasmic.

[0357] The sequence of CDS5401_TRUNCATED from Populus trichocarpa, e.g. as shown in column 5 of table I, is described as CDS5401_TRUNCATED-protein.

Accordingly, in one embodiment, the process of the present invention for producing a plant with increased yield comprises increasing or generating the activity of a gene product conferring the activity “CDS5401_TRUNCATED-protein” from Populus trichocarpa or its functional equivalent or its homolog, e.g. the increase of
(a) a gene product of a gene comprising the nucleic acid molecule as shown in column 5 of table I, and being depicted in the same respective line as said CDS5401_TRUNCATED or a functional equivalent or a homologue thereof as shown depicted in column 7 of table I, preferably a homologue or functional equivalent as shown depicted in column 7 of table I B, and being depicted in the same respective line as said CDS5401_TRUNCATED, e.g. cytoplasmic; or
(b) a polypeptide comprising a polypeptide, a consensus sequence or a polypeptide motif as shown depicted in column 5 of table II or column 7 of table IV, and being depicted in the same respective line as said CDS5401_TRUNCATED or a functional equivalent or a homologue thereof as depicted in column 7 of table II, preferably a homologue or functional equivalent as depicted in column 7 of table II B, and being depicted in the same respective line as said CDS5401_TRUNCATED, e.g. cytoplasmic.

[0358] The sequence of ZM06LC319_CORN_LOFI_{—}151_{—}2385_A from Zea mays, e.g. as shown in column 5 of table I, is described as cullin.

Accordingly, in one embodiment, the process of the present invention for producing a plant with increased yield comprises increasing or generating the activity of a gene product conferring the activity “cullin” from Zea mays or its functional equivalent or its homolog, e.g. the increase of
(a) a gene product of a gene comprising the nucleic acid molecule as shown in column 5 of table I, and being depicted in the same respective line as said ZM06LC319_CORN_LOFI_{—}151_{—}2385_A or a functional equivalent or a homologue thereof as shown depicted in column 7 of table I, preferably a homologue or functional equivalent as shown depicted in column 7 of table I B, and being depicted in the same respective line as said ZM06LC319_CORN_LOFI_{—}151_{—}2385_A, e.g. cytoplasmic; or
(b) a polypeptide comprising a polypeptide, a consensus sequence or a polypeptide motif as shown depicted in column 5 of table II or column 7 of table IV, and being depicted in the same respective line as said ZM06LC319_CORN_LOFI_{—}151_{—}2385_A or a functional equivalent or a homologue thereof as depicted in column 7 of table II, preferably a homologue or functional equivalent as depicted in column 7 of table II B, and being depicted in the same respective line as said ZM06LC319_CORN_LOFI_{—}151_{—}2385_A, e.g. cytoplasmic.

[0359] The sequence of AT4G15420.1 from Arabidopsis thaliana, e.g. as shown in column 5 of table I, is described as PRLI-interacting factor.

Accordingly, in one embodiment, the process of the present invention for producing a plant with increased yield comprises increasing or generating the activity of a gene product conferring the activity “PRLI-interacting factor” from Arabidopsis thaliana or its functional equivalent or its homolog, e.g. the increase of
(a) a gene product of a gene comprising the nucleic acid molecule as shown in column 5 of table I, and being depicted in the same respective line as said AT4G15420.1 or a functional equivalent or a homologue thereof as shown depicted in column 7 of table I, preferably a homologue or functional equivalent as shown depicted in column 7 of table I B, and being depicted in the same respective line as said AT4G15420.1, e.g. cytoplasmic; or
(b) a polypeptide comprising a polypeptide, a consensus sequence or a polypeptide motif as shown depicted in column 5 of table II or column 7 of table IV, and being depicted in the same respective line as said AT4G15420.1 or a functional equivalent or a homologue thereof as depicted in column 7 of table II, preferably a homologue or functional equivalent as depicted in column 7 of table II B, and being depicted in the same respective line as said AT4G15420.1, e.g. cytoplasmic.

[0360] The sequence of 60952769.R01.1 from Zea mays, e.g. as shown in column 5 of table I, is described as 60952769.R01.1-protein.

Accordingly, in one embodiment, the process of the present invention for producing a plant with increased yield comprises increasing or generating the activity of a gene product conferring the activity “60952769.R01.1-protein” from Zea mays or its functional equivalent or its homolog, e.g. the increase of
(a) a gene product of a gene comprising the nucleic acid molecule as shown in column 5 of table I, and being depicted in the same respective line as said 60952769.R01.1 or a functional equivalent or a homologue thereof as shown depicted in column 7 of table I, preferably a homologue or functional equivalent as shown depicted in column 7 of table I B, and being depicted in the same respective line as said 60952769.R01.1, e.g. cytoplasmic; or
(b) a polypeptide comprising a polypeptide, a consensus sequence or a polypeptide motif as shown depicted in column 5 of table II or column 7 of table IV, and being depicted in the same respective line as said 60952769.R01.1 or a functional equivalent or a homologue thereof as depicted in column 7 of table II, preferably a homologue or functional equivalent as depicted in column 7 of table II B, and being depicted in the same respective line as said 60952769.R01.1, e.g. cytoplasmic.

[0361] The sequence of AT5G42380 from Arabidopsis thaliana, e.g. as shown in column 5 of table I, is described as AT5G42380-protein.

Accordingly, in one embodiment, the process of the present invention for producing a plant with increased yield comprises increasing or generating the activity of a gene product conferring the activity “AT5G42380-protein” from Arabidopsis thaliana or its functional equivalent or its homolog, e.g. the increase of
(a) a gene product of a gene comprising the nucleic acid molecule as shown in column 5 of table I, and being depicted in the same respective line as said AT5G42380 or a functional equivalent or a homologue thereof as shown depicted in column 7 of table I, preferably a homologue or functional equivalent as shown depicted in column 7 of table I B, and being depicted in the same respective line as said AT5G42380, e.g. cytoplasmic; or
(b) a polypeptide comprising a polypeptide, a consensus sequence or a polypeptide motif as shown depicted in column 5 of table II or column 7 of table IV, and being depicted in the same respective line as said AT5G42380 or a functional equivalent or a homologue thereof as depicted in column 7 of table II, preferably a homologue or functional equivalent as depicted in column 7 of table II B, and being depicted in the same respective line as said AT5G42380, e.g. cytoplasmic.

[0362] The sequence of 57972199.R01.1 from Zea mays, e.g. as shown in column 5 of table I, is described as 57972199.R01.1-protein.

Accordingly, in one embodiment, the process of the present invention for producing a plant with increased yield comprises increasing or generating the activity of a gene product conferring the activity “57972199.R01.1-protein” from Zea mays or its functional equivalent or its homolog, e.g. the increase of
(a) a gene product of a gene comprising the nucleic acid molecule as shown in column 5 of table I, and being depicted in the same respective line as said 57972199.R01.1 or a functional equivalent or a homologue thereof as shown depicted in column 7 of table I, preferably a homologue or functional equivalent as shown depicted in column 7 of table I B, and being depicted in the same respective line as said 57972199.R01.1, e.g. cytoplasmic; or
(b) a polypeptide comprising a polypeptide, a consensus sequence or a polypeptide motif as shown depicted in column 5 of table II or column 7 of table IV, and being depicted in the same respective line as said 57972199.R01.1 or a functional equivalent or a homologue thereof as depicted in column 7 of table II, preferably a homologue or functional equivalent as depicted in column 7 of table II B, and being depicted in the same respective line as said 57972199.R01.1, e.g. cytoplasmic.

[0363] The sequence of OS02G44730 from Oryza sativa, e.g. as shown in column 5 of table I, is described as OS02G44730-protein.

Accordingly, in one embodiment, the process of the present invention for producing a plant with increased yield comprises increasing or generating the activity of a gene product conferring the activity “OS02G44730-protein” from Oryza sativa or its functional equivalent or its homolog, e.g. the increase of
(a) a gene product of a gene comprising the nucleic acid molecule as shown in column 5 of table I, and being depicted in the same respective line as said OS02G44730 or a functional equivalent or a homologue thereof as shown depicted in column 7 of table I, preferably a homologue or functional equivalent as shown depicted in column 7 of table I B, and being depicted in the same respective line as said OS02G44730, e.g. cytoplasmic; or
(b) a polypeptide comprising a polypeptide, a consensus sequence or a polypeptide motif as shown depicted in column 5 of table II or column 7 of table IV, and being depicted in the same respective line as said OS02G44730 or a functional equivalent or a homologue thereof as depicted in column 7 of table II, preferably a homologue or functional equivalent as depicted in column 7 of table II B, and being depicted in the same respective line as said OS02G44730, e.g. cytoplasmic.

[0364] The sequence of AT3G24515 from Arabidopsis thaliana, e.g. as shown in column 5 of table I, is described as ubiquitin-conjugating enzyme.

Accordingly, in one embodiment, the process of the present invention for producing a plant with increased yield comprises increasing or generating the activity of a gene product conferring the activity “ubiquitin-conjugating enzyme” from Arabidopsis thaliana or its functional equivalent or its homolog, e.g. the increase of
(a) a gene product of a gene comprising the nucleic acid molecule as shown in column 5 of table I, and being depicted in the same respective line as said AT3G24515 or a functional equivalent or a homologue thereof as shown depicted in column 7 of table I, preferably a homologue or functional equivalent as shown depicted in column 7 of table I B, and being depicted in the same respective line as said AT3G24515, e.g. cytoplasmic; or
(b) a polypeptide comprising a polypeptide, a consensus sequence or a polypeptide motif as shown depicted in column 5 of table II or column 7 of table IV, and being depicted in the same respective line as said AT3G24515 or a functional equivalent or a homologue thereof as depicted in column 7 of table II, preferably a homologue or functional equivalent as depicted in column 7 of table II B, and being depicted in the same respective line as said AT3G24515, e.g. cytoplasmic.

[0365] Accordingly, an activity of a polypeptide selected form the group consisting of 2-oxoglutarate-dependent dioxygenase, 3-ketoacyl-CoA thiolase, 3′-phosphoadenosine 5′-phosphate phosphatase, 4-diphosphocytidyl-2-C-methyl-D-erythritol kinase, 50S chloroplast ribosomal protein L21, 57972199.R01.1-protein, 60952769.R01.1-protein, 60S ribosomal protein, ABC transporter family protein, AP2 domain-containing transcription factor, argonaute protein, AT1G29250.1-protein, AT1G53885-protein, AT2G35300-protein, AT3G04620-protein, AT4G01870-protein, AT5G42380-protein, AT5G47440-protein, CDS5394-protein, CDS5401_TRUNCATED-protein, cold response protein, cullin, Cytochrome P450, delta-8 sphingolipid desaturase, galactinol synthase, glutathione-S-transferase, GTPase, haspin-related protein, heat shock protein, heat shock transcription factor, histone H2B, jasmonate-zim-domain protein, mitochondrial asparaginyl-tRNA synthetase, Oligosaccharyltransferase, OS02G44730-protein, Oxygen-evolving enhancer protein, peptidyl-prolyl cis-trans isomerase, peptidyl-prolyl cis-trans isomerase family protein, plastid lipid-associated protein, Polypyrimidine tract binding protein, PRLI-interacting factor, protein kinase, protein kinase family protein, rubisco subunit binding-protein beta subunit, serine acetyltransferase, serine hydroxymethyltransferase, small heat shock protein, S-ribosylhomocysteinase, sugar transporter, Thioredoxin H-type, ubiquitin-conjugating enzyme, ubiquitin-protein ligase, universal stress protein family protein, and Vacuolar protein is increased in one or more specific compartment(s) or organelle(s) of a cell or plant and confers said increased yield, e.g. the plant shows one or more increased yield-related trait(s). For example, said activity is increased in the compartment of a cell as indicated in table I or II in column 6 resulting in an increased yield of the corresponding plant. For example, the specific localization of said activity confers an improved or increased yield-related trait as shown in table VIII. For example, said activity can be increased in plastids or mitochondria of a plant cell, thus conferring increase of yield in a corresponding plant.

[0366] In one embodiment, an activity conferred by an expression of a gene described herein or its expression product; e.g. by a polypeptide shown in table II, is increase or generated in the plastid, if in column 6 of each table I or II the term “plastidic” is listed for said polypeptide.

[0367] In one embodiment, an activity conferred by the expression of a gene described herein or its expression product; e.g. by a polypeptide shown in table I or II, is increase or generated in the mitochondria if in column 6 of each table I or II the term “mitochondria” is listed for said polypeptide.

[0368] In another embodiment the present invention relates to a method for producing an, e.g. transgenic, plant with increased yield, e.g. with an increased yield-related trait, for example enhanced tolerance to abiotic environmental stress, for example an increased drought tolerance and/or low temperature tolerance and/or an increased nutrient use efficiency, intrinsic yield and/or another increased yield-related trait as compared to a corresponding, e.g. non-transformed, wild type plant, which comprises
[0369] (a) increasing or generating one or more said “activities” according to the invention in the cytoplasm of a plant cell, and
[0370] (b) growing the plant under conditions which permit the development of a plant with increased yield, e.g. with an increased yield-related trait, for example enhanced tolerance to abiotic environmental stress, for example an increased drought tolerance and/or low temperature tolerance and/or an increased nutrient use efficiency, intrinsic yield and/or another increased yield-related trait as compared to a corresponding, e.g. non-transformed, wild type plant.

[0371] In one embodiment, an activity according to the invention as being conferred by a polypeptide shown in table II is increase or generated in the cytoplasm, if in column 6 of each table I the term “cytoplasmic” is listed for said polypeptide.

[0372] As the terms “cytoplasmic” and “non-targeted” shall not exclude a targeted localisation to any cell compartment for the products of the inventive nucleic acid sequences by their naturally occurring sequence properties within the background of the transgenic organism, in one embodiment, an activity as disclosed herein as being conferred by a polypeptide shown in table II is increase or generated non-targeted, if in column 6 of each table I the term “cytoplasmic” is listed for said polypeptide. For the purposes of the description of the present invention, the term “cytoplasmic” shall indicate, that the nucleic acid of the invention is expressed without the addition of an non-natural transit peptide encoding sequence. A non-natural transient peptide encoding sequence is a sequence which is not a natural part of a nucleic acid of the invention but is rather added by molecular manipulation steps as for example described in the example under “plastid targeted expression”. Therefore the term “cytoplasmic” shall not exclude a targeted localisation to any cell compartment for the products of the inventive nucleic acid sequences by their naturally occurring sequence properties.

[0373] In another embodiment the present invention is related to a method for producing a, e.g. transgenic, plant with increased yield, or a part thereof, as compared to a corresponding, e.g. non-transformed, wild type plant, which comprises
[0374] (a1) increasing or generating one or more said activities of a polypeptide, e.g. the activity of said gene or the gene product gene, e.g. an activity selected from the group consisting of 2-oxoglutarate-dependent dioxygenase, 3-ketoacyl-CoA thiolase, 3′-phosphoadenosine 5′-phosphate phosphatase, 4-diphosphocytidyl-2-C-methyl-D-erythritol kinase, 50S chloroplast ribosomal protein L21, 57972199.R01.1-protein, 60952769.R01.1-protein, 60S ribosomal protein, ABC transporter family protein, AP2 domain-containing transcription factor, argonaute protein, AT1G29250.1-protein, AT1G53885-protein, AT2G35300-protein, AT3G04620-protein, AT4G01870-protein, AT5G42380-protein, AT5G47440-protein, CDS5394-protein, CDS5401_TRUNCATED-protein, cold response protein, cullin, Cytochrome P450, delta-8 sphingolipid desaturase, galactinol synthase, glutathione-S-transferase, GTPase, haspin-related protein, heat shock protein, heat shock transcription factor, histone H2B, jasmonate-zim-domain protein, mitochondrial asparaginyl-tRNA synthetase, Oligosaccharyltransferase, OS02G44730-protein, Oxygen-evolving enhancer protein, peptidyl-prolyl cis-trans isomerase, peptidyl-prolyl cis-trans isomerase family protein, plastid lipid-associated protein, Polypyrimidine tract binding protein, PRLI-interacting factor, protein kinase, protein kinase family protein, rubisco subunit binding-protein beta subunit, serine acetyltransferase, serine hydroxymethyltransferase, small heat shock protein, S-ribosylhomocysteinase, sugar transporter, Thioredoxin Htype, ubiquitin-conjugating enzyme, ubiquitin-protein ligase, universal stress protein family protein, and Vacuolar protein in an organelle of a plant cell, or
[0375] (a2) increasing or generating the activity of a protein as shown in table II, column 3 or as encoded by the nucleic acid sequences as shown in table I, column 5 or 7, and which is joined to a nucleic acid sequence encoding a transit peptide in the plant cell; or
[0376] (a3) increasing or generating the activity of a protein as shown in table II, column 3 or as encoded by the nucleic acid sequences as shown in table I, column 5 or 7, and which is joined to a nucleic acid sequence encoding an organelle localization sequence, especially a chloroplast localization sequence, in a plant cell,
[0377] (a4) increasing or generating the activity of a protein as shown in table II, column 3 or as encoded by the nucleic acid sequences as shown in table I, column 5 or 7, and which is joined to a nucleic acid sequence encoding an mitochondrion localization sequence in a plant cell,
   and
[0378] (b) regererating a plant from said plant cell;
[0379] (c) growing the plant under conditions which permit the development of a plant with increased yield, e.g. with an increased yield-related trait, for example enhanced tolerance to abiotic environmental stress, for example an increased drought tolerance and/or low temperature tolerance and/or an increased nutrient use efficiency, intrinsic yield and/or another increased yield-related trait as compared to a corresponding, e.g. non-transformed, wild type plant.

[0380] Accordingly, in a further embodiment, in said method for producing a transgenic plant with increased yield said activity is increased or generating by increasing or generating the activity of a protein as shown in table II, column 3 encoded by the nucleic acid sequences as shown in table I, column 5 or 7,
[0381] (a1) in an organelle of a plant through the transformation of the organelle indicated in column 6 for said activity, or
[0382] (a2) in the plastid of a plant, or in one or more parts thereof, through the transformation of the plastids, if indicated in column 6 for said activity;
[0383] (a3) in the chloroplast of a plant, or in one or more parts thereof, through the transformation of the chloroplast, if indicated in column 6 for said activity,
[0384] (a4) in the mitochondrion of a plant, or in one or more parts thereof, through the transformation of the mitochondrion, if indicated in column 6 for said activity.

[0385] According to the disclosure of the invention, especially in the examples, the skilled worker is able to link transit peptide nucleic acid sequences to the nucleic acid sequences shown in table I, columns 5 and 7, e.g. for the nucleic acid molecules for which in column 6 of table I the term “plastidic” is indicated.

[0386] Any transit peptide may be used in accordance with the various embodiments of the present invention. For example, specificucleic acid sequences are encoding transit peptides are disclosed by von Heijne et al. (Plant Molecular Biology Reporter, 9 (2), 104, (1991)) or other transit peptides are disclosed by Schmidt et al. (J. Biol. Chem. 268 (36), 27447 (1993)), Della-Cioppa et al. (Plant. Physiol. 84, 965 (1987)), de Castro Silva Filho et al. (Plant Mol. Biol. 30, 769 (1996)), Zhao et al. (J. Biol. Chem. 270 (11), 6081 (1995)), Römer et al. (Biochem. Biophys. Res. Commun. 196 (3), 1414 (1993)), Keegstra et al. (Annu. Rev. Plant Physiol. Plant Mol. Biol. 40, 471 (1989)), Lubben et al. (Photosynthesis Res. 17, 173 (1988)) and Lawrence et al. (J. Biol. Chem. 272 (33), 20357 (1997))), which are hereby incorporated by reference. A general review about targeting is disclosed by Kermode Allison R. in Critical Reviews in Plant Science 15 (4), 285 (1996) under the title “Mechanisms of Intracellular Protein Transport and Targeting in Plant Cells.”.

[0387] Additional nucleic acid sequences encoding a transit peptide can be isolated from any organism such as microorganisms such as algae or plants containing plastids, preferably containing chloroplasts. A “transit peptide” is an amino acid sequence, whose encoding nucleic acid sequence is translated together with the corresponding structural gene. That means the transit peptide is an integral part of the translated protein and forms an amino terminal extension of the protein. Both are translated as so called “pre-protein”. In general the transit peptide is cleaved off from the pre-protein during or just after import of the protein into the correct cell organelle such as a plastid to yield the mature protein. The transit peptide ensures correct localization of the mature protein by facilitating the transport of proteins through intracellular membranes.

[0388] For example, such transit peptides, which are beneficially used in the inventive process, are derived from the nucleic acid sequence encoding a protein selected from the group consisting of ribulose bisphosphate carboxylase/oxygenase, 5-enolpyruvyl-shikimate-3-phosphate synthase, acetolactate synthase, chloroplast ribosomal protein CS17, Cs protein, ferredoxin, plastocyanin, ribulose bisphosphate carboxylase activase, tryptophan synthase, acyl carrier protein, plastid chaperonin-60, cytochrome c_{552, 22}-kDA heat shock protein, 33-kDa Oxygen-evolving enhancer protein 1, ATP synthase y subunit, ATP synthase 6 subunit, chlorophyll-a/b-binding proteinI1-1, Oxygen-evolving enhancer protein 2, Oxygen-evolving enhancer protein 3, photosystem I: P21, photosystem I: P28, photosystem I: P30, photosystem I: P35, photosystem I: P37, glycerol-3-phosphate acyltransferases, chlorophyll a/b binding protein, CAB2 protein, hydroxymethyl-bilane synthase, pyruvateorthophosphate dikinase, CAB3 protein, plastid ferritin, ferritin, early light-inducible protein, glutamate-1-semialdehyde aminotransferase, protochlorophyllide reductase, starchgranule-bound amylase synthase, light-harvesting chlorophyll a/b-binding protein of photosystem II, major pollen allergen Lol p 5a, plastid CIpB ATP-dependent protease, superoxide dismutase, ferredoxin NADP oxidoreductase, 28-kDa ribonucleoprotein, 31-kDa ribonucleoprotein, 33-kDa ribonucleoprotein, acetolactate synthase, ATP synthase CF₀ subunit 1, ATP synthase CF₀ subunit 2, ATP synthase CF₀ subunit 3, ATP synthase CF₀ subunit 4, cytochrome f, ADP-glucose pyrophosphorylase, glutamine synthase, glutamine synthase 2, carbonic anhydrase, GapA protein, heat-shock-protein hsp21, phosphate translocator, plastid ClpA ATP-dependent protease, plastid ribosomal protein CL24, plastid ribosomal protein CL9, plastid ribosomal protein PsCL18, plastid ribosomal protein PsCL25, DAHP synthase, starch phosphorylase, root acyl carrier protein II, betaine-aldehyde dehydrogenase, GapB protein, glutamine synthetase 2, phosphoribulokinase, nitrite reductase, ribosomal protein L12, ribosomal protein L13, ribosomal protein L21, ribosomal protein L35, ribosomal protein L40, triose phosphate-3-phosphoglyerate-phosphate translocator, ferredoxin-dependent glutamate synthase, glyceraldehyde-3-phosphate dehydrogenase, NADP-dependent malic enzyme and NADP-malate dehydrogenase, chloroplast 30S ribosomal protein PSrp-1, and the like.

[0389] The skilled worker will recognize that various other nucleic acid sequences encoding transit peptides can easily isolated from plastid-localized proteins, which are expressed from nuclear genes as precursors and are then targeted to plastids. Nucleic acid sequences encoding a transit peptide can be isolated from organelle-targeted proteins from any organism. Preferably, the transit peptide is isolated from an organism selected from the group consisting of the genera Acetabularia, Arabidopsis, Brassica, Capsicum, Chlamydomonas, Cururbita, Dunaliella, Euglena, Flayeria, Glycine, Helianthus, Hordeum, Lemna, Lolium, Lycopersion, Malus, Medicago, Mesembryanthemum, Nicotiana, Oenotherea, Oryza, Petunia, Phaseolus, Physcomitrella, Pinus, Pisum, Raphanus, Silene, Sinapis, Solanum, Spinacea, Stevia, Synechococcus, Triticum and Zea. More preferably, the nucleic acid sequence encoding the transit peptide is isolated from an organism selected from the group consisting of the species Acetabularia mediterranea, Arabidopsis thaliana, Brassica campestris, Brassica napus, Capsicum annuum, Chlamydomonas reinhardtii, Cururbita moschata, Dunaliella salina, Dunaliella tertiolecta, Euglena gracilis, Flayeria trinervia, Glycine max, Helianthus annuus, Hordeum vulgare, Lemna gibba, Lolium perenne, Lycopersion esculentum, Malus domestica, Medicago falcata, Medicago sativa, Mesembryanthemum crystallinum, Nicotiana plumbaginifolia, Nicotiana sylvestris, Nicotiana tabacum, Oenotherea hookeri, Oryza sativa, Petunia hybrida, Phaseolus vulgaris, Physcomitrella patens, Pinus tunbergii, Pisum sativum, Raphanus sativus, Silene pratensis, Sinapis alba, Solanum tuberosum, Spinacea oleracea, Stevia rebaudiana, Synechococcus, Synechocystis, Triticum aestivum and Zea mays. Alternatively, nucleic acid sequences coding for transit peptides may be chemically synthesized either in part or wholly according to structure of transit peptide sequences disclosed in the prior art.

[0390] Such transit peptides encoding sequences can be used for the construction of other expression constructs. The transit peptides advantageously used in the inventive process and which are part of the inventive nucleic acid sequences and proteins are typically 20 to 120 amino acids, preferably 25 to 110, 30 to 100 or 35 to 90 amino acids, more preferably 40 to 85 amino acids and most preferably 45 to 80 amino acids in length and functions post-translational to direct the protein to the plastid preferably to the chloroplast. The nucleic acid sequences encoding such transit peptides are localized upstream of nucleic acid sequence encoding the mature protein. For the correct molecular joining of the transit peptide encoding nucleic acid and the nucleic acid encoding the protein to be targeted it is sometimes necessary to introduce additional base pairs at the joining position, which forms restriction enzyme recognition sequences useful for the molecular joining of the different nucleic acid molecules. This procedure might lead to very few additional amino acids at the N-terminal of the mature imported protein, which usually and preferably do not interfere with the protein function. In any case, the additional base pairs at the joining position which forms restriction enzyme recognition sequences have to be chosen with care, in order to avoid the formation of stop codons or codons which encode amino acids with a strong influence on protein folding, like e.g. proline. It is preferred that such additional codons encode small structural flexible amino acids such as glycine or alanine.

[0391] As mentioned above the nucleic acid sequence coding for a protein as shown in table II, column 3 or 5, and its homologs as disclosed in table I, column 7 can be joined to a nucleic acid sequence encoding a transit peptide, e.g. if for the nucleic acid molecule in column 6 of table I the term “plastidic” is indicated. The nucleic acid sequence of the gene to be expressed and the nucleic acid sequence encoding the transit peptide are operably linked. Therefore the transit peptide is fused in frame to the nucleic acid sequence coding for a protein as shown in table II, column 3 or 5 and its homologs as disclosed in table I, column 7, e.g. if for the nucleic acid molecule in column 6 of table I the term “plastidic” is indicated.

[0392] The proteins translated from said inventive nucleic acid sequences are a kind of fusion proteins that means the nucleic acid sequences encoding the transit peptide, for example the ones shown in table V, for example the last one of the table, are joint to a gene, e.g. the nucleic acid sequences shown in table I, columns 5 and 7, e.g. if for the nucleic acid molecule in column 6 of table I the term “plastidic” is indicated. The person skilled in the art is able to join said sequences in a functional manner. Advantageously the transit peptide part is cleaved off from the protein part shown in table II, columns 5 and 7, during the transport preferably into the plastids. All products of the cleavage of the preferred transit peptide shown in the last line of table V have preferably the N-terminal amino acid sequences QIA CSS or QIA EFQLTT in front of the start methionine of the protein mentioned in table II, columns 5 and 7. Other short amino acid sequences of an range of 1 to 20 amino acids preferable 2 to 15 amino acids, more preferable 3 to 10 amino acids most preferably 4 to 8 amino acids are also possible in front of the start methionine of the gene, e.g. the protein mentioned in table II, columns 5 and 7. In case of the amino acid sequence QIA CSS the three amino acids in front of the start methionine are stemming from the LIC (=ligation independent cloning) cassette. Said short amino acid sequence is preferred in the case of the expression of Escherichia coli genes. In case of the amino acid sequence QIA EFQLTT the six amino acids in front of the start methionine are stemming from the LIC cassette. Said short amino acid sequence is preferred in the case of the expression of S. cerevisiae genes. The skilled worker knows that other short sequences are also useful in the expression of the genes mentioned in table I, columns 5 and 7. Furthermore the skilled worker is aware of the fact that there is not a need for such short sequences in the expression of the genes.

[0393] Alternatively to the targeting of the gene, e.g. proteins having the sequences shown in table II, columns 5 and 7, preferably of sequences in general encoded in the nucleus with the aid of the targeting sequences mentioned for example in table V alone or in combination with other targeting sequences preferably into the plastids, the nucleic acids of the invention can directly be introduced into the plastidic genome, e.g. for which in column 6 of table II the term “plastidic” is indicated. Therefore in a preferred embodiment the gene, e.g. the nucleic acid sequences shown in table I, columns 5 and 7 are directly introduced and expressed in plastids, particularly if in column 6 of table I the term “plastidic” is indicated

[0394] By transforming the plastids the intraspecies specific transgene flow is blocked, because a lot of species such as corn, cotton and rice have a strict maternal inheritance of plastids. By placing the gene, e.g. the genes specified in table I, columns 5 and 7, e.g. if for the nucleic acid molecule in column 6 of table I the term “plastidic” is indicated, or active fragments thereof in the plastids of plants, these genes will not be present in the pollen of said plants.

[0395] In another embodiment of the invention the gene, e.g. the nucleic acid molecules as shown in table I, columns 5 and 7, e.g. if in column 6 of table I the term “mitochondric” is indicated, used in the inventive process are transformed into mitochondria, which are metabolic active.

[0396] For a good expression in the plastids the gene, e.g. the nucleic acid sequences as shown in table I, columns 5 and 7, e.g. if in column 6 of table I the term “plastidic” is indicated, are introduced into an expression cassette using a preferably a promoter and terminator, which are active in plastids, preferably a chloroplast promoter. Examples of such promoters include the psbA promoter from the gene from spinach or pea, the rbcL promoter, and the atpB promoter from corn.

[0397] In one embodiment, the process of the present invention comprises one or more of the following steps:
[0398] (a) stabilizing a protein conferring the increased expression of a protein encoded by the nucleic acid molecule of the invention or of the polypeptide of the invention having the herein-mentioned activity selected from the group consisting of 2-oxoglutarate-dependent dioxygenase, 3-ketoacyl-CoA thiolase, 3′-phosphoadenosine 5′-phosphate phosphatase, 4-diphosphocytidyl-2-C-methyl-D-erythritol kinase, 50S chloroplast ribosomal protein L21, 57972199.R01.1-protein, 60952769.R01.1-protein, 60S ribosomal protein, ABC transporter family protein, AP2 domain-containing transcription factor, argonaute protein, AT1G29250.1-protein, AT1G53885-protein, AT2G35300-protein, AT3G04620-protein, AT4G01870-protein, AT5G42380-protein, AT5G47440-protein, CDS5394-protein, CDS5401_TRUNCATED-protein, cold response protein, cullin, Cytochrome P450, delta-8 sphingolipid desaturase, galactinol synthase, glutathione-S-transferase, GTPase, haspin-related protein, heat shock protein, heat shock transcription factor, histone H2B, jasmonate-zim-domain protein, mitochondrial asparaginyl-tRNA synthetase, Oligosaccharyltransferase, OS02G44730-protein, Oxygen-evolving enhancer protein, peptidyl-prolyl cis-trans isomerase, peptidyl-prolyl cis-trans isomerase family protein, plastid lipid-associated protein, Polypyrimidine tract binding protein, PRLI-interacting factor, protein kinase, protein kinase family protein, rubisco subunit binding-protein beta subunit, serine acetyltransferase, serine hydroxymethyltransferase, small heat shock protein, S-ribosylhomocysteinase, sugar transporter, Thioredoxin H-type, ubiquitin-conjugating enzyme, ubiquitin-protein ligase, universal stress protein family protein, and Vacuolar protein and conferring increased yield, e.g. increasing a yield-related trait, for example enhanced tolerance to abiotic environmental stress, for example an increased drought tolerance and/or low temperature tolerance and/or an increased nutrient use efficiency, intrinsic yield and/or another mentioned yield-related trait as compared to a corresponding, e.g. non-transformed, wild type plant cell, plant or part thereof;
[0399] (b) stabilizing an mRNA conferring the increased expression of a polynucleotide encoding a polypeptide as mentioned in (a);
[0400] (c) increasing the specific activity of a protein conferring the increased expression of a polypeptide as mentioned in (a);
[0401] (d) generating or increasing the expression of an endogenous or artificial transcription factor mediating the expression of a protein conferring the increased expression of a polypeptide as mentioned in (a);
[0402] (e) stimulating activity of a protein conferring the increased expression of a polypeptide as mentioned in (a), by adding one or more exogenous inducing factors to the organism or parts thereof;
[0403] (f) expressing a transgenic gene encoding a protein conferring the increased expression of a polypeptide as mentioned in (a); and/or
[0404] (g) increasing the copy number of a gene conferring the increased expression of a nucleic acid molecule encoding a polypeptide as mentioned in (a);
[0405] (h) increasing the expression of the endogenous gene encoding a polypeptide as mentioned in (a) by adding positive expression or removing negative expression elements, e.g. homologous recombination can be used to either introduce positive regulatory elements like for plants the 35S enhancer into the promoter or to remove repressor elements form regulatory regions. Further gene conversion methods can be used to disrupt repressor elements or to enhance to activity of positive elements-positive elements can be randomly introduced in plants by T-DNA or transposon mutagenesis and lines can be identified in which the positive elements have been integrated near to a gene of the invention, the expression of which is thereby enhanced; and/or
[0406] (i) modulating growth conditions of the plant in such a manner, that the expression or activity of the gene encoding a polypeptide as mentioned in (a), or the protein itself is enhanced;
[0407] (j) selecting of organisms with especially high activity of a polypeptide as mentioned in (a) from natural or from mutagenized resources and breeding them into the target or ganisms, e.g. the elite crops.

[0408] Preferably, said mRNA is encoded by the nucleic acid molecule of the present invention and/or the protein conferring the increased expression of a protein encoded by the nucleic acid molecule of the present invention alone or linked to a transit nucleic acid sequence or transit peptide encoding nucleic acid sequence or the polypeptide having the herein mentioned activity, e.g. conferring with increased yield, e.g. with an increased yield-related trait, for example enhanced tolerance to abiotic environmental stress, for example an increased drought tolerance and/or low temperature tolerance and/or an increased nutrient use efficiency, intrinsic yield and/or another mentioned yield-related trait as compared to a corresponding, e.g. non-transformed, wild type plant cell, plant or part thereof after increasing the expression or activity of the encoded polypeptide or having the activity of a polypeptide having an activity as the protein as shown in table II column 3 or its homologs.

[0409] In general, the amount of mRNA or polypeptide in a cell or a compartment of an organism correlates with the amount of encoded protein and thus with the overall activity of the encoded protein in said volume. Said correlation is not always linear, the activity in the volume is dependent on the stability of the molecules or the presence of activating or inhibiting co-factors. The activity of the abovementioned proteins and/or polypeptides encoded by the nucleic acid molecule of the present invention can be increased in various ways. For example, the activity in an organism or in a part thereof, like a cell, is increased via increasing the gene product number, e.g. by increasing the expression rate, like introducing a stronger promoter, or by increasing the stability of the mRNA expressed, thus increasing the translation rate, and/or increasing the stability of the gene product, thus reducing the proteins decayed. Further, the activity or turnover of enzymes can be influenced in such a way that a reduction or increase of the reaction rate or a modification (reduction or increase) of the affinity to the substrate results, is reached. A mutation in the catalytic centre of an polypeptide of the invention, e.g. as enzyme, can modulate the turn over rate of the enzyme, e.g. a knock out of an essential amino acid can lead to a reduced or completely knock out activity of the enzyme, or the deletion or mutation of regulator binding sites can reduce a negative regulation like a feedback inhibition (or a substrate inhibition, if the substrate level is also increased). The specific activity of an enzyme of the present invention can be increased such that the turn over rate is increased or the binding of a co-factor is improved. Improving the stability of the encoding mRNA or the protein can also increase the activity of a gene product. The stimulation of the activity is also under the scope of the term “increased activity”.

[0410] Moreover, the regulation of the abovementioned nucleic acid sequences may be modified so that gene expression is increased. This can be achieved advantageously by means of heterologous regulatory sequences or by modifying, for example mutating, the natural regulatory sequences which are present. The advantageous methods may also be combined with each other.

[0411] In general, an activity of a gene product in an organism or part thereof, in particular in a plant cell or organelle of a plant cell, a plant, or a plant tissue or a part thereof or in a microorganism can be increased by increasing the amount of the specific encoding mRNA or the corresponding protein in said organism or part thereof.

[0412] A modification, i.e. an increase, can be caused by endogenous or exogenous factors. For example, an increase in activity in an organism or a part thereof can be caused by adding a gene product or a precursor or an activator or an agonist to the media or nutrition or can be caused by introducing said subjects into a organism, transient or stable. Furthermore such an increase can be reached by the introduction of the inventive nucleic acid sequence or the encoded protein in the correct cell compartment for example into the nucleus or cytoplasm respectively or into plastids either by transformation and/or targeting.

[0413] In one embodiment the increased yield, e.g. increased yield-related trait, for example enhanced tolerance to abiotic environmental stress, for example an increased drought tolerance and/or low temperature tolerance and/or an increased nutrient use efficiency, intrinsic yield and/or another mentioned yield-related trait as compared to a corresponding, e.g. non-transformed, wild type plant cell in the plant or a part thereof, e.g. in a cell, a tissue, a organ, an organelle, the cytoplasm etc., is achieved by increasing the endogenous level of the polypeptide of the invention.

[0414] Accordingly, in an embodiment of the present invention, the present invention relates to a process wherein the gene copy number of a gene encoding the polynucleotide or nucleic acid molecule of the invention is increased. Further, the endogenous level of the polypeptide of the invention can for example be increased by modifying the transcriptional or translational regulation of the polypeptide.

[0415] In one embodiment the increased yield, e.g. increased yield-related trait, for example enhanced tolerance to abiotic environmental stress, for example an increased drought tolerance and/or low temperature tolerance and/or an increased nutrient use efficiency, intrinsic yield and/or another mentioned yield-related trait of the plant or part thereof can be altered by targeted or random mutagenesis of the endogenous genes of the invention. For example homologous recombination can be used to either introduce positive regulatory elements like for plants the 35S enhancer into the promoter or to remove repressor elements form regulatory regions. In addition gene conversion like methods described by Kochevenko and Willmitzer (Plant Physiol. 132 (1), 174 (2003)) and citations therein can be used to disrupt repressor elements or to enhance to activity of positive regulatory elements.

[0416] Furthermore positive elements can be randomly introduced in (plant) genomes by T-DNA or transposon mutagenesis and lines can be screened for, in which the positive elements have been integrated near to a gene of the invention, the expression of which is thereby enhanced. The activation of plant genes by random integrations of enhancer elements has been described by Hayashi et al. (Science 258,1350 (1992)) or Weigel et al. (Plant Physiol. 122, 1003 (2000)) and others recited therein. The enhancement of positive regulatory elements or the disruption or weakening of negative regulatory elements can also be achieved through common mutagenesis techniques: The production of chemically or radiation mutated populations is a common technique and known to the skilled worker. Methods for plants are described by Koorneef et al. (Mutat Res. Mar. 93 (1) (1982)) and the citations therein and by Lightner and Caspar in “Methods in Molecular Biology” Vol. 82. These techniques usually induce point mutations that can be identified in any known gene using methods such as TILLING (Colbert et al., Plant Physiol, 126, (2001)).

[0417] Accordingly, the expression level can be increased if the endogenous genes encoding a polypeptide conferring an increased expression of the polypeptide of the present invention, in particular genes comprising the nucleic acid molecule of the present invention, are modified via homologous recombination, Tilling approaches or gene conversion. It also possible to add as mentioned herein targeting sequences to the inventive nucleic acid sequences.

[0418] Regulatory sequences, if desired, in addition to a target sequence or part thereof can be operatively linked to the coding region of an endogenous protein and control its transcription and translation or the stability or decay of the encoding mRNA or the expressed protein. In order to modify and control the expression, promoter, UTRs, splicing sites, processing signals, polyadenylation sites, terminators, enhancers, repressors, post transcriptional or posttranslational modification sites can be changed, added or amended. For example, the activation of plant genes by random integrations of enhancer elements has been described by Hayashi et al. (Science 258, 1350 (1992)) or Weigel et al. (Plant Physiol. 122, 1003 (2000)) and others recited therein. For example, the expression level of the endogenous protein can be modulated by replacing the endogenous promoter with a stronger transgenic promoter or by replacing the endogenous 3′UTR with a 3′UTR, which provides more stability without amending the coding region. Further, the transcriptional regulation can be modulated by introduction of an artificial transcription factor as described in the examples. Alternative promoters, terminators and UTR are described below.

[0419] The activation of an endogenous polypeptide having above-mentioned activity, e.g. having the activity of a protein as shown in table II, column 3 or of the polypeptide of the invention, e.g. conferring increased yield, e.g. increased yield-related trait, for example enhanced tolerance to abiotic environmental stress, for example an increased drought tolerance and/or low temperature tolerance and/or an increased nutrient use efficiency, intrinsic yield and/or another mentioned yield-related trait as compared to a corresponding, e.g. non-transformed, wild type plant cell, plant or part thereof after increase of expression or activity in the cytoplasm and/or in an organelle like a plastid, can also be increased by introducing a synthetic transcription factor, which binds close to the coding region of the gene encoding the protein as shown in table II, column 3 and activates its transcription.

[0420] In one further embodiment of the process according to the invention, organisms are used in which one of the abovementioned genes, or one of the abovementioned nucleic acids, is mutated in a way that the activity of the encoded gene products is less influenced by cellular factors, or not at all, in comparison with the not mutated proteins. For example, well known regulation mechanism of enzyme activity are substrate inhibition or feed back regulation mechanisms. Ways and techniques for the introduction of substitution, deletions and additions of one or more bases, nucleotides or amino acids of a corresponding sequence are described herein below in the corresponding paragraphs and the references listed there, e.g. in Sambrook et al., Molecular Cloning, Cold Spring Harbour, N.Y., 1989. The person skilled in the art will be able to identify regulation domains and binding sites of regulators by comparing the sequence of the nucleic acid molecule of the present invention or the expression product thereof with the state of the art by computer software means which comprise algorithms for the identifying of binding sites and regulation domains or by introducing into a nucleic acid molecule or in a protein systematically mutations and assaying for those mutations which will lead to an increased specific activity or an increased activity per volume, in particular per cell.

[0421] It can therefore be advantageous to express in an organism a nucleic acid molecule of the invention or a polypeptide of the invention derived from a evolutionary distantly related organism, as e.g. using a prokaryotic gene in a eukaryotic host, as in these cases the regulation mechanism of the host cell may not weaken the activity (cellular or specific) of the gene or its expression product.

[0422] The mutation is introduced in such a way that increased yield, e.g. increased yield-related trait, for example enhanced tolerance to abiotic environmental stress, for example an increased drought tolerance and/or low temperature tolerance and/or an increased nutrient use efficiency, intrinsic yield and/or another mentioned yield-related trait are not adversely affected.

[0423] The invention provides that the above methods can be performed such that enhanced tolerance to abiotic environmental stress, for example drought tolerance and/or low temperature tolerance and/or nutrient use efficiency, intrinsic yield and/or another mentioned yield-related traits increased, wherein particularly the tolerance to low temperature is increased.

[0424] The invention is not limited to specific nucleic acids, specific polypeptides, specific cell types, specific host cells, specific conditions or specific methods etc. as such, but may vary and numerous modifications and variations therein will be apparent to those skilled in the art. It is also to be understood that the terminology used herein is for the purpose of describing specific embodiments only and is not intended to be limiting.

[0425] Further, “proteins are generally composed of one or more functional regions, commonly termed domains. Different combinations of domains give rise to the diverse range of proteins found in nature. The identification of domains that occur within proteins can therefore provide insights into their function. Pfam-A entries are high quality, manually curated families. The Pfam database is a large collection of protein families, each represented by multiple sequence alignments and hidden Markov models (HMMs).” (see: The Pfam protein families database: R. D. Finn, et al., Nucleic Acids Research (2010), Database Issue 38:D211-222). The Pfam protein families database is a large collection of more than ten thousand protein families and is available under http://pfam.sanger.ac.uk/. Profile Hidden Markov Models (HMMs) are flexible, probabilistic models that can be used to describe the consensus patterns shared by sets of homologous protein/domain sequences. HMMs in the Pfam database are constructed from an alignment of a representative set of sequences for each protein domain, called a seed alignment.

The Pfam domains listed in the present application refer to Pfam 24.0 (released October 2009, containing 11912 families).

[0426] Accordingly, the present invention relates to a nucleic acid molecule encoding a polypeptide comprising one or more of the Pfam domains PF01789.9 for the production of a plant with increased yield as described herein. The invention also relates to the polypeptide encoded by said nucleic acid molecule.

[0427] Accordingly, the present invention relates to a nucleic acid molecule encoding a polypeptide which is 50% or more, preferably 60%, 70%, or 75%, more preferably 80%, 85%, 90%, or 95%, even more preferred 96%, 97%, 98%, 99% or more and most preferred 100% identical to the polypeptide of SEQ ID NO.: 385 comprising one or more of the Pfam domains selected from the group consitists of: PF01789.9, and conferring the increase of the yield of a plant as described herein. The invention also relates to the polypeptide encoded by said polynucleotide.

[0428] Further, the present invention relates to a nucleic acid molecule encoding a polypeptide comprising the consensus sequence of the homologs of the polypeptide of SEQ ID NO.: 385, i.e. as shown in column 7 of table IV, and said polypeptide comprising further one or more of the Pfam domains PF01789.9, and the polypeptide's expression is conferring the increase of the yield of a plant.

[0429] Accordingly, the present invention relates to a nucleic acid molecule encoding a polypeptide comprising one or more of the Pfam domains PF03171.13 for the production of a plant with increased yield as described herein. The invention also relates to the polypeptide encoded by said nucleic acid molecule.

[0430] Accordingly, the present invention relates to a nucleic acid molecule encoding a polypeptide which is 50% or more, preferably 60%, 70%, or 75%, more preferably 80%, 85%, 90%, or 95%, even more preferred 96%, 97%, 98%, 99% or more and most preferred 100% identical to the polypeptide of SEQ ID NO.: 505 comprising one or more of the Pfam domains selected from the group consitists of: PF03171.13, and conferring the increase of the yield of a plant as described herein. The invention also relates to the polypeptide encoded by said polynucleotide.

[0431] Further, the present invention relates to a nucleic acid molecule encoding a polypeptide comprising the consensus sequence of the homologs of the polypeptide of SEQ ID NO.: 505, i.e. as shown in column 7 of table IV, and said polypeptide comprising further one or more of the Pfam domains PF03171.13, and the polypeptide's expression is conferring the increase of the yield of a plant.

[0432] Accordingly, the present invention relates to a nucleic acid molecule encoding a polypeptide comprising one or more of the Pfam domains PF00160.14 for the production of a plant with increased yield as described herein. The invention also relates to the polypeptide encoded by said nucleic acid molecule.

[0433] Accordingly, the present invention relates to a nucleic acid molecule encoding a polypeptide which is 50% or more, preferably 60%, 70%, or 75%, more preferably 80%, 85%, 90%, or 95%, even more preferred 96%, 97%, 98%, 99% or more and most preferred 100% identical to the polypeptide of SEQ ID NO.: 673 comprising one or more of the Pfam domains selected from the group consitists of: PF00160.14, and conferring the increase of the yield of a plant as described herein. The invention also relates to the polypeptide encoded by said polynucleotide.

[0434] Further, the present invention relates to a nucleic acid molecule encoding a polypeptide comprising the consensus sequence of the homologs of the polypeptide of SEQ ID NO.: 673, i.e. as shown in column 7 of table IV, and said polypeptide comprising further one or more of the Pfam domains PF00160.14, and the polypeptide's expression is conferring the increase of the yield of a plant.

[0435] Accordingly, the present invention relates to a nucleic acid molecule encoding a polypeptide comprising one or more of the Pfam domains PF05703.4 and PF08458.3 for the production of a plant with increased yield as described herein. The invention also relates to the polypeptide encoded by said nucleic acid molecule.

[0436] Accordingly, the present invention relates to a nucleic acid molecule encoding a polypeptide which is 50% or more, preferably 60%, 70%, or 75%, more preferably 80%, 85%, 90%, or 95%, even more preferred 96%, 97%, 98%, 99% or more and most preferred 100% identical to the polypeptide of SEQ ID NO.: 1629 comprising one or more of the Pfam domains selected from the group consitists of: PF05703.4 and PF08458.3, and conferring the increase of the yield of a plant as described herein. The invention also relates to the polypeptide encoded by said polynucleotide.

[0437] Further, the present invention relates to a nucleic acid molecule encoding a polypeptide comprising the consensus sequence of the homologs of the polypeptide of SEQ ID NO.: 1629, i.e. as shown in column 7 of table IV, and said polypeptide comprising further one or more of the Pfam domains PF05703.4 and PF08458.3, and the polypeptide's expression is conferring the increase of the yield of a plant.

[0438] Accordingly, the present invention relates to a nucleic acid molecule encoding a polypeptide comprising one or more of the Pfam domains PF00288.19 for the production of a plant with increased yield as described herein. The invention also relates to the polypeptide encoded by said nucleic acid molecule.

[0439] Accordingly, the present invention relates to a nucleic acid molecule encoding a polypeptide which is 50% or more, preferably 60%, 70%, or 75%, more preferably 80%, 85%, 90%, or 95%, even more preferred 96%, 97%, 98%, 99% or more and most preferred 100% identical to the polypeptide of SEQ ID NO.: 1710 comprising one or more of the Pfam domains selected from the group consitists of: PF00288.19, and conferring the increase of the yield of a plant as described herein. The invention also relates to the polypeptide encoded by said polynucleotide.

[0440] Further, the present invention relates to a nucleic acid molecule encoding a polypeptide comprising the consensus sequence of the homologs of the polypeptide of SEQ ID NO.: 1710, i.e. as shown in column 7 of table IV, and said polypeptide comprising further one or more of the Pfam domains PF00288.19, and the polypeptide's expression is conferring the increase of the yield of a plant.

[0441] Accordingly, the present invention relates to a nucleic acid molecule encoding a polypeptide comprising one or more of the Pfam domains PF00459.18 for the production of a plant with increased yield as described herein. The invention also relates to the polypeptide encoded by said nucleic acid molecule.

[0442] Accordingly, the present invention relates to a nucleic acid molecule encoding a polypeptide which is 50% or more, preferably 60%, 70%, or 75%, more preferably 80%, 85%, 90%, or 95%, even more preferred 96%, 97%, 98%, 99% or more and most preferred 100% identical to the polypeptide of SEQ ID NO.: 2227 comprising one or more of the Pfam domains selected from the group consitists of: PF00459.18, and conferring the increase of the yield of a plant as described herein. The invention also relates to the polypeptide encoded by said polynucleotide.

[0443] Further, the present invention relates to a nucleic acid molecule encoding a polypeptide comprising the consensus sequence of the homologs of the polypeptide of SEQ ID NO.: 2227, i.e. as shown in column 7 of table IV, and said polypeptide comprising further one or more of the Pfam domains PF00459.18, and the polypeptide's expression is conferring the increase of the yield of a plant.

[0444] Accordingly, the present invention relates to a nucleic acid molecule encoding a polypeptide comprising one or more of the Pfam domains PF00108.16 and PF02803.11 for the production of a plant with increased yield as described herein. The invention also relates to the polypeptide encoded by said nucleic acid molecule.

[0445] Accordingly, the present invention relates to a nucleic acid molecule encoding a polypeptide which is 50% or more, preferably 60%, 70%, or 75%, more preferably 80%, 85%, 90%, or 95%, even more preferred 96%, 97%, 98%, 99% or more and most preferred 100% identical to the polypeptide of SEQ ID NO.: 2458 comprising one or more of the Pfam domains selected from the group consitists of: PF00108.16 and PF02803.11, and conferring the increase of the yield of a plant as described herein. The invention also relates to the polypeptide encoded by said polynucleotide.

[0446] Further, the present invention relates to a nucleic acid molecule encoding a polypeptide comprising the consensus sequence of the homologs of the polypeptide of SEQ ID NO.: 2458, i.e. as shown in column 7 of table IV, and said polypeptide comprising further one or more of the Pfam domains PF00108.16 and PF02803.11, and the polypeptide's expression is conferring the increase of the yield of a plant.

[0447] Accordingly, the present invention relates to a nucleic acid molecule encoding a polypeptide comprising one or more of the Pfam domains PF01246.13 for the production of a plant with increased yield as described herein. The invention also relates to the polypeptide encoded by said nucleic acid molecule.

[0448] Accordingly, the present invention relates to a nucleic acid molecule encoding a polypeptide which is 50% or more, preferably 60%, 70%, or 75%, more preferably 80%, 85%, 90%, or 95%, even more preferred 96%, 97%, 98%, 99% or more and most preferred 100% identical to the polypeptide of SEQ ID NO.: 3464 comprising one or more of the Pfam domains selected from the group consitists of: PF01246.13, and conferring the increase of the yield of a plant as described herein. The invention also relates to the polypeptide encoded by said polynucleotide.

[0449] Further, the present invention relates to a nucleic acid molecule encoding a polypeptide comprising the consensus sequence of the homologs of the polypeptide of SEQ ID NO.: 3464, i.e. as shown in column 7 of table IV, and said polypeptide comprising further one or more of the Pfam domains PF01246.13, and the polypeptide's expression is conferring the increase of the yield of a plant.

[0450] Accordingly, the present invention relates to a nucleic acid molecule encoding a polypeptide comprising one or more of the Pfam domains PF00464.12 for the production of a plant with increased yield as described herein. The invention also relates to the polypeptide encoded by said nucleic acid molecule.

[0451] Accordingly, the present invention relates to a nucleic acid molecule encoding a polypeptide which is 50% or more, preferably 60%, 70%, or 75%, more preferably 80%, 85%, 90%, or 95%, even more preferred 96%, 97%, 98%, 99% or more and most preferred 100% identical to the polypeptide of SEQ ID NO.: 3795 comprising one or more of the Pfam domains selected from the group consitists of: PF00464.12, and conferring the increase of the yield of a plant as described herein. The invention also relates to the polypeptide encoded by said polynucleotide.

[0452] Further, the present invention relates to a nucleic acid molecule encoding a polypeptide comprising the consensus sequence of the homologs of the polypeptide of SEQ ID NO.: 3795, i.e. as shown in column 7 of table IV, and said polypeptide comprising further one or more of the Pfam domains PF00464.12, and the polypeptide's expression is conferring the increase of the yield of a plant.

[0453] Accordingly, the present invention relates to a nucleic acid molecule encoding a polypeptide comprising one or more of the Pfam domains PF02664.8 for the production of a plant with increased yield as described herein. The invention also relates to the polypeptide encoded by said nucleic acid molecule.

[0454] Accordingly, the present invention relates to a nucleic acid molecule encoding a polypeptide which is 50% or more, preferably 60%, 70%, or 75%, more preferably 80%, 85%, 90%, or 95%, even more preferred 96%, 97%, 98%, 99% or more and most preferred 100% identical to the polypeptide of SEQ ID NO.: 4631 comprising one or more of the Pfam domains selected from the group consitists of: PF02664.8, and conferring the increase of the yield of a plant as described herein. The invention also relates to the polypeptide encoded by said polynucleotide.

[0455] Further, the present invention relates to a nucleic acid molecule encoding a polypeptide comprising the consensus sequence of the homologs of the polypeptide of SEQ ID NO.: 4631, i.e. as shown in column 7 of table IV, and said polypeptide comprising further one or more of the Pfam domains PF02664.8, and the polypeptide's expression is conferring the increase of the yield of a plant.

[0456] Accordingly, the present invention relates to a nucleic acid molecule encoding a polypeptide comprising one or more of the Pfam domains PF00071.15 for the production of a plant with increased yield as described herein. The invention also relates to the polypeptide encoded by said nucleic acid molecule.

[0457] Accordingly, the present invention relates to a nucleic acid molecule encoding a polypeptide which is 50% or more, preferably 60%, 70%, or 75%, more preferably 80%, 85%, 90%, or 95%, even more preferred 96%, 97%, 98%, 99% or more and most preferred 100% identical to the polypeptide of SEQ ID NO.: 5070 comprising one or more of the Pfam domains selected from the group consitists of: PF00071.15, and conferring the increase of the yield of a plant as described herein. The invention also relates to the polypeptide encoded by said polynucleotide.

[0458] Further, the present invention relates to a nucleic acid molecule encoding a polypeptide comprising the consensus sequence of the homologs of the polypeptide of SEQ ID NO.: 5070, i.e. as shown in column 7 of table IV, and said polypeptide comprising further one or more of the Pfam domains PF00071.15, and the polypeptide's expression is conferring the increase of the yield of a plant.

[0459] Accordingly, the present invention relates to a nucleic acid molecule encoding a polypeptide comprising one or more of the Pfam domains PF01918.14 for the production of a plant with increased yield as described herein. The invention also relates to the polypeptide encoded by said nucleic acid molecule.

[0460] Accordingly, the present invention relates to a nucleic acid molecule encoding a polypeptide which is 50% or more, preferably 60%, 70%, or 75%, more preferably 80%, 85%, 90%, or 95%, even more preferred 96%, 97%, 98%, 99% or more and most preferred 100% identical to the polypeptide of SEQ ID NO.: 5839 comprising one or more of the Pfam domains selected from the group consitists of: PF01918.14, and conferring the increase of the yield of a plant as described herein. The invention also relates to the polypeptide encoded by said polynucleotide.

[0461] Further, the present invention relates to a nucleic acid molecule encoding a polypeptide comprising the consensus sequence of the homologs of the polypeptide of SEQ ID NO.: 5839, i.e. as shown in column 7 of table IV, and said polypeptide comprising further one or more of the Pfam domains PF01918.14, and the polypeptide's expression is conferring the increase of the yield of a plant.

[0462] Accordingly, the present invention relates to a nucleic acid molecule encoding a polypeptide comprising one or more of the Pfam domains PF06426.7 for the production of a plant with increased yield as described herein. The invention also relates to the polypeptide encoded by said nucleic acid molecule.

[0463] Accordingly, the present invention relates to a nucleic acid molecule encoding a polypeptide which is 50% or more, preferably 60%, 70%, or 75%, more preferably 80%, 85%, 90%, or 95%, even more preferred 96%, 97%, 98%, 99% or more and most preferred 100% identical to the polypeptide of SEQ ID NO.: 5983 comprising one or more of the Pfam domains selected from the group consitists of: PF06426.7, and conferring the increase of the yield of a plant as described herein. The invention also relates to the polypeptide encoded by said polynucleotide.

[0464] Further, the present invention relates to a nucleic acid molecule encoding a polypeptide comprising the consensus sequence of the homologs of the polypeptide of SEQ ID NO.: 5983, i.e. as shown in column 7 of table IV, and said polypeptide comprising further one or more of the Pfam domains PF06426.7, and the polypeptide's expression is conferring the increase of the yield of a plant.

[0465] Accordingly, the present invention relates to a nucleic acid molecule encoding a polypeptide comprising one or more of the Pfam domains PF00125.17 for the production of a plant with increased yield as described herein. The invention also relates to the polypeptide encoded by said nucleic acid molecule.

[0466] Accordingly, the present invention relates to a nucleic acid molecule encoding a polypeptide which is 50% or more, preferably 60%, 70%, or 75%, more preferably 80%, 85%, 90%, or 95%, even more preferred 96%, 97%, 98%, 99% or more and most preferred 100% identical to the polypeptide of SEQ ID NO.: 6495 comprising one or more of the Pfam domains selected from the group consitists of: PF00125.17, and conferring the increase of the yield of a plant as described herein. The invention also relates to the polypeptide encoded by said polynucleotide.

[0467] Further, the present invention relates to a nucleic acid molecule encoding a polypeptide comprising the consensus sequence of the homologs of the polypeptide of SEQ ID NO.: 6495, i.e. as shown in column 7 of table IV, and said polypeptide comprising further one or more of the Pfam domains PF00125.17, and the polypeptide's expression is conferring the increase of the yield of a plant.

[0468] Accordingly, the present invention relates to a nucleic acid molecule encoding a polypeptide comprising one or more of the Pfam domains PF00069.18 for the production of a plant with increased yield as described herein. The invention also relates to the polypeptide encoded by said nucleic acid molecule.

[0469] Accordingly, the present invention relates to a nucleic acid molecule encoding a polypeptide which is 50% or more, preferably 60%, 70%, or 75%, more preferably 80%, 85%, 90%, or 95%, even more preferred 96%, 97%, 98%, 99% or more and most preferred 100% identical to the polypeptide of SEQ ID NO.: 7435 comprising one or more of the Pfam domains selected from the group consitists of: PF00069.18, and conferring the increase of the yield of a plant as described herein. The invention also relates to the polypeptide encoded by said polynucleotide.

[0470] Further, the present invention relates to a nucleic acid molecule encoding a polypeptide comprising the consensus sequence of the homologs of the polypeptide of SEQ ID NO.: 7435, i.e. as shown in column 7 of table IV, and said polypeptide comprising further one or more of the Pfam domains PF00069.18, and the polypeptide's expression is conferring the increase of the yield of a plant.

[0471] Accordingly, the present invention relates to a nucleic acid molecule encoding a polypeptide comprising one or more of the Pfam domains PF00847.13 for the production of a plant with increased yield as described herein. The invention also relates to the polypeptide encoded by said nucleic acid molecule.

[0472] Accordingly, the present invention relates to a nucleic acid molecule encoding a polypeptide which is 50% or more, preferably 60%, 70%, or 75%, more preferably 80%, 85%, 90%, or 95%, even more preferred 96%, 97%, 98%, 99% or more and most preferred 100% identical to the polypeptide of SEQ ID NO.: 7514 comprising one or more of the Pfam domains selected from the group consitists of: PF00847.13, and conferring the increase of the yield of a plant as described herein. The invention also relates to the polypeptide encoded by said polynucleotide.

[0473] Further, the present invention relates to a nucleic acid molecule encoding a polypeptide comprising the consensus sequence of the homologs of the polypeptide of SEQ ID NO.: 7514, i.e. as shown in column 7 of table IV, and said polypeptide comprising further one or more of the Pfam domains PF00847.13, and the polypeptide's expression is conferring the increase of the yield of a plant.

[0474] Accordingly, the present invention relates to a nucleic acid molecule encoding a polypeptide comprising one or more of the Pfam domains PF03345.7 for the production of a plant with increased yield as described herein. The invention also relates to the polypeptide encoded by said nucleic acid molecule.

[0475] Accordingly, the present invention relates to a nucleic acid molecule encoding a polypeptide which is 50% or more, preferably 60%, 70%, or 75%, more preferably 80%, 85%, 90%, or 95%, even more preferred 96%, 97%, 98%, 99% or more and most preferred 100% identical to the polypeptide of SEQ ID NO.: 7546 comprising one or more of the Pfam domains selected from the group consitists of: PF03345.7, and conferring the increase of the yield of a plant as described herein. The invention also relates to the polypeptide encoded by said polynucleotide.

[0476] Further, the present invention relates to a nucleic acid molecule encoding a polypeptide comprising the consensus sequence of the homologs of the polypeptide of SEQ ID NO.: 7546, i.e. as shown in column 7 of table IV, and said polypeptide comprising further one or more of the Pfam domains PF03345.7, and the polypeptide's expression is conferring the increase of the yield of a plant.

[0477] Accordingly, the present invention relates to a nucleic acid molecule encoding a polypeptide comprising one or more of the Pfam domains PF04755.5 for the production of a plant with increased yield as described herein. The invention also relates to the polypeptide encoded by said nucleic acid molecule.

[0478] Accordingly, the present invention relates to a nucleic acid molecule encoding a polypeptide which is 50% or more, preferably 60%, 70%, or 75%, more preferably 80%, 85%, 90%, or 95%, even more preferred 96%, 97%, 98%, 99% or more and most preferred 100% identical to the polypeptide of SEQ ID NO.: 8288 comprising one or more of the Pfam domains selected from the group consitists of: PF04755.5, and conferring the increase of the yield of a plant as described herein. The invention also relates to the polypeptide encoded by said polynucleotide.

[0479] Further, the present invention relates to a nucleic acid molecule encoding a polypeptide comprising the consensus sequence of the homologs of the polypeptide of SEQ ID NO.: 8288, i.e. as shown in column 7 of table IV, and said polypeptide comprising further one or more of the Pfam domains PF04755.5, and the polypeptide's expression is conferring the increase of the yield of a plant.

[0480] Accordingly, the present invention relates to a nucleic acid molecule encoding a polypeptide comprising one or more of the Pfam domains PF01501.13 for the production of a plant with increased yield as described herein. The invention also relates to the polypeptide encoded by said nucleic acid molecule.

[0481] Accordingly, the present invention relates to a nucleic acid molecule encoding a polypeptide which is 50% or more, preferably 60%, 70%, or 75%, more preferably 80%, 85%, 90%, or 95%, even more preferred 96%, 97%, 98%, 99% or more and most preferred 100% identical to the polypeptide of SEQ ID NO.: 7865 comprising one or more of the Pfam domains selected from the group consitists of: PF01501.13, and conferring the increase of the yield of a plant as described herein. The invention also relates to the polypeptide encoded by said polynucleotide.

[0482] Further, the present invention relates to a nucleic acid molecule encoding a polypeptide comprising the consensus sequence of the homologs of the polypeptide of SEQ ID NO.: 7865, i.e. as shown in column 7 of table IV, and said polypeptide comprising further one or more of the Pfam domains PF01501.13, and the polypeptide's expression is conferring the increase of the yield of a plant.

[0483] Accordingly, the present invention relates to a nucleic acid molecule encoding a polypeptide comprising one or more of the Pfam domains PF06200.7 for the production of a plant with increased yield as described herein. The invention also relates to the polypeptide encoded by said nucleic acid molecule.

[0484] Accordingly, the present invention relates to a nucleic acid molecule encoding a polypeptide which is 50% or more, preferably 60%, 70%, or 75%, more preferably 80%, 85%, 90%, or 95%, even more preferred 96%, 97%, 98%, 99% or more and most preferred 100% identical to the polypeptide of SEQ ID NO.: 8065 comprising one or more of the Pfam domains selected from the group consitists of: PF06200.7, and conferring the increase of the yield of a plant as described herein. The invention also relates to the polypeptide encoded by said polynucleotide.

[0485] Further, the present invention relates to a nucleic acid molecule encoding a polypeptide comprising the consensus sequence of the homologs of the polypeptide of SEQ ID NO.: 8065, i.e. as shown in column 7 of table IV, and said polypeptide comprising further one or more of the Pfam domains PF06200.7, and the polypeptide's expression is conferring the increase of the yield of a plant.

[0486] Accordingly, the present invention relates to a nucleic acid molecule encoding a polypeptide comprising one or more of the Pfam domains PF00829.14 for the production of a plant with increased yield as described herein. The invention also relates to the polypeptide encoded by said nucleic acid molecule.

[0487] Accordingly, the present invention relates to a nucleic acid molecule encoding a polypeptide which is 50% or more, preferably 60%, 70%, or 75%, more preferably 80%, 85%, 90%, or 95%, even more preferred 96%, 97%, 98%, 99% or more and most preferred 100% identical to the polypeptide of SEQ ID NO.: 8105 comprising one or more of the Pfam domains selected from the group consitists of: PF00829.14, and conferring the increase of the yield of a plant as described herein. The invention also relates to the polypeptide encoded by said polynucleotide.

[0488] Further, the present invention relates to a nucleic acid molecule encoding a polypeptide comprising the consensus sequence of the homologs of the polypeptide of SEQ ID NO.: 8105, i.e. as shown in column 7 of table IV, and said polypeptide comprising further one or more of the Pfam domains PF00829.14, and the polypeptide's expression is conferring the increase of the yield of a plant.

[0489] Accordingly, the present invention relates to a nucleic acid molecule encoding a polypeptide comprising one or more of the Pfam domains PF00447.10 for the production of a plant with increased yield as described herein. The invention also relates to the polypeptide encoded by said nucleic acid molecule.

[0490] Accordingly, the present invention relates to a nucleic acid molecule encoding a polypeptide which is 50% or more, preferably 60%, 70%, or 75%, more preferably 80%, 85%, 90%, or 95%, even more preferred 96%, 97%, 98%, 99% or more and most preferred 100% identical to the polypeptide of SEQ ID NO.: 8207 comprising one or more of the Pfam domains selected from the group consitists of: PF00447.10, and conferring the increase of the yield of a plant as described herein. The invention also relates to the polypeptide encoded by said polynucleotide.

[0491] Further, the present invention relates to a nucleic acid molecule encoding a polypeptide comprising the consensus sequence of the homologs of the polypeptide of SEQ ID NO.: 8207, i.e. as shown in column 7 of table IV, and said polypeptide comprising further one or more of the Pfam domains PF00447.10, and the polypeptide's expression is conferring the increase of the yield of a plant.

[0492] Accordingly, the present invention relates to a nucleic acid molecule encoding a polypeptide comprising one or more of the Pfam domains PF00011.14 for the production of a plant with increased yield as described herein. The invention also relates to the polypeptide encoded by said nucleic acid molecule.

[0493] Accordingly, the present invention relates to a nucleic acid molecule encoding a polypeptide which is 50% or more, preferably 60%, 70%, or 75%, more preferably 80%, 85%, 90%, or 95%, even more preferred 96%, 97%, 98%, 99% or more and most preferred 100% identical to the polypeptide of SEQ ID NO.: 8409 comprising one or more of the Pfam domains selected from the group consitists of: PF00011.14, and conferring the increase of the yield of a plant as described herein. The invention also relates to the polypeptide encoded by said polynucleotide.

[0494] Further, the present invention relates to a nucleic acid molecule encoding a polypeptide comprising the consensus sequence of the homologs of the polypeptide of SEQ ID NO.: 8409, i.e. as shown in column 7 of table IV, and said polypeptide comprising further one or more of the Pfam domains PF00011.14, and the polypeptide's expression is conferring the increase of the yield of a plant.

[0495] Accordingly, the present invention relates to a nucleic acid molecule encoding a polypeptide comprising one or more of the Pfam domains PF00118.17 for the production of a plant with increased yield as described herein. The invention also relates to the polypeptide encoded by said nucleic acid molecule.

[0496] Accordingly, the present invention relates to a nucleic acid molecule encoding a polypeptide which is 50% or more, preferably 60%, 70%, or 75%, more preferably 80%, 85%, 90%, or 95%, even more preferred 96%, 97%, 98%, 99% or more and most preferred 100% identical to the polypeptide of SEQ ID NO.: 8843 comprising one or more of the Pfam domains selected from the group consitists of: PF00118.17, and conferring the increase of the yield of a plant as described herein. The invention also relates to the polypeptide encoded by said polynucleotide.

[0497] Further, the present invention relates to a nucleic acid molecule encoding a polypeptide comprising the consensus sequence of the homologs of the polypeptide of SEQ ID NO.: 8843, i.e. as shown in column 7 of table IV, and said polypeptide comprising further one or more of the Pfam domains PF00118.17, and the polypeptide's expression is conferring the increase of the yield of a plant.

[0498] Accordingly, the present invention relates to a nucleic acid molecule encoding a polypeptide comprising one or more of the Pfam domains PF00152.13 and PF01336.18 for the production of a plant with increased yield as described herein. The invention also relates to the polypeptide encoded by said nucleic acid molecule.

[0499] Accordingly, the present invention relates to a nucleic acid molecule encoding a polypeptide which is 50% or more, preferably 60%, 70%, or 75%, more preferably 80%, 85%, 90%, or 95%, even more preferred 96%, 97%, 98%, 99% or more and most preferred 100% identical to the polypeptide of SEQ ID NO.: 9982 comprising one or more of the Pfam domains selected from the group consitists of: PF00152.13 and PF01336.18, and conferring the increase of the yield of a plant as described herein. The invention also relates to the polypeptide encoded by said polynucleotide.

[0500] Further, the present invention relates to a nucleic acid molecule encoding a polypeptide comprising the consensus sequence of the homologs of the polypeptide of SEQ ID NO.: 9982, i.e. as shown in column 7 of table IV, and said polypeptide comprising further one or more of the Pfam domains PF00152.13 and PF01336.18, and the polypeptide's expression is conferring the increase of the yield of a plant.

[0501] Accordingly, the present invention relates to a nucleic acid molecule encoding a polypeptide comprising one or more of the Pfam domains PF00582.19 for the production of a plant with increased yield as described herein. The invention also relates to the polypeptide encoded by said nucleic acid molecule.

[0502] Accordingly, the present invention relates to a nucleic acid molecule encoding a polypeptide which is 50% or more, preferably 60%, 70%, or 75%, more preferably 80%, 85%, 90%, or 95%, even more preferred 96%, 97%, 98%, 99% or more and most preferred 100% identical to the polypeptide of SEQ ID NO.: 10881 comprising one or more of the Pfam domains selected from the group consitists of: PF00582.19, and conferring the increase of the yield of a plant as described herein. The invention also relates to the polypeptide encoded by said polynucleotide.

[0503] Further, the present invention relates to a nucleic acid molecule encoding a polypeptide comprising the consensus sequence of the homologs of the polypeptide of SEQ ID NO.: 10881, i.e. as shown in column 7 of table IV, and said polypeptide comprising further one or more of the Pfam domains PF00582.19, and the polypeptide's expression is conferring the increase of the yield of a plant.

[0504] Accordingly, the present invention relates to a nucleic acid molecule encoding a polypeptide comprising one or more of the Pfam domains PF00011.14 for the production of a plant with increased yield as described herein. The invention also relates to the polypeptide encoded by said nucleic acid molecule.

[0505] Accordingly, the present invention relates to a nucleic acid molecule encoding a polypeptide which is 50% or more, preferably 60%, 70%, or 75%, more preferably 80%, 85%, 90%, or 95%, even more preferred 96%, 97%, 98%, 99% or more and most preferred 100% identical to the polypeptide of SEQ ID NO.: 10966 comprising one or more of the Pfam domains selected from the group consitists of: PF00011.14, and conferring the increase of the yield of a plant as described herein. The invention also relates to the polypeptide encoded by said polynucleotide.

[0506] Further, the present invention relates to a nucleic acid molecule encoding a polypeptide comprising the consensus sequence of the homologs of the polypeptide of SEQ ID NO.: 10966, i.e. as shown in column 7 of table IV, and said polypeptide comprising further one or more of the Pfam domains PF00011.14, and the polypeptide's expression is conferring the increase of the yield of a plant.

[0507] Accordingly, the present invention relates to a nucleic acid molecule encoding a polypeptide comprising one or more of the Pfam domains PF02171.10, PF02170.15, and PF08699.3 for the production of a plant with increased yield as described herein. The invention also relates to the polypeptide encoded by said nucleic acid molecule.

[0508] Accordingly, the present invention relates to a nucleic acid molecule encoding a polypeptide which is 50% or more, preferably 60%, 70%, or 75%, more preferably 80%, 85%, 90%, or 95%, even more preferred 96%, 97%, 98%, 99% or more and most preferred 100% identical to the polypeptide of SEQ ID NO.: 11419 comprising one or more of the Pfam domains selected from the group consitists of: PF02171.10, PF02170.15, and PF08699.3, and conferring the increase of the yield of a plant as described herein. The invention also relates to the polypeptide encoded by said polynucleotide.

[0509] Further, the present invention relates to a nucleic acid molecule encoding a polypeptide comprising the consensus sequence of the homologs of the polypeptide of SEQ ID NO.: 11419, i.e. as shown in column 7 of table IV, and said polypeptide comprising further one or more of the Pfam domains PF02171.10, PF02170.15, and PF08699.3, and the polypeptide's expression is conferring the increase of the yield of a plant.

[0510] Accordingly, the present invention relates to a nucleic acid molecule encoding a polypeptide comprising one or more of the Pfam domains PF02798.13 and PF00043.18 for the production of a plant with increased yield as described herein. The invention also relates to the polypeptide encoded by said nucleic acid molecule.

[0511] Accordingly, the present invention relates to a nucleic acid molecule encoding a polypeptide which is 50% or more, preferably 60%, 70%, or 75%, more preferably 80%, 85%, 90%, or 95%, even more preferred 96%, 97%, 98%, 99% or more and most preferred 100% identical to the polypeptide of SEQ ID NO.: 11753 comprising one or more of the Pfam domains selected from the group consitists of: PF02798.13 and PF00043.18, and conferring the increase of the yield of a plant as described herein. The invention also relates to the polypeptide encoded by said polynucleotide.

[0512] Further, the present invention relates to a nucleic acid molecule encoding a polypeptide comprising the consensus sequence of the homologs of the polypeptide of SEQ ID NO.: 11753, i.e. as shown in column 7 of table IV, and said polypeptide comprising further one or more of the Pfam domains PF02798.13 and PF00043.18, and the polypeptide's expression is conferring the increase of the yield of a plant.

[0513] Accordingly, the present invention relates to a nucleic acid molecule encoding a polypeptide comprising one or more of the Pfam domains PF03760.8 for the production of a plant with increased yield as described herein. The invention also relates to the polypeptide encoded by said nucleic acid molecule.

[0514] Accordingly, the present invention relates to a nucleic acid molecule encoding a polypeptide which is 50% or more, preferably 60%, 70%, or 75%, more preferably 80%, 85%, 90%, or 95%, even more preferred 96%, 97%, 98%, 99% or more and most preferred 100% identical to the polypeptide of SEQ ID NO.: 12197 comprising one or more of the Pfam domains selected from the group consitists of: PF03760.8, and conferring the increase of the yield of a plant as described herein. The invention also relates to the polypeptide encoded by said polynucleotide.

[0515] Further, the present invention relates to a nucleic acid molecule encoding a polypeptide comprising the consensus sequence of the homologs of the polypeptide of SEQ ID NO.: 12197, i.e. as shown in column 7 of table IV, and said polypeptide comprising further one or more of the Pfam domains PF03760.8, and the polypeptide's expression is conferring the increase of the yield of a plant.

[0516] Accordingly, the present invention relates to a nucleic acid molecule encoding a polypeptide comprising one or more of the Pfam domains PF04564.8 for the production of a plant with increased yield as described herein. The invention also relates to the polypeptide encoded by said nucleic acid molecule.

[0517] Accordingly, the present invention relates to a nucleic acid molecule encoding a polypeptide which is 50% or more, preferably 60%, 70%, or 75%, more preferably 80%, 85%, 90%, or 95%, even more preferred 96%, 97%, 98%, 99% or more and most preferred 100% identical to the polypeptide of SEQ ID NO.: 12317 comprising one or more of the Pfam domains selected from the group consitists of: PF04564.8, and conferring the increase of the yield of a plant as described herein. The invention also relates to the polypeptide encoded by said polynucleotide.

[0518] Further, the present invention relates to a nucleic acid molecule encoding a polypeptide comprising the consensus sequence of the homologs of the polypeptide of SEQ ID NO.: 12317, i.e. as shown in column 7 of table IV, and said polypeptide comprising further one or more of the Pfam domains PF04564.8, and the polypeptide's expression is conferring the increase of the yield of a plant.

[0519] Accordingly, the present invention relates to a nucleic acid molecule encoding a polypeptide comprising one or more of the Pfam domains PF01918.14 for the production of a plant with increased yield as described herein. The invention also relates to the polypeptide encoded by said nucleic acid molecule.

[0520] Accordingly, the present invention relates to a nucleic acid molecule encoding a polypeptide which is 50% or more, preferably 60%, 70%, or 75%, more preferably 80%, 85%, 90%, or 95%, even more preferred 96%, 97%, 98%, 99% or more and most preferred 100% identical to the polypeptide of SEQ ID NO.: 12574 comprising one or more of the Pfam domains selected from the group consitists of: PF01918.14, and conferring the increase of the yield of a plant as described herein. The invention also relates to the polypeptide encoded by said polynucleotide.

[0521] Further, the present invention relates to a nucleic acid molecule encoding a polypeptide comprising the consensus sequence of the homologs of the polypeptide of SEQ ID NO.: 12574, i.e. as shown in column 7 of table IV, and said polypeptide comprising further one or more of the Pfam domains PF01918.14, and the polypeptide's expression is conferring the increase of the yield of a plant.

[0522] Accordingly, the present invention relates to a nucleic acid molecule encoding a polypeptide comprising one or more of the Pfam domains PF00067.15 for the production of a plant with increased yield as described herein. The invention also relates to the polypeptide encoded by said nucleic acid molecule.

[0523] Accordingly, the present invention relates to a nucleic acid molecule encoding a polypeptide which is 50% or more, preferably 60%, 70%, or 75%, more preferably 80%, 85%, 90%, or 95%, even more preferred 96%, 97%, 98%, 99% or more and most preferred 100% identical to the polypeptide of SEQ ID NO.: 12669 comprising one or more of the Pfam domains selected from the group consitists of: PF00067.15, and conferring the increase of the yield of a plant as described herein. The invention also relates to the polypeptide encoded by said polynucleotide.

[0524] Further, the present invention relates to a nucleic acid molecule encoding a polypeptide comprising the consensus sequence of the homologs of the polypeptide of SEQ ID NO.: 12669, i.e. as shown in column 7 of table IV, and said polypeptide comprising further one or more of the Pfam domains PF00067.15, and the polypeptide's expression is conferring the increase of the yield of a plant.

[0525] Accordingly, the present invention relates to a nucleic acid molecule encoding a polypeptide comprising one or more of the Pfam domains PF00487.17 and PF00173.21 for the production of a plant with increased yield as described herein. The invention also relates to the polypeptide encoded by said nucleic acid molecule.

[0526] Accordingly, the present invention relates to a nucleic acid molecule encoding a polypeptide which is 50% or more, preferably 60%, 70%, or 75%, more preferably 80%, 85%, 90%, or 95%, even more preferred 96%, 97%, 98%, 99% or more and most preferred 100% identical to the polypeptide of SEQ ID NO.: 13132 comprising one or more of the Pfam domains selected from the group consitists of: PF00487.17 and PF00173.21, and conferring the increase of the yield of a plant as described herein. The invention also relates to the polypeptide encoded by said polynucleotide.

[0527] Further, the present invention relates to a nucleic acid molecule encoding a polypeptide comprising the consensus sequence of the homologs of the polypeptide of SEQ ID NO.: 13132, i.e. as shown in column 7 of table IV, and said polypeptide comprising further one or more of the Pfam domains PF00487.17 and PF00173.21, and the polypeptide's expression is conferring the increase of the yield of a plant.

[0528] Accordingly, the present invention relates to a nucleic acid molecule encoding a polypeptide comprising one or more of the Pfam domains PF09425.3 and PF06200.7 for the production of a plant with increased yield as described herein. The invention also relates to the polypeptide encoded by said nucleic acid molecule.

[0529] Accordingly, the present invention relates to a nucleic acid molecule encoding a polypeptide which is 50% or more, preferably 60%, 70%, or 75%, more preferably 80%, 85%, 90%, or 95%, even more preferred 96%, 97%, 98%, 99% or more and most preferred 100% identical to the polypeptide of SEQ ID NO.: 13277 comprising one or more of the Pfam domains selected from the group consitists of: PF09425.3 and PF06200.7, and conferring the increase of the yield of a plant as described herein. The invention also relates to the polypeptide encoded by said polynucleotide.

[0530] Further, the present invention relates to a nucleic acid molecule encoding a polypeptide comprising the consensus sequence of the homologs of the polypeptide of SEQ ID NO.: 13277, i.e. as shown in column 7 of table IV, and said polypeptide comprising further one or more of the Pfam domains PF09425.3 and PF06200.7, and the polypeptide's expression is conferring the increase of the yield of a plant.

[0531] Accordingly, the present invention relates to a nucleic acid molecule encoding a polypeptide comprising one or more of the Pfam domains PF02902.12 for the production of a plant with increased yield as described herein. The invention also relates to the polypeptide encoded by said nucleic acid molecule.

[0532] Accordingly, the present invention relates to a nucleic acid molecule encoding a polypeptide which is 50% or more, preferably 60%, 70%, or 75%, more preferably 80%, 85%, 90%, or 95%, even more preferred 96%, 97%, 98%, 99% or more and most preferred 100% identical to the polypeptide of SEQ ID NO.: 13437 comprising one or more of the Pfam domains selected from the group consitists of: PF02902.12, and conferring the increase of the yield of a plant as described herein. The invention also relates to the polypeptide encoded by said polynucleotide.

[0533] Further, the present invention relates to a nucleic acid molecule encoding a polypeptide comprising the consensus sequence of the homologs of the polypeptide of SEQ ID NO.: 13437, i.e. as shown in column 7 of table IV, and said polypeptide comprising further one or more of the Pfam domains PF02902.12, and the polypeptide's expression is conferring the increase of the yield of a plant.

[0534] Accordingly, the present invention relates to a nucleic acid molecule encoding a polypeptide comprising one or more of the Pfam domains PF00806.12 for the production of a plant with increased yield as described herein. The invention also relates to the polypeptide encoded by said nucleic acid molecule.

[0535] Accordingly, the present invention relates to a nucleic acid molecule encoding a polypeptide which is 50% or more, preferably 60%, 70%, or 75%, more preferably 80%, 85%, 90%, or 95%, even more preferred 96%, 97%, 98%, 99% or more and most preferred 100% identical to the polypeptide of SEQ ID NO.: 13478 comprising one or more of the Pfam domains selected from the group consitists of: PF00806.12, and conferring the increase of the yield of a plant as described herein. The invention also relates to the polypeptide encoded by said polynucleotide.

[0536] Further, the present invention relates to a nucleic acid molecule encoding a polypeptide comprising the consensus sequence of the homologs of the polypeptide of SEQ ID NO.: 13478, i.e. as shown in column 7 of table IV, and said polypeptide comprising further one or more of the Pfam domains PF00806.12, and the polypeptide's expression is conferring the increase of the yield of a plant.

[0537] Accordingly, the present invention relates to a nucleic acid molecule encoding a polypeptide comprising one or more of the Pfam domains PF00888.15 and PF10557.2 for the production of a plant with increased yield as described herein. The invention also relates to the polypeptide encoded by said nucleic acid molecule.

[0538] Accordingly, the present invention relates to a nucleic acid molecule encoding a polypeptide which is 50% or more, preferably 60%, 70%, or 75%, more preferably 80%, 85%, 90%, or 95%, even more preferred 96%, 97%, 98%, 99% or more and most preferred 100% identical to the polypeptide of SEQ ID NO.: 13552 comprising one or more of the Pfam domains selected from the group consitists of: PF00888.15 and PF10557.2, and conferring the increase of the yield of a plant as described herein. The invention also relates to the polypeptide encoded by said polynucleotide.

[0539] Further, the present invention relates to a nucleic acid molecule encoding a polypeptide comprising the consensus sequence of the homologs of the polypeptide of SEQ ID NO.: 13552, i.e. as shown in column 7 of table IV, and said polypeptide comprising further one or more of the Pfam domains PF00888.15 and PF10557.2, and the polypeptide's expression is conferring the increase of the yield of a plant.

[0540] Accordingly, the present invention relates to a nucleic acid molecule encoding a polypeptide comprising one or more of the Pfam domains PF03152.7 for the production of a plant with increased yield as described herein. The invention also relates to the polypeptide encoded by said nucleic acid molecule.

[0541] Accordingly, the present invention relates to a nucleic acid molecule encoding a polypeptide which is 50% or more, preferably 60%, 70%, or 75%, more preferably 80%, 85%, 90%, or 95%, even more preferred 96%, 97%, 98%, 99% or more and most preferred 100% identical to the polypeptide of SEQ ID NO.: 13246 comprising one or more of the Pfam domains selected from the group consitists of: PF03152.7, and conferring the increase of the yield of a plant as described herein. The invention also relates to the polypeptide encoded by said polynucleotide.

[0542] Further, the present invention relates to a nucleic acid molecule encoding a polypeptide comprising the consensus sequence of the homologs of the polypeptide of SEQ ID NO.: 13246, i.e. as shown in column 7 of table IV, and said polypeptide comprising further one or more of the Pfam domains PF03152.7, and the polypeptide's expression is conferring the increase of the yield of a plant.

[0543] Accordingly, the present invention relates to a nucleic acid molecule encoding a polypeptide comprising one or more of the Pfam domains PF00036.25 for the production of a plant with increased yield as described herein. The invention also relates to the polypeptide encoded by said nucleic acid molecule.

[0544] Accordingly, the present invention relates to a nucleic acid molecule encoding a polypeptide which is 50% or more, preferably 60%, 70%, or 75%, more preferably 80%, 85%, 90%, or 95%, even more preferred 96%, 97%, 98%, 99% or more and most preferred 100% identical to the polypeptide of SEQ ID NO.: 13310 comprising one or more of the Pfam domains selected from the group consitists of: PF00036.25, and conferring the increase of the yield of a plant as described herein. The invention also relates to the polypeptide encoded by said polynucleotide.

[0545] Further, the present invention relates to a nucleic acid molecule encoding a polypeptide comprising the consensus sequence of the homologs of the polypeptide of SEQ ID NO.: 13310, i.e. as shown in column 7 of table IV, and said polypeptide comprising further one or more of the Pfam domains PF00036.25, and the polypeptide's expression is conferring the increase of the yield of a plant.

[0546] Accordingly, the present invention relates to a nucleic acid molecule encoding a polypeptide comprising one or more of the Pfam domains PF00179.19 for the production of a plant with increased yield as described herein. The invention also relates to the polypeptide encoded by said nucleic acid molecule.

[0547] Accordingly, the present invention relates to a nucleic acid molecule encoding a polypeptide which is 50% or more, preferably 60%, 70%, or 75%, more preferably 80%, 85%, 90%, or 95%, even more preferred 96%, 97%, 98%, 99% or more and most preferred 100% identical to the polypeptide of SEQ ID NO.: 13103 comprising one or more of the Pfam domains selected from the group consitists of: PF00179.19, and conferring the increase of the yield of a plant as described herein. The invention also relates to the polypeptide encoded by said polynucleotide.

[0548] Further, the present invention relates to a nucleic acid molecule encoding a polypeptide comprising the consensus sequence of the homologs of the polypeptide of SEQ ID NO.: 13103, i.e. as shown in column 7 of table IV, and said polypeptide comprising further one or more of the Pfam domains PF00179.19, and the polypeptide's expression is conferring the increase of the yield of a plant.

[0549] The present invention also relates to isolated nucleic acids comprising a nucleic acid molecule selected from the group consisting of:
[0550] (a) a nucleic acid molecule encoding the polypeptide shown in column 7 of table II B;
[0551] (b) a nucleic acid molecule shown in column 7 of table I B,
[0552] (c) a nucleic acid molecule, which, as a result of the degeneracy of the genetic code, can be derived from a polypeptide sequence depicted in column 5 or 7 of table II, and confers increased yield, e.g. increased yield-related trait, for example enhanced tolerance to abiotic environmental stress, for example an increased drought tolerance and/or low temperature tolerance and/or an increased nutrient use efficiency, intrinsic yield and/or another mentioned yield-related trait as compared to a corresponding, e.g. non-transformed, wild type plant cell, a plant or a part thereof;
[0553] (d) a nucleic acid molecule having 30% or more identity, preferably 40%, 50%, 60%, 70%, 75%, 80%, 85%, 90%, 95%, 96%, 97%, 98%, 99%, 99.5%, or more with the nucleic acid molecule sequence of a polynucleotide comprising the nucleic acid molecule shown in column 5 or 7 of table I, and confers increased yield, e.g. increased yield-related trait, for example enhanced tolerance to abiotic environmental stress, for example an increased drought tolerance and/or low temperature tolerance and/or an increased nutrient use efficiency, intrinsic yield and/or another mentioned yield-related trait as compared to a corresponding, e.g. non-transformed, wild type plant cell, a plant or a part thereof;
[0554] (e) a nucleic acid molecule encoding a polypeptide having 30% or more identity, preferably at least 40%, 50%, 60%, 70%, 75%, 80%, 85%, 90%, 95%, 96%, 97%, 98%, 99%, 99.5% or more, with the amino acid sequence of the polypeptide encoded by the nucleic acid molecule of (a), (b), (c) or (d) and having the activity represented by a nucleic acid molecule comprising a polynucleotide as depicted in column 5 of table I, and confers increased yield, e.g. increased yield-related trait, for example enhanced tolerance to abiotic environmental stress, for example an increased drought tolerance and/or low temperature tolerance and/or an increased nutrient use efficiency, intrinsic yield and/or another mentioned yield-related trait as compared to a corresponding, e.g. non-transformed, wild type plant cell, a plant or a part thereof;
[0555] (f) nucleic acid molecule which hybridizes with a nucleic acid molecule of (a), (b), (c), (d) or (e) under stringent hybridization conditions and confers increased yield, e.g. an increased yield-related trait, for example enhanced tolerance to abiotic environmental stress, for example an increased drought tolerance and/or low temperature tolerance and/or an increased nutrient use efficiency, intrinsic yield and/or another mentioned yield-related trait as compared to a corresponding, e.g. non-transformed, wild type plant cell, a plant or a part thereof;
[0556] (g) a nucleic acid molecule encoding a polypeptide which can be isolated with the aid of monoclonal or polyclonal antibodies made against a polypeptide encoded by one of the nucleic acid molecules of (a), (b), (c), (d), (e) or (f) and having the activity represented by the nucleic acid molecule comprising a polynucleotide as depicted in column 5 of table I;
[0557] (h) a nucleic acid molecule encoding a polypeptide comprising the consensus sequence or one or more polypeptide motifs as shown in column 7 of table IV, and preferably having the activity represented by a protein comprising a polypeptide as depicted in column 5 of table II or IV;
[0558] (i) a nucleic acid molecule encoding a polypeptide having the activity represented by a protein as depicted in column 5 of table II, and confers increased yield, e.g. an increased yield-related trait, for example enhanced tolerance to abiotic environmental stress, for example an increased drought tolerance and/or low temperature tolerance and/or an increased nutrient use efficiency, intrinsic yield and/or another mentioned yield-related trait as compared to a corresponding, e.g. non-transformed, wild type plant cell, a plant or a part thereof;
[0559] (j) nucleic acid molecule which comprises a polynucleotide, which is obtained by amplifying a cDNA library or a genomic library using the primers in column 7 of table III, and preferably having the activity represented by a protein comprising a polypeptide as depicted in column 5 of table II or IV, and
[0560] (k) a nucleic acid molecule which is obtainable by screening a suitable nucleic acid library, especially a cDNA library and/or a genomic library, under stringent hybridization conditions with a probe comprising a complementary sequence of a nucleic acid molecule of (a) or (b) or with a fragment thereof, having 15 nt, preferably 20 nt, 30 nt, 50 nt, 100 nt, 200 nt, 500 nt, 750 nt or 1000 nt or more of a nucleic acid molecule complementary to a nucleic acid molecule sequence characterized in (a) to (e) and encoding a polypeptide having the activity represented by a protein comprising a polypeptide as depicted in column 5 of table II.
   In one embodiment, the nucleic acid molecule according to (a), (b), (c), (d), (e), (f), (g), (h), (i), (j) and (k) is at least in one or more nucleotides different from the sequence depicted in column 5 or 7 of table I A, and preferably which encodes a protein which differs at least in one or more amino acids from the protein sequences depicted in column 5 or 7 of table II A. For example the nucleic acid molecule according to (a), (b), (c), (d), (e), (f), (g), (h), (i), (j) and (k) is from table I B.

[0561] In one embodiment the invention relates to homologs of the aforementioned sequences, which can be isolated advantageously from yeast, fungi, viruses, algae, bacteria, such as Acetobacter (subgen. Acetobacter) aceti; Acidithiobacillus ferrooxidans; Acinetobacter sp.; Actinobacillus sp; Aeromonas salmonicida; Agrobacterium tumefaciens; Aquifex aeolicus; Arcanobacterium pyogenes; Aster yellows phytoplasma; Bacillus sp.; Bifidobacterium sp.; Borrelia burgdorferi; Brevibacterium linens; Brucella melitensis; Buchnera sp.; Butyrivibrio fibrisolvens; Campylobacter jejuni; Caulobacter crescentus; Chlamydia sp.; Chlamydophila sp.; Chlorobium limicola; Citrobacter rodentium; Clostridium sp.; Comamonas testosterone; Corynebacterium sp.; Coxiella burnetii; Deinococcus radiodurans; Dichelobacter nodosus; Edwardsiella ictaluri; Enterobacter sp.; Erysipelothrix rhusiopathiae; E. coli; Flavobacterium sp.; Francisella tularensis; Frankia sp. Cpl1; Fusobacterium nucleatum; Geobacillus stearothermophilus; Gluconobacter oxydans; Haemophilus sp.; Helicobacter pylori; Klebsiella pneumoniae; Lactobacillus sp.; Lactococcus lactis; Listeria sp.; Mannheimia haemolytica; Mesorhizobium loti; Methylophaga thalassica; Microcystis aeruginosa; Microscilla sp. PRE1; Moraxella sp. TA144; Mycobacterium sp.; Mycoplasma sp.; Neisseria sp.; Nitrosomonas sp.; Nostoc sp. PCC 7120; Novosphingobium aromaticivorans; Oenococcus oeni; Pantoea citrea; Pasteurella multocida; Pediococcus pentosaceus; Phormidium foveolarum; Phytoplasma sp.; Plectonema boryanum; Prevotella ruminicola; Propionibacterium sp.; Proteus vulgaris; Pseudomonas sp.; Ralstonia sp.; Rhizobium sp.; Rhodococcus equi; Rhodothermus marinus; Rickettsia sp.; Riemerella anatipestifer; Ruminococcus flavefaciens; Salmonella sp.; Selenomonas ruminantium; Serratia entomophila; Shigella sp.; Sinorhizobium meliloti; Staphylococcus sp.; Streptococcus sp.; Streptomyces sp.; Synechococcus sp.; Synechocystis sp. PCC 6803; Thermotoga maritima; Treponema sp.; Ureaplasma urealyticum; Vibrio cholerae; Vibrio parahaemolyticus; Xylella fastidiosa; Yersinia sp.; Zymomonas mobilis, preferably Salmonella sp. or E. coli or plants, preferably from yeasts such as from the genera Saccharomyces, Pichia, Candida, Hansenula, Torulopsis or Schizosaccharomyces or plants such as A. thaliana, maize, wheat, rye, oat, triticale, rice, barley, soybean, peanut, cotton, borage, sunflower, linseed, primrose, rapeseed, canola and turnip rape, manihot, pepper, sunflower, tagetes, solanaceous plant such as potato, tobacco, eggplant and tomato, Vicia species, pea, alfalfa, bushy plants such as coffee, cacao, tea, Salix species, trees such as oil palm, coconut, perennial grass, such as ryegrass and fescue, and forage crops, such as alfalfa and clover and from spruce, pine or fir for example. More preferably homologs of aforementioned sequences can be isolated from S. cerevisiae, E. coli or Synechocystis sp. or plants, preferably Brassica napus, Glycine max, Zea mays, cotton or Oryza sativa.

[0562] The proteins of the present invention are preferably produced by recombinant DNA techniques. For example, a nucleic acid molecule encoding the protein is cloned into an expression vector, for example in to a binary vector, the expression vector is introduced into a host cell, for example the A. thaliana wild type NASC N906 or any other plant cell as described in the examples see below, and the protein is expressed in said host cell. Examples for binary vectors are pBIN19, pBI101, pBinAR (Höfgen and Willmitzer, Plant Science 66, 221 (1990)), pGPTV, pCAMBIA, pBIB-HYG, pBecks, pGreen or pPZP (Hajukiewicz, P. et al., Plant Mol. Biol. 25, 989 (1994), and Hellens et al, Trends in Plant Science 5, 446 (2000)).

[0563] In one embodiment the protein of the present invention is preferably produced in an compartment of the cell, e.g. in the plastids. Ways of introducing nucleic acids into plastids and producing proteins in this compartment are known to the person skilled in the art have been also described in this application. In one embodiment, the polypeptide of the invention is a protein localized after expression as indicated in column 6 of table II, e.g. nontargeted, mitochondrial or plastidic, for example it is fused to a transit peptide as described above for plastidic localisation. In another embodiment the protein of the present invention is produced without further targeting signal (e.g. as mentioned herein), e.g. in the cytoplasm of the cell. Ways of producing proteins in the cytoplasm are known to the person skilled in the art. Ways of producing proteins without artificial targeting are known to the person skilled in the art.

[0564] Advantageously, the nucleic acid sequences according to the invention or the gene construct together with at least one reporter gene are cloned into an expression cassette, which is introduced into the organism via a vector or directly into the genome. This reporter gene should allow easy detection via a growth, fluorescence, chemical, bioluminescence or tolerance assay or via a photometric measurement. Examples of reporter genes which may be mentioned are antibiotic- or herbicide-tolerance genes, hydrolase genes, fluorescence protein genes, bioluminescence genes, sugar or nucleotide metabolic genes or biosynthesis genes such as the Ura3 gene, the Ilv2 gene, the luciferase gene, the β-galactosidasegene, the gfp gene, the 2-desoxyglucose-6-phosphate phosphatase gene, the β-glucuronidase gene, β-lactamase gene, the neomycin phosphotransferase gene, the hygromycin phosphotransferase gene, a mutated acetohydroxyacid synthase (AHAS) gene (also known as acetolactate synthase (ALS) gene), a gene for a D-amino acid metabolizing enzmye or the BASTA (=gluphosinate-tolerance) gene. These genes permit easy measurement and quantification of the transcription activity and hence of the expression of the genes. In this way genome positions may be identified which exhibit differing productivity. For expression a person skilled in the art is familiar with different methods to introduce the nucleic acid sequences into different organelles such as the preferred plastids. Such methods are for example disclosed by Maiga P. (Annu. Rev. Plant Biol. 55, 289 (2004)), Evans T. (WO 2004/040973), McBride K. E. et al. (U.S. Pat. No. 5,455,818), Daniell H. et al. (U.S. Pat. No. 5,932,479 and U.S. Pat. No. 5,693,507) and Straub J. M. et al. (U.S. Pat. No. 6,781,033). A preferred method is the transformation of microspore-derived hypocotyl or cotyledonary tissue (which are green and thus contain numerous plastids) leaf tissue and afterwards the regeneration of shoots from said transformed plant material on selective medium. As methods for the transformation bombarding of the plant material or the use of independently replicating shuttle vectors are well known by the skilled worker. But also a PEG-mediated transformation of the plastids or Agrobacterium transformation with binary vectors is possible. Useful markers for the trans-formation of plastids are positive selection markers for example the chloramphenicol-, streptomycin-, kanamycin-, neomycin-, amikamycin-, spectinomycin-, triazine- and/or lincomycintolerance genes. As additional markers named in the literature often as secondary markers, genes coding for the tolerance against herbicides such as phosphinothricin (=glufosinate, BASTA™, Liberty™, encoded by the bar gene), glyphosate (═N-(phosphonomethyl)glycine, Roundup™, encoded by the 5-enolpyruvylshikimate-3-phosphate synthase gene=epsps), sulfonylureas (like Staple™, encoded by the acetolactate synthase (ALS) gene), imidazolinones [=IMI, like imazethapyr, imazamox, Clearfield™, encoded by the acetohydroxyacid synthase (AHAS) gene, also known as acetolactate synthase (ALS) gene] or bromoxynil (=Buctril™, encoded by the oxy gene) or genes coding for antibiotics such as hygromycin or G418 are useful for further selection. Such secondary markers are useful in the case when most genome copies are transformed. In addition negative selection markers such as the bacterial cytosine deaminase (encoded by the codA gene) are also useful for the transformation of plastids.

[0565] To increase the possibility of identification of transformants it is also desirable to use reporter genes other then the aforementioned tolerance genes or in addition to said genes. Reporter genes are for example β-galactosidase-, β-glucuronidase-(GUS), alkaline phosphatase- and/or green-fluorescent protein-genes (GFP).

[0566] In a preferred embodiment a nucleic acid construct, for example an expression cassette, comprises upstream, i.e. at the 5′ end of the encoding sequence, a promoter and downstream, i.e. at the 3′ end, a polyadenylation signal and optionally other regulatory elements which are operably linked to the intervening encoding sequence with one of the nucleic acids of SEQ ID NO as depicted in table I, column 5 and 7. By an operable linkage is meant the sequential arrangement of promoter, encoding sequence, terminator and optionally other regulatory elements in such a way that each of the regulatory elements can fulfill its function in the expression of the encoding sequence in due manner. In one embodiment the sequences preferred for operable linkage are targeting sequences for ensuring subcellular localization in plastids. However, targeting sequences for ensuring subcellular localization in the mitochondrium, in the endoplasmic reticulum (=ER), in the nucleus, in oil corpuscles or other compartments may also be employed as well as translation promoters such as the 5′ lead sequence in tobacco mosaic virus (Gallie et al., Nucl. Acids Res. 15 8693 (1987)).

[0567] A nucleic acid construct, for example an expression cassette may, for example, contain a constitutive promoter or a tissue-specific promoter (preferably the USP or napin promoter) the gene to be expressed and the ER retention signal. For the ER retention signal the KDEL amino acid sequence (lysine, aspartic acid, glutamic acid, leucine) or the KKX amino acid sequence (lysine-lysine-X-stop, wherein X means every other known amino acid) is preferably employed.

[0568] For expression in a host organism, for example a plant, the expression cassette is advantageously inserted into a vector such as by way of example a plasmid, a phage or other DNA which allows optimal expression of the genes in the host organism. Examples of suitable plasmids are: in E. coli pLG338, pACYC184, pBR series such as e.g. pBR322, pUC series such as pUC18 or pUC19, M113 mp series, pKC30, pRep4, pHS1, pHS2, pPLc236, pMBL24, pLG200, pUR290, pIN-III113-B1, λgt11 or pBdCl; in Streptomyces pIJ101, pIJ364, pIJ702 or pIJ361; in Bacillus pUB110, pC194 or pBD214; in Corynebacterium pSA77 or pAJ667; in fungi pALS1, pIL2 or pBB116; other advantageous fungal vectors are described by Romanos M. A. et al., Yeast 8, 423 (1992) and by van den Hondel, C. A. M. J. J. et al. [(1991) “Heterologous gene expression in filamentous fungi”] as well as in “More Gene Manipulations” in “Fungi” in Bennet J. W. & Lasure L. L., eds., pp. 396-428, Academic Press, San Diego, and in “Gene transfer systems and vector development for filamentous fungi” [van den Hondel, C. A. M. J. J. & Punt, P. J. (1991) in: Applied Molecular Genetics of Fungi, Peberdy, J. F. et al., eds., pp. 1-28, Cambridge University Press: Cambridge]. Examples of advantageous yeast promoters are 2 μM, pAG-1, YEp6, YEp13 or pEMBLYe23. Examples of algal or plant promoters are pLGV23, pGHlac+, pBIN19, pAK2004, pVKH or pDH51 (see Schmidt, R. and Willmitzer, L., Plant Cell Rep. 7, 583 (1988))). The vectors identified above or derivatives of the vectors identified above are a small selection of the possible plasmids. Further plasmids are well known to those skilled in the art and may be found, for example, in “Cloning Vectors” (Eds. Pouwels P. H. et al. Elsevier, Amsterdam-New York-Oxford, 1985, ISBN 0 444 904018). Suitable plant vectors are described inter alia in “Methods in Plant Molecular Biology and Biotechnology” (CRC Press, Ch. 6/7, pp. 71-119). Advantageous vectors are known as shuttle vectors or binary vectors which replicate in E. coli and Agrobacterium.

[0569] In a further embodiment of the vector the expression cassette according to the invention may also advantageously be introduced into the organisms in the form of a linear DNA and be integrated into the genome of the host organism by way of heterologous or homologous recombination. This linear DNA may be composed of a linearized plasmid or only of the expression cassette as vector or the nucleic acid sequences according to the invention.

[0570] A nucleic acid sequence can also be introduced into an organism on its own.

[0571] If in addition to the nucleic acid sequence according to the invention further genes are to be introduced into the organism, all together with a reporter gene in a single vector or each single gene with a reporter gene in a vector in each case can be introduced into the organism, whereby the different vectors can be introduced simultaneously or successively.

[0572] The vector advantageously contains at least one copy of the nucleic acid sequences according to the invention and/or the expression cassette (=gene construct) according to the invention.

[0573] The invention further provides an isolated recombinant expression vector comprising a nucleic acid encoding a polypeptide as depicted in table II, column 5 or 7, wherein expression of the vector in a host cell results in increased yield, e.g. increased yield-related trait, for example enhanced tolerance to abiotic environmental stress, for example an increased drought tolerance and/or low temperature tolerance and/or an increased nutrient use efficiency, intrinsic yield and/or another mentioned yield-related trait as compared to a wild type variety of the host cell.

[0574] The recombinant expression vectors of the invention comprise a nucleic acid of the invention in a form suitable for expression of the nucleic acid in a host cell, which means that the recombinant expression vectors include one or more regulatory sequences, selected on the basis of the host cells to be used for expression, which is operatively linked to the nucleic acid sequence to be expressed. It will be appreciated by those skilled in the art that the design of the expression vector can depend on such factors as the choice of the host cell to be transformed, the level of expression of polypeptide desired, etc. The expression vectors of the invention can be introduced into host cells to thereby produce polypeptides or peptides, including fusion polypeptides or peptides, encoded by nucleic acids as described herein.

[0575] The recombinant expression vectors of the invention can be designed for expression of the polypeptide of the invention in plant cells. For example, nucleic acid molecules of the present invention can be expressed in plant cells (see Schmidt R., and Willmitzer L., Plant Cell Rep. 7 (1988); Plant Molecular Biology and Biotechnology, C Press, Boca Raton, Fla., Chapter 6/7, p. 71-119 (1993); White F. F., Jenes B. et al., Techniques for Gene Transfer, in: Transgenic Plants, Vol. 1, Engineering and Utilization, eds. Kung and Wu R., 128-43, Academic Press: 1993; Potrykus, Annu. Rev. Plant Physiol. Plant Molec. Biol. 42, 205 (1991) and references cited therein). Suitable host cells are discussed further in Goeddel, Gene Expression Technology: Methods in Enzymology 185, Academic Press: San Diego, Calif. (1990). By way of example the plant expression cassette can be installed in the pRT transformation vector ((a) Toepfer et al., Methods Enzymol. 217, 66 (1993), (b) Toepfer et al., Nucl. Acids. Res. 15, 5890 (1987)). Alternatively, a recombinant vector (=expression vector) can also be transcribed and translated in vitro, e.g. by using the T7 promoter and the T7 RNA polymerase.

[0576] In an further embodiment of the present invention, the nucleic acid molecules of the invention are expressed in plants and plants cells such as unicellular plant cells (e.g. algae) (see Falciatore et al., Marine Biotechnology 1 (3), 239 (1999) and references therein) and plant cells from higher plants (e.g., the spermatophytes, such as crop plants), for example to regenerate plants from the plant cells. A nucleic acid molecule depicted in table II, column 5 or 7 may be “introduced” into a plant cell by any means, including transfection, transformation or transduction, electroporation, particle bombardment, agroinfection, and the like. One transformation method known to those of skill in the art is the dipping of a flowering plant into an Agrobacteria solution, wherein the Agrobacteria contains the nucleic acid of the invention, followed by breeding of the transformed gametes. Other suitable methods for transforming or transfecting host cells including plant cells can be found in Sambrook et al., supra, and other laboratory manuals such as Methods in Molecular Biology, 1995, Vol. 44, Agrobacterium protocols, ed: Gartland and Davey, Humana Press, Totowa, N.J.

[0577] In one embodiment of the present invention, transfection of a nucleic acid molecule coding for a nucleic acid molecule depicted in table II, column 5 or 7 into a plant is achieved by Agrobacterium mediated gene transfer. Agrobacterium mediated plant trans-formation can be performed using for example the GV3101(pMP90) (Koncz and Schell, Mol. Gen. Genet. 204, 383 (1986)) or LBA4404 (Clontech) Agrobacterium tumefaciens strain. Transformation can be performed by standard transformation and regeneration techniques (Deblaere et al., Nucl. Acids Res. 13, 4777 (1994), Gelvin, Stanton B. and Schilperoort Robert A, Plant Molecular Biology Manual, 2nd Ed.—Dordrecht: Kluwer Academic Publ., 1995.—in Sect., Ringbuc Zentrale Signatur: BT11-P ISBN 0-7923-2731-4; Glick Bernard R., Thompson John E., Methods in Plant Molecular Biology and Biotechnology, Boca Raton: CRC Press, 1993 360 S., ISBN 0-8493-5164-2). For example, rapeseed can be transformed via cotyledon or hypocotyl transformation (Moloney et al., Plant Cell Report 8, 238 (1989); De Block et al., Plant Physiol. 91, 694 (1989)). Use of antibiotics for Agrobacterium and plant selection depends on the binary vector and the Agrobacterium strain used for transformation. Rapeseed selection is normally performed using kanamycin as selectable plant marker. Agrobacterium mediated gene transfer to flax can be performed using, for example, a technique described by Mlynarova et al., Plant Cell Report 13, 282 (1994). Additionally, transformation of soybean can be performed using for example a technique described in European Patent No. 424 047, U.S. Pat. No. 5,322,783, European Patent No. 397 687, U.S. Pat. No. 5,376,543 or U.S. Pat. No. 5,169,770. Transformation of maize can be achieved by particle bombardment, polyethylene glycol mediated DNA uptake or via the silicon carbide fiber technique. (See, for example, Freeling and Walbot “The maize handbook” Springer Verlag: New York (1993) ISBN 3-540-97826-7). A specific example of maize transformation is found in U.S. Pat. No. 5,990,387, and a specific example of wheat transformation can be found in PCT Application No. WO 93/07256.

[0578] According to the present invention, the introduced nucleic acid molecule coding for a polypeptides depicted in table II, column 5 or 77, or homologs thereof, may be maintained in the plant cell stably if it is incorporated into a non-chromosomal autonomous replicon or integrated into the plant chromosomes or organelle genome. Alternatively, the introduced nucleic acid molecule may be present on an extra-chromosomal non-replicating vector and be transiently expressed or transiently active.

[0579] In one embodiment, a homologous recombinant microorganism can be created wherein the nucleic acid moleculeis integrated into a chromosome, a vector is prepared which contains at least a portion of a nucleic acid molecule coding for a protein depicted in table II, column 5 or 7 into which a deletion, addition, or substitution has been introduced to thereby alter, e.g., functionally disrupt, the gene. For example, the gene is a yeast gene, like a gene of S. cerevisiae, or of Synechocystis, or a bacterial gene, like an E. coli gene, but it can be a homolog from a related plant or even from a mammalian or insect source. The vector can be designed such that, upon homologous recombination, the endogenous nucleic acid molecule coding for a protein depicted in table II, column 5 or 7 is mutated or otherwise altered but still encodes a functional polypeptide (e.g., the upstream regulatory region can be altered to thereby alter the expression of the endogenous nucleic acid molecule). In a preferred embodiment the biological activity of the protein of the invention is increased upon homologous recombination. To create a point mutation via homologous recombination, DNA-RNA hybrids can be used in a technique known as chimeraplasty (Cole-Strauss et al., Nucleic Acids Research 27 (5), 1323 (1999) and Kmiec, Gene Therapy American Scientist. 87 (3), 240 (1999)). Homologous recombination procedures in Physcomitrella patens are also well known in the art and are contemplated for use herein.

[0580] Whereas in the homologous recombination vector, the altered portion of the nucleic acid molecule coding for a protein depicted in table II, column 5 or 7 is flanked at its 5′ and 3′ ends by an additional nucleic acid molecule of the gene to allow for homologous recombination to occur between the exogenous gene carried by the vector and an endogenous gene, in a microorganism or plant. The additional flanking nucleic acid molecule is of sufficient length for successful homologous recombination with the endogenous gene. Typically, several hundreds of base pairs up to kilobases of flanking DNA (both at the 5′ and 3′ ends) are included in the vector. See, e.g., Thomas K. R., and Capecchi M. R., Cell 51, 503 (1987) for a description of homologous recombination vectors or Strepp et al., PNAS, 95 (8), 4368 (1998) for cDNA based recombination in Physcomitrella patens. The vector is introduced into a microorganism or plant cell (e.g. via polyethylene glycol mediated DNA), and cells in which the introduced gene has homologously recombined with the endogenous gene are selected using art-known techniques.

[0581] Whether present in an extra-chromosomal non-replicating vector or a vector that is integrated into a chromosome, the nucleic acid molecule coding for a nucleic acid molecules depicted in table II, column 5 or 7 preferably resides in a plant expression cassette. A plant expression cassette preferably contains regulatory sequences capable of driving gene expression in plant cells that are operatively linked so that each sequence can fulfill its function, for example, termination of transcription by polyadenylation signals. Preferred polyadenylation signals are those originating from Agrobacterium tumefaciens t-DNA such as the gene 3 known as octopine synthase of the Ti-plasmid pTiACH5 (Gielen et al., EMBO J. 3, 835 (1984)) or functional equivalents thereof but also all other terminators functionally active in plants are suitable. As plant gene expression is very often not limited on transcriptional levels, a plant expression cassette preferably contains other operatively linked sequences like translational enhancers such as the overdrive-sequence containing the 5″-untranslated leader sequence from tobacco mosaic virus enhancing the polypeptide per RNA ratio (Gallie et al., Nucl. Acids Research 15, 8693 (1987)). Examples of plant expression vectors include those detailed in: Becker D. et al., Plant Mol. Biol. 20, 1195 (1992); and Bevan M. W., Nucl. Acid. Res. 12, 8711 (1984); and “Vectors for Gene Transfer in Higher Plants” in: Transgenic Plants, Vol. 1, Engineering and Utilization, eds. Kung and Wu R., Academic Press, 1993, S. 15-38.

[0582] The host organism (=transgenic organism) advantageously contains at least one copy of the nucleic acid according to the invention and/or of the nucleic acid construct according to the invention.

[0583] As increased tolerance to abiotic environmental stress and/or yield is a general trait wished to be inherited into a wide variety of plants like maize, wheat, rye, oat, triticale, rice, barley, soybean, peanut, cotton, rapeseed and canola, manihot, pepper, sunflower and tagetes, solanaceous plants like potato, tobacco, eggplant, and tomato, Vicia species, pea, alfalfa, bushy plants (coffee, cacao, tea), Salix species, trees (oil palm, coconut), perennial grasses, and forage crops, these crop plants are also preferred target plants for a genetic engineering as one further embodiment of the present invention. Forage crops include, but are not limited to Wheatgrass, Canarygrass, Bromegrass, Wildrye Grass, Bluegrass, Orchardgrass, Alfalfa, Salfoin, Birdsfoot Trefoil, Alsike Clover, Red Clover and Sweet Clover.

[0584] In principle all plants can be used as host organism. Preferred transgenic plants are, for example, selected from the families Aceraceae, Anacardiaceae, Apiaceae, Asteraceae, Brassicaceae, Cactaceae, Cucurbitaceae, Euphorbiaceae, Fabaceae, Malvaceae, Nymphaeaceae, Papaveraceae, Rosaceae, Salicaceae, Solanaceae, Arecaceae, Bromeliaceae, Cyperaceae, Iridaceae, Liliaceae, Orchidaceae, Gentianaceae, Labiaceae, Magnoliaceae, Ranunculaceae, Carifolaceae, Rubiaceae, Scrophulariaceae, Caryophyllaceae, Ericaceae, Polygonaceae, Violaceae, Juncaceae or Poaceae and preferably from a plant selected from the group of the families Apiaceae, Asteraceae, Brassicaceae, Cucurbitaceae, Fabaceae, Papaveraceae, Rosaceae, Solanaceae, Liliaceae or Poaceae. Preferred are crop plants such as plants advantageously selected from the group of the genus peanut, oilseed rape, canola, sunflower, safflower, olive, sesame, hazelnut, almond, avocado, bay, pumpkin/squash, linseed, soya, pistachio, borage, maize, wheat, rye, oats, sorghum and millet, triticale, rice, barley, cassaya, potato, sugarbeet, egg plant, alfalfa, and perennial grasses and forage plants, oil palm, vegetables (brassicas, root vegetables, tuber vegetables, pod vegetables, fruiting vegetables, onion vegetables, leafy vegetables and stem vegetables), buckwheat, Jerusalem artichoke, broad bean, vetches, lentil, dwarf bean, lupin, clover and Lucerne for mentioning only some of them.

[0585] In one embodiment of the invention transgenic plants are selected from the group comprising cereals, soybean, rapeseed (including oil seed rape, especially canola and winter oil seed rape), cotton, sugarcane, sugar beet and potato, especially corn, soy, rapeseed (including oil seed rape, especially canola and winter oil seed rape), cotton, wheat and rice.

[0586] In another embodiment of the invention the transgenic plant is a gymnosperm plant, especially a spruce, pine or fir.

[0587] In one embodiment, the host plant is selected from the families Aceraceae, Anacardiaceae, Apiaceae, Asteraceae, Brassicaceae, Cactaceae, Cucurbitaceae, Euphorbiaceae, Fabaceae, Malvaceae, Nymphaeaceae, Papaveraceae, Rosaceae, Salicaceae, Solanaceae, Arecaceae, Bromeliaceae, Cyperaceae, Iridaceae, Liliaceae, Orchidaceae, Gentianaceae, Labiaceae, Magnoliaceae, Ranunculaceae, Carifolaceae, Rubiaceae, Scrophulariaceae, Caryophyllaceae, Ericaceae, Polygonaceae, Violaceae, Juncaceae or Poaceae and preferably from a plant selected from the group of the families Apiaceae, Asteraceae, Brassicaceae, Cucurbitaceae, Fabaceae, Papaveraceae, Rosaceae, Solanaceae, Liliaceae or Poaceae. Preferred are crop plants and in particular plants mentioned herein above as host plants such as the families and genera mentioned above for example preferred the species Anacardium occidentale, Calendula officinalis, Carthamus tinctorius, Cichorium intybus, Cynara scolymus, Helianthus annus, Tagetes lucida, Tagetes erecta, Tagetes tenuifolia; Daucus carota; Corylus avellana, Corylus colurna, Borago officinalis; Brassica napus, Brassica rapa ssp., Sinapis arvensis Brassica juncea, Brassica juncea var. juncea, Brassica juncea var. crispifolia, Brassica juncea var. foliosa, Brassica nigra, Brassica sinapioides, Melanosinapis communis, Brassica oleracea, Arabidopsis thaliana, Anana comosus, Ananas ananas, Bromelia comosa, Carica papaya, Cannabis sative, Ipomoea batatus, Ipomoea pandurata, Convolvulus batatas, Convolvulus tiliaceus, Ipomoea fastigiate, Ipomoea tiliacea, Ipomoea triloba, Convolvulus panduratus, Beta vulgaris, Beta vulgaris var. altissima, Beta vulgaris var. vulgaris, Beta maritima, Beta vulgaris var. perennis, Beta vulgaris var. conditiva, Beta vulgaris var. esculenta, Cucurbita maxima, Cucurbita mixta, Cucurbita pepo, Cucurbita moschata, Olea europaea, Manihot utilissima, Janipha manihot, Jatropha manihot, Manihot aipil, Manihot dulcis, Manihot manihot, Manihot melanobasis, Manihot esculenta, Ricinus communis, Pisum sativum, Pisum arvense, Pisum humile, Medicago sativa, Medicago falcata, Medicago varia, Glycine max Dolichos soja, Glycine gracilis, Glycine hispida, Phaseolus max, Soja hispida, Soja max, Cocos nucifera, Pelargonium grossularioides, Oleum cocoas, Laurus nobilis, Persea americana, Arachis hypogaea, Linum usitatissimum, Linum humile, Linum austriacum, Linum bienne, Linum angustifolium, Linum catharticum, Linum flavum, Linum grandiflorum, Adenolinum grandiflorum, Linum lewisii, Linum narbonense, Linum perenne, Linum perenne var. lewisii, Linum pratense, Linum trigynum, Punica granatum, Gossypium hirsutum, Gossypium arboreum, Gossypium barbadense, Gossypium herbaceum, Gossypium thurberi, Musa nana, Musa acuminata, Musa paradisiaca, Musa spp., Elaeis guineensis, Papaver orientale, Papaver rhoeas, Papaver dubium, Sesamum indicum, Piper aduncum, Piper amalago, Piper angustifolium, Piper auritum, Piper betel, Piper cubeba, Piper longum, Piper nigrum, Piper retrofractum, Artanthe adunca, Artanthe elongata, Peperomia elongata, Piper elongatum, Steffensia elongata, Hordeum vulgare, Hordeum jubatum, Hordeum murinum, Hordeum secalinum, Hordeum distichon Hordeum aegiceras, Hordeum hexastichon, Hordeum hexastichum, Hordeum irregulare, Hordeum sativum, Hordeum secalinum, Avena sativa, Avena fatua, Avena byzantina, Avena fatua var. sativa, Avena hybrida, Sorghum bicolor, Sorghum halepense, Sorghum saccharatum, Sorghum vulgare, Andropogon drummondii, Holcus bicolor, Holcus sorghum, Sorghum aethiopicum, Sorghum arundinaceum, Sorghum caffrorum, Sorghum cernuum, Sorghum dochna, Sorghum drummondii, Sorghum durra, Sorghum guineense, Sorghum lanceolaturn, Sorghum nervosum, Sorghum saccharatum, Sorghum subglabrescens, Sorghum verticilliflorum, Sorghum vulgare, Holcus halepensis, Sorghum miliaceum millet, Panicum militaceum, Zea mays, Triticum aestivum, Triticum durum, Triticum turgidum, Triticum hybernum, Triticum macha, Triticum sativum or Triticum vulgare, Cofea spp., Coffea arabica, Coffea canephora, Coffea liberica, Capsicum annuum, Capsicum annuum var. glabriusculum, Capsicum frutescens, Capsicum annuum, Nicotiana tabacum, Solanum tuberosum, Solanum melongena, Lycopersicon esculenturn, Lycopersicon lycopersicum, Lycopersicon pyriforme, Solanum integrifolium, Solanum lycopersicum Theobroma cacao or Camellia sinensis.

[0588] Anacardiaceae such as the genera Pistacia, Mangifera, Anacardium e.g. the species Pistacia vera [pistachios, Pistazie], Mangifer indica [Mango] or Anacardium occidentale [Cashew]; Asteraceae such as the genera Calendula, Carthamus, Centaurea, Cichorium, Cynara, Helianthus, Lactuca, Locusta, Tagetes, Valeriana e.g. the species Calendula officinalis [Marigold], Carthamus tinctorius [safflower], Centaurea cyanus [cornflower], Cichorium intybus [blue daisy], Cynara scolymus [Artichoke], Helianthus annus [sunflower], Lactuca sativa, Lactuca crispa, Lactuca esculenta, Lactuca scariola L. ssp. sativa, Lactuca scariola L. var. integrate, Lactuca scariola L. var. integrifolia, Lactuca sativa subsp. romana, Locusta communis, Valeriana locusta [lettuce], Tagetes lucida, Tagetes erecta or Tagetes tenuifolia [Marigold]; Apiaceae such as the genera Daucus e.g. the species Daucus carota [carrot]; Betulaceae such as the genera Corylus e.g. the species Corylus avellana or Corylus colurna [hazelnut]; Boraginaceae such as the genera Borago e.g. the species Borago officinalis [borage]; Brassicaceae such as the genera Brassica, Melanosinapis, Sinapis, Arabadopsis e.g. the species Brassica napus, Brassica rapa ssp. [canola, oilseed rape, turnip rape], Sinapis arvensis Brassica juncea, Brassica juncea var. juncea, Brassica juncea var. crispifolia, Brassica juncea var. foliosa, Brassica nigra, Brassica sinapioides, Melanosinapis communis [mustard], Brassica oleracea [fodder beet] or Arabidopsis thaliana; Bromeliaceae such as the genera Anana, Bromelia e.g. the species Anana comosus, Ananas ananas or Bromelia comosa [pineapple]; Caricaceae such as the genera Carica e.g. the species Carica papaya [papaya]; Cannabaceae such as the genera Cannabis e.g. the species Cannabis sative [hemp], Convolvulaceae such as the genera Ipomea, Convolvulus e.g. the species Ipomoea batatus, Ipomoea pandurata, Convolvulus batatas, Convolvulus tiliaceus, Ipomoea fastigiata, Ipomoea tiliacea, Ipomoea triloba or Convolvulus panduratus [sweet potato, Man of the Earth, wild potato], Chenopodiaceae such as the genera Beta, i.e. the species Beta vulgaris, Beta vulgaris var. altissima, Beta vulgaris var. Vulgaris, Beta maritima, Beta vulgaris var. perennis, Beta vulgaris var. conditiva or Beta vulgaris var. esculenta [sugar beet]; Cucurbitaceae such as the genera Cucubita e.g. the species Cucurbita maxima, Cucurbita mixta, Cucurbita pepo or Cucurbita moschata [pumpkin, squash]; Elaeagnaceae such as the genera Elaeagnus e.g. the species Olea europaea [olive]; Ericaceae such as the genera Kalmia e.g. the species Kalmia latifolia, Kalmia angustifolia, Kalmia microphylla, Kalmia polifolia, Kalmia occidentalis, Cistus chamaerhodendros or Kalmia lucida [American laurel, broad-leafed laurel, calico bush, spoon wood, sheep laurel, alpine laurel, bog laurel, western bog-laurel, swamp-laurel]; Euphorbiaceae such as the genera Manihot, Janipha, Jatropha, Ricinus e.g. the species Manihot utilissima, Janipha manihot, Jatropha manihot, Manihot aipil, Manihot dulcis, Manihot manihot, Manihot melanobasis, Manihot esculenta [manihot, arrowroot, tapioca, cassaya] or Ricinus communis [castor bean, Castor Oil Bush, Castor Oil Plant, Palma Christi, Wonder Tree]; Fabaceae such as the genera Pisum, Albizia, Cathormion, Feuillea, Inga, Pithecolobium, Acacia, Mimosa, Medicajo, Glycine, Dolichos, Phaseolus, Soja e.g. the species Pisum sativum, Pisum arvense, Pisum humile [pea], Albizia berteriana, Albizia julibrissin, Albizia lebbeck, Acacia berteriana, Acacia littoralis, Albizia berteriana, Albizzia berteriana, Cathormion berteriana, Feuillea berteriana, Inga fragrans, Pithecellobium berterianum, Pithecellobium fragrans, Pithecolobium berterianum, Pseudalbizzia berteriana, Acacia julibrissin, Acacia nemu, Albizia nemu, Feuilleea julibrissin, Mimosa julibrissin, Mimosa speciosa, Sericanrda julibrissin, Acacia lebbeck, Acacia macrophylla, Albizia lebbek, Feuilleea lebbeck, Mimosa lebbeck, Mimosa speciosa [bastard logwood, silk tree, East Indian Walnut], Medicago sativa, Medicago falcata, Medicago varia [alfalfa] Glycine max Dolichos soja, Glycine gracilis, Glycine hispida, Phaseolus max, Soja hispida or Soja max [soybean]; Geraniaceae such as the genera Pelargonium, Cocos, Oleum e.g. the species Cocos nucifera, Pelargonium grossularioides or Oleum cocois [coconut]; Gramineae such as the genera Saccharum e.g. the species Saccharum officinarum; Juglandaceae such as the genera Juglans, Wallia e.g. the species Juglans regia, Juglans ailanthifolia, Juglans sieboldiana, Juglans cinerea, Wallia cinerea, Juglans bixbyi, Juglans californica, Juglans hindsii, Juglans intermedia, Juglans jamaicensis, Juglans major, Juglans microcarpa, Juglans nigra or Wallia nigra [walnut, black walnut, common walnut, persian walnut, white walnut, butternut, black walnut]; Lauraceae such as the genera Persea, Laurus e.g. the species laurel Laurus nobilis [bay, laurel, bay laurel, sweet bay], Persea americana Persea americana, Persea gratissima or Persea persea [avocado]; Leguminosae such as the genera Arachis e.g. the species Arachis hypogaea [peanut]; Linaceae such as the genera Linum, Adenolinum e.g. the species Linum usitatissimum, Linum humile, Linum austriacum, Linum bienne, Linum angustifolium, Linum catharticum, Linum flavum, Linum grandiflorum, Adenolinum grandiflorum, Linum lewisii, Linum narbonense, Linum perenne, Linum perenne var. lewisii, Linum pratense or Linum trigynum [flax, linseed]; Lythrarieae such as the genera Punica e.g. the species Punica granatum [pomegranate]; Malvaceae such as the genera Gossypium e.g. the species Gossypium hirsutum, Gossypium arboreum, Gossypium barbadense, Gossypium herbaceum or Gossypium thurberi [cotton]; Musaceae such as the genera Musa e.g. the species Musa nana, Musa acuminata, Musa paradisiaca, Musa spp. [banana]; Onagraceae such as the genera Camissonia, Oenothera e.g. the species Oenothera biennis or Camissonia brevipes [primrose, evening primrose]; Palmae such as the genera Elacis e.g. the species Elaeis guineensis [oil plam]; Papaveraceae such as the genera Papaver e.g. the species Papaver orientale, Papaver rhoeas, Papaver dubium [poppy, oriental poppy, corn poppy, field poppy, shirley poppies, field poppy, long-headed poppy, long-pod poppy]; Pedaliaceae such as the genera Sesamum e.g. the species Sesamum indicum [sesame]; Piperaceae such as the genera Piper, Artanthe, Peperomia, Steffensia e.g. the species Piper aduncum, Piper amalago, Piper angustifolium, Piper auritum, Piper betel, Piper cubeba, Piper longum, Piper nigrum, Piper retrofractum, Artanthe adunca, Artanthe elongata, Peperomia elongata, Piper elongatum, Steffensia elongata. [Cayenne pepper, wild pepper]; Poaceae such as the genera Hordeum, Secale, Avena, Sorghum, Andropogon, Holcus, Panicum, Oryza, Zea, Triticum e.g. the species Hordeum vulgare, Hordeum jubatum, Hordeum murinum, Hordeum secalinum, Hordeum distichon Hordeum aegiceras, Hordeum hexastichon, Hordeum hexastichum, Hordeum irregulare, Hordeum sativum, Hordeum secalinum [barley, pearl barley, foxtail barley, wall barley, meadow barley], Secale cereale [rye], Avena sativa, Avena fatua, Avena byzantina, Avena fatua var. sativa, Avena hybrida [oat], Sorghum bicolor, Sorghum halepense, Sorghum saccharatum, Sorghum vulgare, Andropogon drummondii, Holcus bicolor, Holcus sorghum, Sorghum aethiopicum, Sorghum arundinaceum, Sorghum caffrorum, Sorghum cernuum, Sorghum dochna, Sorghum drummondii, Sorghum durra, Sorghum guineense, Sorghum lanceolatum, Sorghum nervosum, Sorghum saccharatum, Sorghum subglabrescens, Sorghum verticilliflorum, Sorghum vulgare, Holcus halepensis, Sorghum miliaceum millet, Panicum militaceum [Sorghum, millet], Oryza sativa, Oryza latifolia [rice], Zea mays [corn, maize] Triticum aestivum, Triticum durum, Triticum turgidum, Triticum hybernum, Triticum macha, Triticum sativum or Triticum vulgare [wheat, bread wheat, common wheat], Proteaceae such as the genera Macadamia e.g. the species Macadamia intergrifolia [macadamia]; Rubiaceae such as the genera Coffea e.g. the species Cofea spp., Coffea arabica, Coffea canephora or Coffea liberica [coffee]; Scrophulariaceae such as the genera Verbascum e.g. the species Verbascum blattaria, Verbascum chaixii, Verbascum densiflorum, Verbascum lagurus, Verbascum longifolium, Verbascum lychnitis, Verbascum nigrum, Verbascum olympicum, Verbascum phlomoides, Verbascum phoenicum, Verbascum pulverulentum or Verbascum thapsus [mullein, white moth mullein, nettle-leaved mullein, dense-flowered mullein, silver mullein, long-leaved mullein, white mullein, dark mullein, greek mullein, orange mullein, purple mullein, hoary mullein, great mullein]; Solanaceae such as the genera Capsicum, Nicotiana, Solanum, Lycopersicon e.g. the species Capsicum annuum, Capsicum annuum var. glabriusculum, Capsicum frutescens [pepper], Capsicum annuum [paprika], Nicotiana tabacum, Nicotiana alata, Nicotiana attenuata, Nicotiana glauca, Nicotiana langsdorffii, Nicotiana obtusifolia, Nicotiana quadrivalvis, Nicotiana repanda, Nicotiana rustica, Nicotiana sylvestris [tobacco], Solanum tuberosum [potato], Solanum melongena [egg-plant] (Lycopersicon esculentum, Lycopersicon lycopersicum, Lycopersicon pyriforme, Solanum integrifolium or Solanum lycopersicum [tomato]; Sterculiaceae such as the genera Theobroma e.g. the species Theobroma cacao [cacao]; Theaceae such as the genera Camellia e.g. the species Camellia sinensis) [tea].

[0589] The introduction of the nucleic acids according to the invention, the expression cassette or the vector into organisms, plants for example, can in principle be done by all of the methods known to those skilled in the art. The introduction of the nucleic acid sequences gives rise to recombinant or transgenic organisms.

[0590] The transfer of foreign genes into the genome of a plant is called transformation. In doing this the methods described for the transformation and regeneration of plants from plant tissues or plant cells are utilized for transient or stable transformation. Suitable methods are protoplast transformation by poly(ethylene glycol)-induced DNA uptake, the “biolistic” method using the gene cannon—referred to as the particle bombardment method, electroporation, the incubation of dry embryos in DNA solution, microinjection and gene transfer mediated by Agrobacterium. Said methods are described by way of example in Jenes B. et al., Techniques for Gene Transfer, in: Transgenic Plants, Vol. 1, Engineering and Utilization, eds. Kung S. D and Wu R., Academic Press (1993) 128-143 and in Potrykus, Annu. Rev. Plant Physiol. Plant Molec. Biol. 42, 205 (1991). The nucleic acids or the construct to be expressed is preferably cloned into a vector which is suitable for transforming Agrobacterium tumefaciens, for example pBin19 (Bevan et al., Nucl. Acids Res. 12, 8711 (1984)). Agrobacteria transformed by such a vector can then be used in known manner for the trans-formation of plants, in particular of crop plants such as by way of example tobacco plants, for example by bathing bruised leaves or chopped leaves in an agrobacterial solution and then culturing them in suitable media. The transformation of plants by means of Agrobacterium tumefaciens is described, for example, by Höfgen and Willmitzer in Nucl. Acid Res. 16, 9877 (1988) or is known inter alia from White F. F., Vectors for Gene Transfer in Higher Plants; in Transgenic Plants, Vol. 1, Engineering and Utilization, eds. Kung S. D. and Wu R., Academic Press, 1993, pp. 15-38.

[0591] Agrobacteria transformed by an expression vector according to the invention may likewise be used in known manner for the transformation of plants such as test plants like Arabidopsis or crop plants such as cereal crops, corn, oats, rye, barley, wheat, soybean, rice, cotton, sugar beet, canola, sunflower, flax, hemp, potatoes, tobacco, tomatoes, carrots, paprika, oilseed rape, tapioca, cassaya, arrowroot, tagetes, alfalfa, lettuce and the various tree, nut and vine species, in particular oil-containing crop plants such as soybean, peanut, castor oil plant, sunflower, corn, cotton, flax, oilseed rape, coconut, oil palm, safflower (Carthamus tinctorius) or cocoa bean, or in particular corn, wheat, soybean, rice, cotton and canola, e.g. by bathing bruised leaves or chopped leaves in an agrobacterial solution and then culturing them in suitable media.

[0592] The genetically modified plant cells may be regenerated by all of the methods known to those skilled in the art. Appropriate methods can be found in the publications referred to above by Kung S. D. and Wu R., Potrykus or Hofgen and Willmitzer. Accordingly, a further aspect of the invention relates to transgenic organisms transformed by at least one nucleic acid sequence, expression cassette or vector according to the invention as well as cells, cell cultures, tissue, parts—such as, for example, leaves, roots, etc. in the case of plant organisms—or reproductive material derived from such organisms.

[0593] In one embodiment of the invention host plants for the nucleic acid, expression cassette or vector according to the invention are selected from the group comprising corn, soy, oil seed rape (including canola and winter oil seed rape), cotton, wheat and rice.

[0594] A further embodiment of the invention relates to the use of a nucleic acid construct, e.g. an expression cassette, containing one or more DNA sequences encoding one or more polypeptides shown in table II or comprising one or more nucleic acid molecules as depicted in table I or encoding or DNA sequences hybridizing therewith for the transformation of plant cells, tissues or parts of plants.

[0595] In doing so, depending on the choice of promoter, the nucleic acid molecules or sequences shown in table I or II can be expressed specifically in the leaves, in the seeds, the nodules, in roots, in the stem or other parts of the plant. Those transgenic plants overproducing sequences, e.g. as depicted in table I, the reproductive material thereof, together with the plant cells, tissues or parts thereof are a further object of the present invention.

[0596] The expression cassette or the nucleic acid sequences or construct according to the invention containing nucleic acid molecules or sequences according to table I can, moreover, also be employed for the transformation of the organisms identified by way of example above such as bacteria, yeasts, filamentous fungi and plants.

[0597] Within the framework of the present invention, increased yield, e.g. an increased yield-related trait, for example enhanced tolerance to abiotic environmental stress, for example an increased drought tolerance and/or low temperature tolerance and/or an increased nutrient use efficiency, intrinsic yield and/or another mentioned yield-related trait relates to, for example, the artificially acquired trait of increased yield, e.g. an increased yield-related trait, for example enhanced tolerance to abiotic environmental stress, for example an increased drought tolerance and/or low temperature tolerance and/or an increased nutrient use efficiency, intrinsic yield and/or another mentioned yield-related trait, by comparison with the non-genetically modified initial plants e.g. the trait acquired by genetic modification of the target organism, and due to functional over-expression of one or more polypeptide (sequences) of table II, e.g. encoded by the corresponding nucleic acid molecules as depicted in table I, column 5 or 7, and/or homologs, in the organisms according to the invention, advantageously in the transgenic plant according to the invention or produced according to the method of the invention, at least for the duration of at least one plant generation.

[0598] A constitutive expression of the polypeptide sequences of table II, encoded by the corresponding nucleic acid molecule as depicted in table I, column 5 or 7 and/or homologs is, moreover, advantageous. On the other hand, however, an inducible expression may also appear desirable. Expression of the polypeptide sequences of the invention can be either direct to the cytoplasm or the organelles, preferably the plastids of the host cells, preferably the plant cells.

[0599] The efficiency of the expression of the sequences of the of table II, encoded by the corresponding nucleic acid molecule as depicted in table I, column 5 or 7 and/or homologs can be determined, for example, in vitro by shoot meristem propagation. In addition, an expression of the sequences of table II, encoded by the corresponding nucleic acid molecule as depicted in table I, column 5 or 7 and/or homologs modified in nature and level and its effect on yield, e.g. on an increased yield-related trait, for example enhanced tolerance to abiotic environmental stress, for example an increased drought tolerance and/or low temperature tolerance and/or an increased nutrient use efficiency, but also on the metabolic pathways performance can be tested on test plants in greenhouse trials.

[0600] An additional object of the invention comprises transgenic organisms such as transgenic plants transformed by an expression cassette containing sequences of as depicted in table I, column 5 or 7 according to the invention or DNA sequences hybridizing therewith, as well as transgenic cells, tissue, parts and reproduction material of such plants. Particular preference is given in this case to transgenic crop plants such as by way of example barley, wheat, rye, oats, corn, soybean, rice, cotton, sugar beet, oilseed rape and canola, sunflower, flax, hemp, thistle, potatoes, tobacco, tomatoes, tapioca, cassaya, arrowroot, alfalfa, lettuce and the various tree, nut and vine species.

[0601] In one embodiment of the invention transgenic plants transformed by an expression cassette containing or comprising nucleic acid molecules or sequences as depicted in table I, column 5 or 7, in particular of table IIB, according to the invention or DNA sequences hybridizing therewith are selected from the group comprising corn, soy, oil seed rape (including canola and winter oil seed rape), cotton, wheat and rice.

[0602] For the purposes of the invention plants are mono- and dicotyledonous plants, mosses or algae, especially plants, for example in one embodiment monocotyledonous plants, or for example in another embodiment dicotyledonous plants. A further refinement according to the invention are transgenic plants as described above which contain a nucleic acid sequence or construct according to the invention or a expression cassette according to the invention.

[0603] However, transgenic also means that the nucleic acids according to the invention are located at their natural position in the genome of an organism, but that the sequence, e.g. the coding sequence or a regulatory sequence, for example the promoter sequence, has been modified in comparison with the natural sequence. Preferably, transgenic/recombinant is to be understood as meaning the transcription of one or more nucleic acids or molecules of the invention and being shown in table I, occurs at a non-natural position in the genome. In one embodiment, the expression of the nucleic acids or molecules is homologous. In another embodiment, the expression of the nucleic acids or molecules is heterologous. This expression can be transiently or of a sequence integrated stably into the genome.

[0604] Advantageous inducible plant promoters are by way of example the PRP1 promoter (Ward et al., Plant. Mol. Biol. 22361 (1993)), a promoter inducible by benzenesulfonamide (EP 388 186), a promoter inducible by tetracycline (Gatz et al., Plant J. 2, 397 (1992)), a promoter inducible by salicylic acid (WO 95/19443), a promoter inducible by abscisic acid (EP 335 528) and a promoter inducible by ethanol or cyclohexanone (WO 93/21334). Other examples of plant promoters which can advantageously be used are the promoter of cytoplasmic FBPase from potato, the ST-LSI promoter from potato (Stockhaus et al., EMBO J. 8, 2445 (1989)), the promoter of phosphoribosyl pyrophosphate amidotrans-ferase from Glycine max (see also gene bank accession number U87999) or a nodienespecific promoter as described in EP 249 676.

[0605] Particular advantageous are those promoters which ensure expression upon onset of abiotic stress conditions. Advantageous are those promoters which ensure expression upon conditions of limited nutrient availability, e.g. the onset of limited nitrogen sources in case the nitrogen of the soil or nutrient is exhausted, e.g. for the expression of the nucleic acid molecules or their gene products as shown in table VIIIa.

[0606] Such promoters are known to the person skilled in the art or can be isolated from genes which are induced under the conditions mentioned above. In one embodiment, seed-specific promoters may be used for monocotylodonous or dicotylodonous plants.

[0607] In principle all natural promoters with their regulation sequences can be used like those named above for the expression cassette according to the invention and the method according to the invention. Over and above this, synthetic promoters may also advantageously be used. In the preparation of an expression cassette various DNA fragments can be manipulated in order to obtain a nucleotide sequence, which usefully reads in the correct direction and is equipped with a correct reading frame. To connect the DNA fragments (=nucleic acids according to the invention) to one another adaptors or linkers may be attached to the fragments. The promoter and the terminator regions can usefully be provided in the transcription direction with a linker or polylinker containing one or more restriction points for the insertion of this sequence. Generally, the linker has 1 to 10, mostly 1 to 8, preferably 2 to 6, restriction points. In general the size of the linker inside the regulatory region is less than 100 bp, frequently less than 60 bp, but at least 5 bp. The promoter may be both native or homologous as well as foreign or heterologous to the host organism, for example to the host plant. In the 5′-3′ transcription direction the expression cassette contains the promoter, a DNA sequence which shown in table I and a region for transcription termination. Different termination regions can be exchanged for one another in any desired fashion.

[0608] A nucleic acid molecule of the present invention, e.g., a nucleic acid molecule encoding a polypeptide which confers increased yield, e.g. an increased yield-related trait, e.g. an enhanced tolerance to abiotic environmental stress and/or increased nutrient use efficiency and/or enhanced cycling drought tolerance in plants, can be isolated using standard molecular biological techniques and the sequence information provided herein. For example, an A. thaliana polypeptide encoding cDNA can be isolated from a A. thaliana cDNA library or a Synechocystis sp., Brassica napus, Glycine max, Zea mays or Oryza sativa polpypeptide encoding cDNA can be isolated from a Synechocystis sp., Brassica napus, Glycine max, Zea mays or Oryza sativa c-DNA library respectively using all or portion of one of the sequences shown in table I. Moreover, a nucleic acid molecule encompassing all or a portion of one of the sequences of table I can be isolated by the polymerase chain reaction using oligonucleotide primers designed based upon this sequence. For example, mRNA can be isolated from plant cells (e.g., by the guanidinium-thiocyanate extraction procedure of Chirgwin et al., Biochemistry 18, 5294 (1979)) and cDNA can be prepared using reverse transcriptase (e.g., Moloney MLV reverse transcriptase, available from Gibco/BRL, Bethesda, Md.; or AMV reverse transcriptase, available from Seikagaku America, Inc., St. Petersburg, Fla.). Synthetic oligonucleotide primers for polymerase chain reaction amplification can be designed based upon one of the nucleotide sequences shown in table I. A nucleic acid molecule of the invention can be amplified using cDNA or, alternatively, genomic DNA, as a template and appropriate oligonucleotide primers according to standard PCR amplification techniques. The nucleic acid molecule so amplified can be cloned into an appropriate vector and characterized by DNA sequence analysis. Furthermore, the genes employed in the present invention can be prepared by standard synthetic techniques, e.g., using a commercially available automated DNA synthesizer.

[0609] In a embodiment, an isolated nucleic acid molecule of the invention comprises one of the nucleotide sequences or molecules as shown in table I. Moreover, the nucleic acid molecule of the invention can comprise only a portion of the coding region of one of the sequences or molecules of a nucleic acid of table I, for example, a fragment which can be used as a probe or primer or a fragment encoding a biologically active portion of a polypeptide-according to invention.

[0610] Portions of proteins encoded by the polypeptide according to the invention or a polypeptide encoding nucleic acid molecules of the invention are preferably biologically active portions described herein. As used herein, the term “biologically active portion of” a polypeptide is intended to include a portion, e.g. a domain/motif, of increased yield, e.g. increased or enhanced an yield related trait, e.g. increased the low temperature resistance and/or tolerance related protein that participates in an enhanced nutrient use efficiency e.g. nitrogen use efficency efficiency, and/or increased intrinsic yield in a plant. To determine whether a polypeptide according to the invention, or a biologically active portion thereof, results in an increased yield, e.g. increased or enhanced an yield related trait, e.g. increased the low temperature resistance and/or tolerance related protein that participates in an enhanced nutrient use efficiency, e.g. nitrogen use efficency efficiency and/or increased intrinsic yield in a plant, an analysis of a plant comprising the polypeptidemay be performed. Such analysis methods are well known to those skilled in the art, as detailed in the Examples. More specifically, nucleic acid fragments encoding biologically active portions of a polypeptide can be prepared by isolating a portion of one of the sequences of the nucleic acid molecules listed in table I expressing the encoded portion of the polypeptide or peptide thereof (e.g., by recombinant expression in vitro) and assessing the activity of the encoded portion.

[0611] Biologically active portions of the polypeptide according to the inventionare encompassed by the present invention and include peptides comprising amino acid sequences derived from the amino acid sequence of the polypeptide encoding gene, or the amino acid sequence of a protein homologous to the polypeptide according to the invention, which include fewer amino acids than a full length polypeptide according to the invention or the full length protein which is homologous to the polypeptide according to the invention, and exhibits at least some enzymatic or biological activity of the polypeptide according to the invention. Typically, biologically active portions (e.g., peptides which are, for example, 5, 10, 15, 20, 30, 35, 36, 37, 38, 39, 40, 50, 100 or more amino acids in length) comprise a domain or motif with at least one activity of the polypeptide according to the invention. Moreover, other biologically active portions in which other regions of the protein are deleted, can be prepared by recombinant techniques and evaluated for one or more of the activities described herein. Preferably, the biologically active portions of the polypeptide according to the invention include one or more selected domains/motifs or portions thereof having biological activity.

[0612] The term “biological active portion” or “biological activity” means a polypeptide as depicted in table II, column 3 or a portion of said polypeptide which still has at least 10% or 20%, preferably 30%, 40%, 50% or 60%, especially preferably 70%, 75%, 80%, 90% or 95% of the enzymatic or biological activity of the natural or starting enzyme or protein.

[0613] In the process according to the invention nucleic acid sequences or molecules can be used, which, if appropriate, contain synthetic, non-natural or modified nucleotide bases, which can be incorporated into DNA or RNA. Said synthetic, non-natural or modified bases can for example increase the stability of the nucleic acid molecule outside or inside a cell. The nucleic acid molecules of the invention can contain the same modifications as aforementioned.

[0614] As used in the present context the term “nucleic acid molecule” may also encompass the untranslated sequence or molecule located at the 3′ and at the 5′ end of the coding gene region, for example at least 500, preferably 200, especially preferably 100, nucleotides of the sequence upstream of the 5′ end of the coding region and at least 100, preferably 50, especially preferably 20, nucleotides of the sequence downstream of the 3′ end of the coding gene region. It is often advantageous only to choose the coding region for cloning and expression purposes.

[0615] Preferably, the nucleic acid molecule used in the process according to the invention or the nucleic acid molecule of the invention is an isolated nucleic acid molecule. In one embodiment, the nucleic acid molecule of the invention is the nucleic acid molecule used in the process of the invention.

[0616] In various embodiments, the isolated nucleic acid molecule used in the process according to the invention may, for example comprise less than approximately 5 kb, 4 kb, 3 kb, 2 kb, 1 kb, 0.5 kb or 0.1 kb nucleotide sequences which naturally flank the nucleic acid molecule in the genomic DNA of the cell from which the nucleic acid molecule originates.

[0617] The nucleic acid molecules used in the process, for example the polynucleotide of the invention or of a part thereof can be isolated using molecular-biological standard techniques and the sequence information provided herein. Also, for example a homologous sequence or homologous, conserved sequence regions at the DNA or amino acid level can be identified with the aid of comparison algorithms. The former can be used as hybridization probes under standard hybridization techniques (for example those described in Sambrook et al., supra) for isolating further nucleic acid sequences useful in this process.

[0618] A nucleic acid molecule encompassing a complete sequence of the nucleic acid molecules used in the process, for example the polynucleotide of the invention, or a part thereof may additionally be isolated by polymerase chain reaction, oligonucleotide primers based on this sequence or on parts thereof being used. For example, a nucleic acid molecule comprising the complete sequence or part thereof can be isolated by polymerase chain reaction using oligonucleotide primers which have been generated on the basis of this very sequence. For example, mRNA can be isolated from cells (for example by means of the guanidinium thiocyanate extraction method of Chirgwin et al., Biochemistry 18, 5294 (1979)) and cDNA can be generated by means of reverse transcriptase (for example Moloney, MLV reverse transcriptase, available from Gibco/BRL, Bethesda, Md., or AMV reverse transcriptase, obtainable from Seikagaku America, Inc., St. Petersburg, Fla.).

[0619] Synthetic oligonucleotide primers for the amplification by means of polymerase chain reaction can be generated on the basis of a sequence shown herein, using known methods.

[0620] Moreover, it is possible to identify a conserved protein by carrying out protein sequence alignments with the polypeptide encoded by the nucleic acid molecules of the present invention, in particular with the sequences encoded by the nucleic acid molecule shown in column 5 or 7 of table I, from which conserved regions, and in turn, degenerate primers can be derived. Conserved regions are those, which show a very little variation in the amino acid in one particular position of several homologs from different origin. The consensus sequence and polypeptide motifs shown in column 7 of table IV, are derived from said alignments. Moreover, it is possible to identify conserved regions from various organisms by carrying out protein sequence alignments with the polypeptide encoded by the nucleic acid of the present invention, in particular with the sequences encoded by the polypeptide molecule shown in column 5 or 7 of table II, from which conserved regions, and in turn, degenerate primers can be derived.

[0621] In one advantageous embodiment, in the method of the present invention the activity of a polypeptide comprising or consisting of a consensus sequence or a polypeptide motif shown in table IV, column 7 is increased and in one another embodiment, the present invention relates to a polypeptide comprising or consisting of a consensus sequence or a polypeptide motif shown in table IV, column 7 whereby less than 20, preferably less than 15 or 10, preferably less than 9, 8, 7, or 6, more preferred less than 5 or 4, even more preferred less then 3, even more preferred less then 2, even more preferred 0 of the amino acids positions indicated can be replaced by any amino acid. In one embodiment not more than 15%, preferably 10%, even more preferred 5%, 4%, 3%, or 2%, most preferred 1% or 0% of the amino acid position indicated by a letter are/is replaced another amino acid. In one embodiment less than 20, preferably less than 15 or 10, preferably less than 9, 8, 7, or 6, more preferred less than 5 or 4, even more preferred less than 3, even more preferred less than 2, even more preferred 0 amino acids are inserted into a consensus sequence or protein motif.

[0622] The consensus sequence was derived from a multiple alignment of the sequences as listed in table II. The letters represent the one letter amino acid code and indicate that the amino acids are conserved in at least 80% of the aligned proteins, whereas the letter X stands for amino acids, which are not conserved in at least 80% of the aligned sequences. The consensus sequence starts with the first conserved amino acid in the alignment, and ends with the last conserved amino acid in the alignment of the investigated sequences. The number of given X indicates the distances between conserved amino acid residues, e.g. Y-x(21,23)-F means that conserved tyrosine and phenylalanine residues in the alignment are separated from each other by minimum 21 and maximum 23 amino acid residues in the alignment of all investigated sequences.

[0623] Conserved domains were identified from all sequences and are described using a subset of the standard Prosite notation, e.g. the pattern Y-x(21,23)-[FW] means that a conserved tyrosine is separated by minimum 21 and maximum 23 amino acid residues from either a phenylalanine or tryptophane. Patterns had to match at least 80% of the investigated proteins. Conserved patterns were identified with the software tool MEME version 3.5.1 or manually. MEME is described by Timothy L. Bailey and Charles Elkan (ProceedIngs of the Second International Conference on Intelligent Systems for Molecular Biology, pp. 28-36, AAAI Press, Menlo Park, Calif., 1994). The source code for the stand-alone program is publicly available from the San Diego Supercomputer centre. For identifying common motifs in all sequences with the software tool MEME, the following settings were used: -maxsize 500000, -nmotifs 15, -evt 0.001, -maxw 60, -distance 1e-3, -minsites number of sequences used for the analysis. Input sequences for MEME were non-aligned sequences in Fasta format. Other parameters were used in the default settings in this software version. Prosite patterns for conserved domains were generated with the software tool Pratt version 2.1 or manually. Pratt was developed by Inge Jonassen, Dept. of Informatics, University of Bergen, Norway and is described by Jonassen et al. (I. Jonassen, J. F. Collins and D. G. Higgins, Protein Science 4 (1995), pp. 1587-1595; I. Jonassen, Efficient discovery of conserved patterns using a pattern graph, Submitted to CABIOS Febr. 1997]. The source code (ANSI C) for the stand-alone program is public available, e.g. at establisched Bioinformatic centers like EBI (European Bioinformatics Institute). For generating patterns with the software tool Pratt, following settings were used: PL (max Pattern Length): 100, PN (max Nr of Pattern Symbols): 100, PX (max Nr of consecutive x's): 30, FN (max Nr of flexible spacers): 5, FL (max Flexibility): 30, FP (max Flex. Product): 10, ON (max number patterns): 50. Input sequences for Pratt were distinct regions of the protein sequences exhibiting high similarity as identified from software tool MEME. The minimum number of sequences, which have to match the generated patterns (CM, min Nr of Seqs to Match) was set to at least 80% of the provided sequences. Parameters not mentioned here were used in their default settings. The Prosite patterns of the conserved domains can be used to search for protein sequences matching this pattern. Various established Bioinformatic centres provide public internet portals for using those patterns in database searches (e.g. PIR (Protein Information Resource, located at Georgetown University Medical Center) or ExPASy (Expert Protein Analysis System)). Alternatively, stand-alone software is available, like the program Fuzzpro, which is part of the EMBOSS software package. For example, the program Fuzzpro not only allows to search for an exact pattern-protein match but also allows to set various ambiguities in the performed search.

[0624] The alignment was performed with the software ClustalW (version 1.83) and is described by Thompson et al. (Nucleic Acids Research 22, 4673 (1994)). The source code for the stand-alone program ispublicly available from the European Molecular Biology Laboratory; Heidelberg, Germany. The analysis was performed using the default parameters of ClustalW v1.83 (gap open penalty: 10.0; gap extension penalty: 0.2; protein matrix: Gonnet; protein/DNA endgap: -1; protein/DNA gapdist: 4).

[0625] For identification of protein domains as defined in the Pfam Protein Families Database, protein sequences were searched using the hmmscan algorithm. hmmscan is part of the HMMER3 software package that is public available from the Howard Hughes Medical Institute, Janelia Farm Research Campus (http://hmmer.org/). Search for Pfam domains was done using realease 24.0 (released October 2009) of the Pfam Protein Families Database (http://pfam.sanger.ac.uk/). Parameters for hmmscan algorithm were the default parameters inplemented in hmmscan (HMMER release 3.0). Domains reported by the hmmscan algorithm were taken into account if the independent E-value was 0.1 or better and if at least 90% of the PFAM domain model length was covered by the alignment.

[0626] Degenerate primers can then be utilized by PCR for the amplification of fragments of novel proteins having above-mentioned activity, e.g. conferring increased yield, e.g. the increased yield-related trait, in particular, the enhanced tolerance to abiotic environmental stress, e.g. low temperature tolerance, cycling drought tolerance, water use efficiency, nutrient (e.g. nitrogen) use efficiency and/or increased intrinsic yield as compared to a corresponding, e.g. non-transformed, wild type plant cell, plant or part thereof after increasing the expression or activity or having the activity of a protein as shown in table II, column 3 or further functional homologs of the polypeptide of the invention from other or ganisms.

[0627] These fragments can then be utilized as hybridization probe for isolating the complete gene sequence. As an alternative, the missing 5′ and 3′ sequences can be isolated by means of RACE-PCR. A nucleic acid molecule according to the invention can be amplified using cDNA or, as an alternative, genomic DNA as template and suitable oligonucleotide primers, following standard PCR amplification techniques. The nucleic acid molecule amplified thus can be cloned into a suitable vector and characterized by means of DNA sequence analysis. Oligonucleotides, which correspond to one of the nucleic acid molecules used in the process can be generated by standard synthesis methods, for example using an automatic DNA synthesizer.

[0628] Nucleic acid molecules which are advantageously for the process according to the invention can be isolated based on their homology to the nucleic acid molecules disclosed herein using the sequences or part thereof as or for the generation of a hybridization probe and following standard hybridization techniques under stringent hybridization conditions. In this context, it is possible to use, for example, isolated one or more nucleic acid molecules of at least 15, 20, 25, 30, 35, 40, 50, 60 or more nucleotides, preferably of at least 15, 20 or 25 nucleotides in length which hybridize under stringent conditions with the above-described nucleic acid molecules, in particular with those which encompass a nucleotide sequence of the nucleic acid molecule used in the process of the invention or encoding a protein used in the invention or of the nucleic acid molecule of the invention. Nucleic acid molecules with 30, 50, 100, 250 or more nucleotides may also be used.

[0629] By “hybridizing” it is meant that such nucleic acid molecules hybridize under conventional hybridization conditions, preferably under stringent conditions such as described by, e.g., Sambrook (Molecular Cloning; A Laboratory Manual, 2nd Edition, Cold Spring Harbor Laboratory Press, Cold Spring Harbor, N.Y. (1989)) or in Current Protocols in Molecular Biology, John Wiley & Sons, N.Y. (1989), 6.3.1-6.3.6.

[0630] According to the invention, DNA as well as RNA molecules of the nucleic acid of the invention can be used as probes. Further, as template for the identification of functional homologues Northern blot assays as well as Southern blot assays can be performed. The Northern blot assay advantageously provides further information about the expressed gene product: e.g. expression pattern, occurrence of processing steps, like splicing and capping, etc. The Southern blot assay provides additional information about the chromosomal localization and organization of the gene encoding the nucleic acid molecule of the invention.

[0631] A preferred, non-limiting example of stringent hybridization conditions are hybridizations in 6× sodium chloride/sodium citrate (═SSC) at approximately 45° C., followed by one or more wash steps in 0.2×SSC, 0.1% SDS at 50 to 65° C., for example at 50° C., 55° C. or 60° C. The skilled worker knows that these hybridization conditions differ as a function of the type of the nucleic acid and, for example when organic solvents are present, with regard to the temperature and concentration of the buffer. The temperature under “standard hybridization conditions” differs for example as a function of the type of the nucleic acid between 42° C. and 58° C., preferably between 45° C. and 50° C. in an aqueous buffer with a concentration of 0.1×, 0.5×, 1×, 2×, 3×, 4× or 5×SSC (pH 7.2). If organic solvent(s) is/are present in the abovementioned buffer, for example 50% formamide, the temperature under standard conditions is approximately 40° C., 42° C. or 45° C. The hybridization conditions for DNA:DNA hybrids are preferably for example 0.1×SSC and 20° C., 25° C., 30° C., 35° C., 40° C. or 45° C., preferably between 30° C. and 45° C. The hybridization conditions for DNA:RNA hybrids are preferably for example 0.1×SSC and 30° C., 35° C., 40° C., 45° C., 50° C. or 55° C., preferably between 45° C. and 55° C. The abovementioned hybridization temperatures are determined for example for a nucleic acid approximately 100 by (=base pairs) in length and a G+C content of 50% in the absence of formamide. The skilled worker knows to determine the hybridization conditions required with the aid of textbooks, for example the ones mentioned above, or from the following textbooks: Sambrook et al., “Molecular Cloning”, Cold Spring Harbor Laboratory, 1989; Hames and Higgins (Ed.) 1985, “Nucleic Acids Hybridization: A Practical Approach”, IRL Press at Oxford University Press, Oxford; Brown (Ed.) 1991, “Essential Molecular Biology: A Practical Approach”, IRL Press at Oxford University Press, Oxford.

[0632] A further example of one such stringent hybridization condition is hybridization at 4×SSC at 65° C., followed by a washing in 0.1×SSC at 65° C. for one hour. Alternatively, an exemplary stringent hybridization condition is in 50% formamide, 4×SSC at 42° C. Further, the conditions during the wash step can be selected from the range of conditions delimited by low-stringency conditions (approximately 2×SSC at 50° C.) and high-stringency conditions (approximately 0.2×SSC at 50° C., preferably at 65° C.) (20×SSC: 0.3 M sodium citrate, 3 M NaCl, pH 7.0). In addition, the temperature during the wash step can be raised from low-stringency conditions at room temperature, approximately 22° C., to higherstringency conditions at approximately 65° C. Both of the parameters salt concentration and temperature can be varied simultaneously, or else one of the two parameters can be kept constant while only the other is varied. Denaturants, for example formamide or SDS, may also be employed during the hybridization. In the presence of 50% formamide, hybridization is preferably effected at 42° C. Relevant factors like 1) length of treatment, 2) salt conditions, 3) detergent conditions, 4) competitor DNAs, 5) temperature and 6) probe selection can be combined case by case so that not all possibilities can be mentioned herein.

[0633] Thus, in a preferred embodiment, Northern blots are prehybridized with RothiHybri-Quick buffer (Roth, Karlsruhe) at 68° C. for 2 h. Hybridization with radioactive labelled probe is done overnight at 68° C. Subsequent washing steps are performed at 68° C. with 1×SSC. For Southern blot assays the membrane is prehybridized with Rothi-Hybri-Quick buffer (Roth, Karlsruhe) at 68° C. for 2 h. The hybridzation with radioactive labelled probe is conducted over night at 68° C. Subsequently the hybridization buffer is discarded and the filter shortly washed using 2×SSC; 0.1% SDS. After discarding the washing buffer new 2×SSC; 0.1% SDS buffer is added and incubated at 68° C. for 15 minutes. This washing step is performed twice followed by an additional washing step using 1×SSC; 0.1% SDS at 68° C. for 10 min.

[0634] Some examples of conditions for DNA hybridization (Southern blot assays) and wash step are shown herein below:

[0635] (1) Hybridization conditions can be selected, for example, from the following conditions:

[0636] (a) 4×SSC at 65° C.,

[0637] (b) 6×SSC at 45° C.,

[0638] (c) 6×SSC, 100 mg/ml denatured fragmented fish sperm DNA at 68° C.,

[0639] (d) 6×SSC, 0.5% SDS, 100 mg/ml denatured salmon sperm DNA at 68° C.,

[0640] (e) 6×SSC, 0.5% SDS, 100 mg/ml denatured fragmented salmon sperm DNA, 50% formamide at 42° C.,

[0641] (f) 50% formamide, 4×SSC at 42° C.,

[0642] (g) 50% (v/v) formamide, 0.1% bovine serum albumin, 0.1% Ficoll, 0.1% polyvinylpyrrolidone, 50 mM sodium phosphate buffer pH 6.5, 750 mM NaCl, 75 mM sodium citrate at 42° C.,

[0643] (h) 2× or 4×SSC at 50° C. (low-stringency condition), or

[0644] (i) 30 to 40% formamide, 2× or 4×SSC at 42° C. (low-stringency condition).

[0645] (2) Wash steps can be selected, for example, from the following conditions:

[0646] (a) 0.015 M NaCl/0.0015 M sodium citrate/0.1% SDS at 50° C.

[0647] (b) 0.1×SSC at 65° C.

[0648] (c) 0.1×SSC, 0.5% SDS at 68° C.

[0649] (d) 0.1×SSC, 0.5% SDS, 50% formamide at 42° C.

[0650] (e) 0.2×SSC, 0.1% SDS at 42° C.

[0651] (f) 2×SSC at 65° C. (low-stringency condition).

[0652] Polypeptides having above-mentioned activity, i.e. conferring increased yield, e.g. an increased yield-related trait as mentioned herein, e.g. increased abiotic stress tolerance, e.g. low temperature tolerance, e.g. with increased nutrient use efficiency, and/or water use efficiency and/or increased intrinsic yield as compared to a corresponding, e.g. non-transformed, wild type plant cell, plant or part thereof, derived from other organisms, can be encoded by other DNA sequences which hybridize to the sequences shown in table I, columns 5 and 7 under relaxed hybridization conditions and which code on expression for peptides conferring the increased yield, e.g. an increased yield-related trait as mentioned herein, e.g. increased abiotic stress tolerance, e.g. low temperature tolerance or enhanced cold tolerance, e.g. with increased nutrient use efficiency, and/or water use efficiency and/or increased intrinsic yield, as compared to a corresponding, e.g. non-transformed, wild type plant cell, plant or part thereof.

[0653] Further, some applications have to be performed at low stringency hybridization conditions, without any consequences for the specificity of the hybridization. For example, a Southern blot analysis of total DNA could be probed with a nucleic acid molecule of the present invention and washed at low stringency (55° C. in 2×SSPE, 0.1% SDS). The hybridization analysis could reveal a simple pattern of only genes encoding polypeptides of the present invention or used in the process of the invention, e.g. having the herein-mentioned activity of enhancing the increased yield, e.g. an increased yield-related trait as mentioned herein, e.g. increased abiotic stress tolerance, e.g. increased low temperature tolerance or enhanced cold tolerance, e.g. with increased nutrient use efficiency, and/or water use efficiency and/or increased intrinsic yield, as compared to a corresponding, e.g. non-transformed, wild type plant cell, plant or part thereof. A further example of such low-stringent hybridization conditions is 4×SSC at 50° C. or hybridization with 30 to 40% form amide at 42° C. Such molecules comprise those which are fragments, analogues or derivatives of the polypeptide of the invention or used in the process of the invention and differ, for example, by way of amino acid and/or nucleotide deletion(s), insertion(s), substitution (s), addition(s) and/or recombination (s) or any other modification(s) known in the art either alone or in combination from the above-described amino acid sequences or their underlying nucleotide sequence(s). However, it is preferred to use high stringency hybridization conditions.

[0654] Hybridization should advantageously be carried out with fragments of at least 5, 10, 15, 20, 25, 30, 35 or 40 bp, advantageously at least 50, 60, 70 or 80 bp, preferably at least 90, 100 or 110 bp. Most preferably are fragments of at least 15, 20, 25 or 30 bp. Preferably are also hybridizations with at least 100 by or 200, very especially preferably at least 400 by in length. In an especially preferred embodiment, the hybridization should be carried out with the entire nucleic acid sequence with conditions described above.

[0655] The terms “fragment”, “fragment of a sequence” or “part of a sequence” mean a truncated sequence of the original sequence referred to. The truncated sequence (nucleic acid or protein sequence) can vary widely in length; the minimum size being a sequence of sufficient size to provide a sequence with at least a comparable function and/or activity of the original sequence or molecule referred to or hybridizing with the nucleic acid molecule of the invention or used in the process of the invention under stringent conditions, while the maximum size is not critical. In some applications, the maximum size usually is not substantially greater than that required to provide the desired activity and/or function(s) of the original sequence.

[0656] Typically, the truncated amino acid sequence or molecule will range from about 5 to about 310 amino acids in length. More typically, however, the sequence will be a maximum of about 250 amino acids in length, preferably a maximum of about 200 or 100 amino acids. It is usually desirable to select sequences of at least about 10, 12 or 15 amino acids, up to a maximum of about 20 or 25 amino acids.

[0657] The term “epitope” relates to specific immunoreactive sites within an antigen, also known as antigenic determinates. These epitopes can be a linear array of monomers in a polymeric composition—such as amino acids in a protein—or consist of or comprise a more complex secondary or tertiary structure. Those of skill will recognize that immunogens (i.e., substances capable of eliciting an immune response) are antigens; however, some antigen, such as haptens, are not immunogens but may be made immunogenic by coupling to a carrier molecule. The term “antigen” includes references to a substance to which an antibody can be generated and/or to which the antibody is specifically immunoreactive.

[0658] In one embodiment the present invention relates to a epitope of the polypeptide of the present invention or used in the process of the present invention and confers an increased yield, e.g. an increased yield-related trait as mentioned herein, e.g. increased abiotic stress tolerance, e.g. low temperature tolerance or enhanced cold tolerance, e.g. with increased nutrient use efficiency, and/or water use efficiency and/or increased intrinsic yield etc., as compared to a corresponding, e.g. non-transformed, wild type plant cell, plant or part thereof.

[0659] The term “one or several amino acids” relates to at least one amino acid but not more than that number of amino acids, which would result in a homology of below 50% identity. Preferably, the identity is more than 70% or 80%, more preferred are 85%, 90%, 91%, 92%, 93%, 94% or 95%, even more preferred are 96%, 97%, 98%, or 99% identity.

[0660] Further, the nucleic acid molecule of the invention comprises a nucleic acid molecule, which is a complement of one of the nucleotide sequences of above mentioned nucleic acid molecules or a portion thereof. A nucleic acid molecule or its sequence which is complementary to one of the nucleotide molecules or sequences shown in table I, columns 5 and 7 is one which is sufficiently complementary to one of the nucleotide molecules or sequences shown in table I, columns 5 and 7 such that it can hybridize to one of the nucleotide sequences shown in table I, columns 5 and 7, thereby forming a stable duplex. Preferably, the hybridization is performed under stringent hybrization conditions. However, a complement of one of the herein disclosed sequences is preferably a sequence complement thereto according to the base pairing of nucleic acid molecules well known to the skilled person. For example, the bases A and G undergo base pairing with the bases T and U or C, resp. and visa versa. Modifications of the bases can influence the base-pairing partner.

[0661] The nucleic acid molecule of the invention comprises a nucleotide sequence which is at least about 30%, 35%, 40% or 45%, preferably at least about 50%, 55%, 60% or 65%, more preferably at least about 70%, 80%, or 90%, and even more preferably at least about 95%, 97%, 98%, 99% or more homologous to a nucleotide sequence shown in table I, columns 5 and 7, or a portion thereof and preferably has above mentioned activity, in particular having a increasing-yield activity, e.g. increasing an yield-related trait, for example enhancing tolerance to abiotic environmental stress, for example increasing drought tolerance and/or low temperature tolerance and/or increasing nutrient use efficiency, increased intrinsic yield and/or another mentioned yield-related trait after increasing the activity or an activity of a gene as shown in table I or of a gene product, e.g. as shown in table II, column 3, by for example expression either in the cytosol or cytoplasm or in an organelle such as a plastid or mitochondria or both, preferably in plastids.

[0662] In one embodiment, the nucleic acid molecules marked in table I, column 6 with “plastidic” or gene products encoded by said nucleic acid molecules are expressed in combination with a targeting signal as described herein.

[0663] The nucleic acid molecule of the invention comprises a nucleotide sequence or molecule which hybridizes, preferably hybridizes under stringent conditions as defined herein, to one of the nucleotide sequences or molecule shown in table I, columns 5 and 7, or a portion thereof and encodes a protein having above-mentioned activity, e.g. conferring an increased yield, e.g. an increased yield-related trait, for example enhanced tolerance to abiotic environmental stress, for example an increased drought tolerance and/or low temperature tolerance and/or an increased nutrient use efficiency, increased intrinsic yield and/or another mentioned yield-related trait as compared to a corresponding, e.g. non-transformed, wild type plant cell, plant or part thereof by for example expression either in the cytosol or in an organelle such as a plastid or mitochondria or both, preferably in plastids, and optionally, the activity selected from the group consisting of 2-oxoglutaratedependent dioxygenase, 3-ketoacyl-CoA thiolase, 3′-phosphoadenosine 5′-phosphate phosphatase, 4-diphosphocytidyl-2-C-methyl-D-erythritol kinase, 50S chloroplast ribosomal protein L21, 57972199.R01.1-protein, 60952769.R01.1-protein, 60S ribosomal protein, ABC transporter family protein, AP2 domain-containing transcription factor, argonaute protein, AT1G29250.1-protein, AT1G53885-protein, AT2G35300-protein, AT3G04620-protein, AT4G01870-protein, AT5G42380-protein, AT5G47440-protein, CDS5394-protein, CDS5401_TRUNCATED-protein, cold response protein, cullin, Cytochrome P450, delta-8 sphingolipid desaturase, galactinol synthase, glutathione-S-transferase, GTPase, haspinrelated protein, heat shock protein, heat shock transcription factor, histone H2B, jasmonatezim-domain protein, mitochondrial asparaginyl-tRNA synthetase, Oligosaccharyltransferase, OS02G44730-protein, Oxygen-evolving enhancer protein, peptidyl-prolyl cis-trans isomerase, peptidyl-prolyl cis-trans isomerase family protein, plastid lipid-associated protein, Polypyrimidine tract binding protein, PRLI-interacting factor, protein kinase, protein kinase family protein, rubisco subunit binding-protein beta subunit, serine acetyltransferase, serine hydroxymethyltransferase, small heat shock protein, S-ribosylhomocysteinase, sugar transporter, Thioredoxin H-type, ubiquitin-conjugating enzyme, ubiquitin-protein ligase, universal stress protein family protein, and Vacuolar protein.

[0664] Moreover, the nucleic acid molecule of the invention can comprise only a portion of the coding region of one of the sequences shown in table I, columns 5 and 7, for example a fragment which can be used as a probe or primer or a fragment encoding a biologically active portion of the polypeptide of the present invention or of a polypeptide used in the process of the present invention, i.e. having above-mentioned activity, e.g. conferring an increased yield, e.g. with an increased yield-related trait, for example enhanced tolerance to abiotic environmental stress, for example an increased drought tolerance and/or low temperature tolerance and/or an increased nutrient use efficiency, increased intrinsic yield and/or another mentioned yield-related trait as compared to a corresponding, e.g. non-transformed, wild type plant cell, plant or part thereof f its activity is increased by for example expression either in the cytosol or in an organelle such as a plastid or mitochondria or both, preferably in plastids. The nucleotide sequences determined from the cloning of the present protein-according-to-the-invention-encoding gene allows for the generation of probes and primers designed for use in identifying and/or cloning its homologues in other cell types and organisms. The probe/primer typically comprises substantially purified oligonucleotide. The oligonucleotide typically comprises a region of nucleotide sequence that hybridizes under stringent conditions to at least about 12, 15 preferably about 20 or 25, more preferably about 40, 50 or 75 consecutive nucleotides of a sense strand of one of the sequences set forth, e.g., in table I, columns 5 and 7, an anti-sense sequence of one of the sequences, e.g., set forth in table I, columns 5 and 7, or naturally occurring mutants thereof. Primers based on a nucleotide of invention can be used in PCR reactions to clone homologues of the polypeptide of the invention or of the polypeptide used in the process of the invention, e.g. as the primers described in the examples of the present invention, e.g. as shown in the examples. A PCR with the primers shown in table III, column 7 will result in a fragment of the gene product as shown in table II, column 3.

[0665] Primer sets are interchangeable. The person skilled in the art knows to combine said primers to result in the desired product, e.g. in a full length clone or a partial sequence. Probes based on the sequences of the nucleic acid molecule of the invention or used in the process of the present invention can be used to detect transcripts or genomic sequences encoding the same or homologous proteins. The probe can further comprise a label group attached thereto, e.g. the label group can be a radioisotope, a fluorescent compound, an enzyme, or an enzyme co-factor. Such probes can be used as a part of a genomic marker test kit for identifying cells which express an polypeptide of the invention or used in the process of the present invention, such as by measuring a level of an encoding nucleic acid molecule in a sample of cells, e.g., detecting mRNA levels or determining, whether a genomic gene comprising the sequence of the polynucleotide of the invention or used in the processes of the present invention has been mutated or deleted.

[0666] The nucleic acid molecule of the invention encodes a polypeptide or portion thereof which includes an amino acid sequence which is sufficiently homologous to the amino acid sequence shown in table II, columns 5 and 7 such that the protein or portion thereof maintains the ability to participate in increasing yield, e.g. increasing a yield-related trait, for example enhancing tolerance to abiotic environmental stress, for example increasing drought tolerance and/or low temperature tolerance and/or increasing nutrient use efficiency, increasing intrinsic yield and/or another mentioned yield-related trait as compared to a corresponding, e.g. non-transformed, wild type plant cell, plant or part thereof, in particular increasing the activity as mentioned above or as described in the examples in plants is comprised.

[0667] As used herein, the language “sufficiently homologous” refers to proteins or portions thereof which have amino acid sequences which include a minimum number of identical or equivalent amino acid residues (e.g., an amino acid residue which has a similar side chain as an amino acid residue in one of the sequences of the polypeptide of the present invention) to an amino acid sequence shown in table II, columns 5 and 7 such that the protein or portion thereof is able to participate in increasing yield, e.g. increasing a yield-related trait, for example enhancing tolerance to abiotic environmental stress, for example increasing drought tolerance and/or low temperature tolerance and/or increasing nutrient use efficiency, increasing intrinsic yield and/or another mentioned yield-related trait as compared to a corresponding, e.g. non-transformed, wild type plant cell, plant or part thereof. For examples having the activity of a protein as shown in table II, column 3 and as described herein.

[0668] In one embodiment, the nucleic acid molecule of the present invention comprises a nucleic acid that encodes a portion of the protein of the present invention. The protein is at least about 30%, 35%, 40%, 45% or 50%, preferably at least about 55%, 60%, 65% or 70%, and more preferably at least about 75%, 80%, 85%, 90%, 91%, 92%, 93% or 94% and most preferably at least about 95%, 97%, 98%, 99% or more homologous to an entire amino acid sequence of table II, columns 5 and 7 and having above-mentioned activity, e.g. conferring an increased yield, e.g. an increased yield-related trait, for example enhanced tolerance to abiotic environmental stress, for example an increased drought tolerance and/or low temperature tolerance and/or an increased nutrient use efficiency, intrinsic yield and/or another mentioned yield-related trait as compared to a corresponding, e.g. non-transformed, wild type plant cell, plant or part thereof by for example expression either in the cytosol or in an organelle such as a plastid or mitochondria or both, preferably in plastids.

[0669] Portions of proteins encoded by the nucleic acid molecule of the invention are preferably biologically active, preferably having above-mentioned annotated activity, e.g. conferring an increased yield, e.g. an increased yield-related trait, for example enhanced tolerance to abiotic environmental stress, for example an increased drought tolerance and/or low temperature tolerance and/or an increased nutrient use efficiency, intrinsic yield and/or another mentioned yield-related trait as compared to a corresponding, e.g. non-transformed, wild type plant cell, plant or part thereof after increase of activity.

[0670] As mentioned herein, the term “biologically active portion” is intended to include a portion, e.g., a domain/motif, that confers an increased yield, e.g. an increased yieldrelated trait, for example enhanced tolerance to abiotic environmental stress, for example an increased drought tolerance and/or low temperature tolerance and/or an increased nutrient use efficiency, intrinsic yield and/or another mentioned yield-related trait as compared to a corresponding, e.g. non-transformed, wild type plant cell, plant or part thereof or has an immunological activity such that it is binds to an antibody binding specifically to the polypeptide of the present invention or a polypeptide used in the process of the present invention for increasing yield, e.g. increasing a yield-related trait, for example enhancing tolerance to abiotic environmental stress, for example increasing drought tolerance and/or low temperature tolerance and/or increasing nutrient use efficiency, increasing intrinsic yield and/or another mentioned yield-related traitas compared to a corresponding, e.g. non-transformed, wild type plant cell, plant or part thereof.

[0671] The invention further relates to nucleic acid molecules that differ from one of the nucleotide sequences shown in table I A, columns 5 and 7 (and portions thereof) due to degeneracy of the genetic code and thus encode a polypeptide of the present invention, in particular a polypeptide having above mentioned activity, e.g. as that polypeptides depicted by the sequence shown in table II, columns 5 and 7 or the functional homologues. Advantageously, the nucleic acid molecule of the invention comprises, or in an other embodiment has, a nucleotide sequence encoding a protein comprising, or in an other embodiment having, an amino acid sequence shown in table II, columns 5 and 7 or the functional homologues. In a still further embodiment, the nucleic acid molecule of the invention encodes a full length protein which is substantially homologous to an amino acid sequence shown in table II, columns 5 and 7 or the functional homologues. However, in one embodiment, the nucleic acid molecule of the present invention does not consist of the sequence shown in table I, preferably table IA, columns 5 and 7.

[0672] In addition, it will be appreciated by those skilled in the art that DNA sequence polymorphisms that lead to changes in the amino acid sequences may exist within a population. Such genetic polymorphism in the gene encoding the polypeptide of the invention or comprising the nucleic acid molecule of the invention may exist among individuals within a population due to natural variation.

[0673] Nucleic acid molecules corresponding to natural variants homologues of a nucleic acid molecule of the invention, which can also be a cDNA, can be isolated based on their homology to the nucleic acid molecules disclosed herein using the nucleic acid molecule of the invention, or a portion thereof, as a hybridization probe according to standard hybridization techniques under stringent hybridization conditions.

[0674] Accordingly, in another embodiment, a nucleic acid molecule of the invention is at least 15, 20, 25 or 30 nucleotides in length. Preferably, it hybridizes under stringent conditions to a nucleic acid molecule comprising a nucleotide sequence of the nucleic acid molecule of the present invention or used in the process of the present invention, e.g. comprising the sequence shown in table I, columns 5 and 7. The nucleic acid molecule is preferably at least 20, 30, 50, 100, 250 or more nucleotides in length.

[0675] The term “hybridizes under stringent conditions” is defined above. In one embodiment, the term “hybridizes under stringent conditions” is intended to describe conditions for hybridization and washing under which nucleotide sequences at least 30%, 40%, 50% or 65% identical to each other typically remain hybridized to each other. Preferably, the conditions are such that sequences at least about 70%, more preferably at least about 75% or 80%, and even more preferably at least about 85%, 90% or 95% or more identical to each other typically remain hybridized to each other.

[0676] Preferably, nucleic acid molecule of the invention that hybridizes under stringent conditions to a sequence shown in table I, columns 5 and 7 corresponds to a naturallyoccurring nucleic acid molecule of the invention. As used herein, a “naturally-occurring” nucleic acid molecule refers to an RNA or DNA molecule having a nucleotide sequence that occurs in nature (e.g., encodes a natural protein). Preferably, the nucleic acid molecule encodes a natural protein having above-mentioned activity, e.g. conferring increasing yield, e.g. increasing a yield-related trait, for example enhancing tolerance to abiotic environmental stress, for example increasing drought tolerance and/or low temperature tolerance and/or increasing nutrient use efficiency, increasing intrinsic yield and/or another mentioned yield-related trait after increasing the expression or activity thereof or the activity of a protein of the invention or used in the process of the invention by for example expression the nucleic acid sequence of the gene product in the cytosol and/or in an organelle such as a plastid or mitochondria, preferably in plastids.

[0677] In addition to naturally-occurring variants of the sequences of the polypeptide or nucleic acid molecule of the invention as well as of the polypeptide or nucleic acid molecule used in the process of the invention that may exist in the population, the skilled artisan will further appreciate that changes can be introduced by mutation into a nucleotide sequence of the nucleic acid molecule encoding the polypeptide of the invention or used in the process of the present invention, thereby leading to changes in the amino acid sequence of the encoded said polypeptide, without altering the functional ability of the polypeptide, preferably not decreasing said activity.

[0678] For example, nucleotide substitutions leading to amino acid substitutions at “non-essential” amino acid residues can be made in a sequence of the nucleic acid molecule of the invention or used in the process of the invention, e.g. shown in table I, columns 5 and 7.

[0679] A “non-essential” amino acid residue is a residue that can be altered from the wild-type sequence of one without altering the activity of said polypeptide, whereas an “essential” amino acid residue is required for an activity as mentioned above, e.g. leading to increasing yield, e.g. increasing a yield-related trait, for example enhancing tolerance to abiotic environmental stress, for example increasing drought tolerance and/or low temperature tolerance and/or increasing nutrient use efficiency, increasing intrinsic yield and/or another mentioned yield-related trait as compared to a corresponding, e.g. non-transformed, wild type plant cell, plant or part thereof in an organism after an increase of activity of the polypeptide. Other amino acid residues, however, (e.g., those that are not conserved or only semi-conserved in the domain having said activity) may not be essential for activity and thus are likely to be amenable to alteration without altering said activity.

[0680] Further, a person skilled in the art knows that the codon usage between organisms can differ. Therefore, he may adapt the codon usage in the nucleic acid molecule of the present invention to the usage of the organism or the cell compartment for example of the plastid or mitochondria in which the polynucleotide or polypeptide is expressed.

[0681] Accordingly, the invention relates to nucleic acid molecules encoding a polypeptide having above-mentioned activity, in an organisms or parts thereof by for example expression either in the cytosol or in an organelle such as a plastid or mitochondria or both, preferably in plastids that contain changes in amino acid residues that are not essential for said activity. Such polypeptides differ in amino acid sequence from a sequence contained in the sequences shown in table II, columns 5 and 7 yet retain said activity described herein. The nucleic acid molecule can comprise a nucleotide sequence encoding a polypeptide, wherein the polypeptide comprises an amino acid sequence at least about 50% identical to an amino acid sequence shown in table II, columns 5 and 7 and is capable of participation in increasing yield, e.g. increasing a yield-related trait, for example enhancing tolerance to abiotic environmental stress, for example increasing drought tolerance and/or low temperature tolerance and/or increasing nutrient use efficiency, increasing intrinsic yield and/or another mentioned yield-related trait as compared to a corresponding, e.g. non-transformed, wild type plant cell, plant or part thereof after increasing its activity, e.g. its expression by for example expression either in the cytosol or in an organelle such as a plastid or mitochondria or both, preferably in plastids. Preferably, the protein encoded by the nucleic acid molecule is at least about 60% identical to the sequence shown in table II, columns 5 and 7, more preferably at least about 70% identical to one of the sequences shown in table II, columns 5 and 7, even more preferably at least about 80%, 90%, 95% homologous to the sequence shown in table II, columns 5 and 7, and most preferably at least about 96%, 97%, 98%, or 99% identical to the sequence shown in table II, columns 5 and 7.

[0682] To determine the percentage homology (=identity, herein used interchangeably) of two amino acid sequences or of two nucleic acid molecules, the sequences are written one underneath the other for an optimal comparison (for example gaps may be inserted into the sequence of a protein or of a nucleic acid in order to generate an optimal alignment with the other protein or the other nucleic acid).

[0683] The amino acid residues or nucleic acid molecules at the corresponding amino acid positions or nucleotide positions are then compared. If a position in one sequence is occupied by the same amino acid residue or the same nucleic acid molecule as the corresponding position in the other sequence, the molecules are homologous at this position (i.e. amino acid or nucleic acid “homology” as used in the present context corresponds to amino acid or nucleic acid “identity”. The percentage homology between the two sequences is a function of the number of identical positions shared by the sequences (i.e. % homology=number of identical positions/total number of positions×100). The terms “homology” and “identity” are thus to be considered as synonyms.

[0684] For the determination of the percentage homology (=identity) of two or more amino acids or of two or more nucleotide sequences several computer software programs have been developed. The homology of two or more sequences can be calculated with for example the software fasta, which presently has been used in the version fasta 3 (W. R. Pearson and D. J. Lipman, PNAS 85, 2444 (1988); W. R. Pearson, Methods in Enzymology 183, 63 (1990); W. R. Pearson and D. J. Lipman, PNAS 85, 2444 (1988); W. R. Pearson, Enzymology 183, 63 (1990)). Another useful program for the calculation of homologies of different sequences is the standard blast program, which is included in the Biomax pedant software (Biomax, Munich, Federal Republic of Germany). This leads unfortunately sometimes to suboptimal results since blast does not always include complete sequences of the subject and the querry. Nevertheless as this program is very efficient it can be used for the comparison of a huge number of sequences. The following settings are typically used for such a comparisons of sequences: -p Program Name [String]; -d Database [String]; default=nr; -i Query File [File In]; default=stdin; -e Expectation value (E) [Real]; default=10.0; m alignment view options: 0=pairwise; 1=query-anchored showing identities; 2=queryanchored no identities; 3=flat query-anchored, show identities; 4=flat query-anchored, no identities; 5=query-anchored no identities and blunt ends; 6=flat query-anchored, no identities and blunt ends; 7=XML Blast output; 8=tabular; 9 tabular with comment lines [Integer]; default=0; -o BLAST report Output File [File Out] Optional; default=stdout; -F Filter query sequence (DUST with blastn, SEG with others) [String]; default=T; -G Cost to open a gap (zero invokes default behavior) [Integer]; default=0; -E Cost to extend a gap (zero invokes default behavior) [Integer]; default=0; -X X dropoff value for gapped alignment (in bits) (zero invokes default behavior); blastn 30, megablast 20, tblastx 0, all others 15 [Integer]; default=0; -I Show GI's in deflines [T/F]; default=F; -q Penalty for a nucleotide mismatch (blastn only) [Integer]; default=−3; -r Reward for a nucleotide match (blastn only) [Integer]; default=1; -v Number of database sequences to show one-line descriptions for (V) [Integer]; default=500; -b Number of database sequence to show alignments for (B) [Integer]; default=250; -f Threshold for extending hits, default if zero; blastp 11, blastn 0, blastx 12, tblastn 13; tblastx 13, megablast 0 [Integer]; default=0; -g Perfom gapped alignment (not available with tblastx) [T/F]; default=T; -Q Query Genetic code to use [Integer]; default=1; -D DB Genetic code (for tblast[nx] only) [Integer]; default=1; -a Number of processors to use [Integer]; default=1; -O SeqAlign file [File Out] Optional; -J Believe the query defline [T/F]; default=F; -M Matrix [String]; default=BLOSUM62; -W Word size, default if zero (blastn 11, megablast 28, all others 3) [Integer]; default=0; -z Effective length of the database (use zero for the real size) [Real]; default=0; -K Number of best hits from a region to keep (off by default, if used a value of 100 is recommended) [Integer]; default=0; -P 0 for multiple hit, 1 for single hit [Integer]; default=0; -Y Effective length of the search space (use zero for the real size) [Real]; default=0; -S Query strands to search against database (for blast[nx], and tblastx); 3 is both, 1 is top, 2 is bottom [Integer]; default=3; -T Produce HTML output [T/F]; default=F; -I Restrict search of database to list of GI's [String] Optional; -U Use lower case filtering of FASTA sequence [T/F] Optional; default ═F; -y X dropoff value for ungapped extensions in bits (0.0 invokes default behavior); blastn 20, megablast 10, all others 7 [Real]; default=0.0; -Z X dropoff value for final gapped alignment in bits (0.0 invokes default behavior); blastn/megablast 50, tblastx 0, all others 25 [Integer]; default=0; -R PSI-TBLASTN checkpoint file [File In] Optional; -n MegaBlast search [T/F]; default=F; -L Location on query sequence [String] Optional; -A Multiple Hits window size, default if zero (blastn/megablast 0, all others 40 [Integer]; default=0; -w Frame shift penalty (OOF algorithm for blastx) [Integer]; default=0; -t Length of the largest intron allowed in tblastn for linking HSPs (0 disables linking) [Integer]; default=0.

[0685] Results of high quality are reached by using the algorithm of Needleman and Wunsch or Smith and Waterman. Therefore programs based on said algorithms are preferred. Advantageously the comparisons of sequences can be done with the program PileUp (J. Mol. Evolution., 25, 351 (1987), Higgins et al., CABIOS 5, 151 (1989)) or preferably with the programs “Gap” and “Needle”, which are both based on the algorithms of Needleman and Wunsch (J. Mol. Biol. 48; 443 (1970)), and “BestFit”, which is based on the algorithm of Smith and Waterman (Adv. Appl. Math. 2; 482 (1981)). “Gap” and “BestFit” are part of the GCG software-package (Genetics Computer Group, 575 Science Drive, Madison, Wis., USA 53711 (1991); Altschul et al., (Nucleic Acids Res. 25, 3389 (1997)), “Needle” is part of the The European Molecular Biology Open Software Suite (EMBOSS) (Trends in Genetics 16 (6), 276 (2000)). Therefore preferably the calculations to determine the percentages of sequence homology are done with the programs “Gap” or “Needle” over the whole range of the sequences. The following standard adjustments for the comparison of nucleic acid sequences were used for “Needle”: matrix: EDNAFULL, Gap_penalty: 10.0, Extend_penalty: 0.5. The following standard adjustments for the comparison of nucleic acid sequences were used for “Gap”: gap weight: 50, length weight: 3, average match: 10.000, average mismatch: 0.000.

[0686] For example a sequence, which has 80% homology with sequence SEQ ID NO: 63 at the nucleic acid level is understood as meaning a sequence which, upon comparison with the sequence SEQ ID NO: 63 by the above program “Needle” with the above parameter set, has a 80% homology.

[0687] Homology between two polypeptides is understood as meaning the identity of the amino acid sequence over in each case the entire sequence length which is calculated by comparison with the aid of the above program “Needle” using Matrix: EBLOSUM62, Gap_penalty: 8.0, Extend_penalty: 2.0.

[0688] For example a sequence which has a 80% homology with sequence SEQ ID NO: 64 at the protein level is understood as meaning a sequence which, upon comparison with the sequence SEQ ID NO: 64 by the above program “Needle” with the above parameter set, has a 80% homology.

[0689] Functional equivalents derived from the nucleic acid sequence as shown in table I, columns 5 and 7 according to the invention by substitution, insertion or deletion have at least 30%, 35%, 40%, 45% or 50%, preferably at least 55%, 60%, 65% or 70% by preference at least 80%, especially preferably at least 85% or 90%, 91%, 92%, 93% or 94%, very especially preferably at least 95%, 97%, 98% or 99% homology with one of the polypeptides as shown in table II, columns 5 and 7 according to the invention and encode polypeptides having essentially the same properties as the polypeptide as shown in table II, columns 5 and 7. Functional equivalents derived from one of the polypeptides as shown in table II, columns 5 and 7 according to the invention by substitution, insertion or deletion have at least 30%, 35%, 40%, 45% or 50%, preferably at least 55%, 60%, 65% or 70% by preference at least 80%, especially preferably at least 85% or 90%, 91%, 92%, 93% or 94%, very especially preferably at least 95%, 97%, 98% or 99% homology with one of the polypeptides as shown in table II, columns 5 and 7 according to the invention and having essentially the same properties as the polypeptide as shown in table II, columns 5 and 7.

[0690] “Essentially the same properties” of a functional equivalent is above all understood as meaning that the functional equivalent has above mentioned activity, by for example expression either in the cytosol or in an organelle such as a plastid or mitochondria or both, preferably in plastids while increasing the amount of protein, activity or function of said functional equivalent in an organism, e.g. a microorgansim, a plant or plant tissue or animal tissue, plant or animal cells or a part of the same.

[0691] A nucleic acid molecule encoding an homologous to a protein sequence of table II, columns 5 and 7 can be created by introducing one or more nucleotide substitutions, additions or deletions into a nucleotide sequence of the nucleic acid molecule of the present invention, in particular of table I, columns 5 and 7 such that one or more amino acid substitutions, additions or deletions are introduced into the encoded protein. Mutations can be introduced into the encoding sequences of table I, columns 5 and 7 by standard techniques, such as site-directed mutagenesis and PCR-mediated mutagenesis.

[0692] Preferably, conservative amino acid substitutions are made at one or more predicted non-essential amino acid residues. A “conservative amino acid substitution” is one in which the amino acid residue is replaced with an amino acid residue having a similar side chain. Families of amino acid residues having similar side chains have been defined in the art. These families include amino acids with basic side chains (e.g., lysine, arginine, histidine), acidic side chains (e.g., aspartic acid, glutamic acid), uncharged polar side chains (e.g., glycine, asparagine, glutamine, serine, threonine, tyrosine, cysteine), nonpolar side chains (e.g., alanine, valine, leucine, isoleucine, proline, phenylalanine, methionine, tryptophane), beta-branched side chains (e.g., threonine, valine, isoleucine) and aromatic side chains (e.g., tyrosine, phenylalanine, tryptophane, histidine).

[0693] Thus, a predicted nonessential amino acid residue in a polypeptide of the invention or a polypeptide used in the process of the invention is preferably replaced with another amino acid residue from the same family. Alternatively, in another embodiment, mutations can be introduced randomly along all or part of a coding sequence of a nucleic acid molecule of the invention or used in the process of the invention, such as by saturation mutagenesis, and the resultant mutants can be screened for activity described herein to identify mutants that retain or even have increased above mentioned activity, e.g. conferring increased yield, e.g. an increased yield-related trait, for example enhanced tolerance to abiotic environmental stress, for example an increased drought tolerance and/or low temperature tolerance and/or an increased nutrient use efficiency, intrinsic yield and/or another mentioned yield-related trait as compared to a corresponding, e.g. non-transformed, wild type plant cell, plant or part thereof.

[0694] Following mutagenesis of one of the sequences as shown herein, the encoded protein can be expressed recombinantly and the activity of the protein can be determined using, for example, assays described herein (see Examples).

[0695] The highest homology of the nucleic acid molecule used in the process according to the invention was found for the following database entries by Gap search.

[0696] Homologues of the nucleic acid sequences used, with the sequence shown in table I, columns 5 and 7, comprise also allelic variants with at least approximately 30%, 35%, 40% or 45% homology, by preference at least approximately 50%, 60% or 70%, more preferably at least approximately 90%, 91%, 92%, 93%, 94% or 95% and even more preferably at least approximately 96%, 97%, 98%, 99% or more homology with one of the nucleotide sequences shown or the abovementioned derived nucleic acid sequences or their homologues, derivatives or analogues or parts of these. Allelic variants encompass in particular functional variants which can be obtained by deletion, insertion or substitution of nucleotides from the sequences shown, preferably from table I, columns 5 and 7, or from the derived nucleic acid sequences, the intention being, however, that the enzyme activity or the biological activity of the resulting proteins synthesized is advantageously retained or increased.

[0697] In one embodiment of the present invention, the nucleic acid molecule of the invention or used in the process of the invention comprises the sequences shown in any of the table I, columns 5 and 7. It is preferred that the nucleic acid molecule comprises as little as possible other nucleotides not shown in any one of table I, columns 5 and 7. In one embodiment, the nucleic acid molecule comprises less than 500, 400, 300, 200, 100, 90, 80, 70, 60, 50 or 40 further nucleotides. In a further embodiment, the nucleic acid molecule comprises less than 30, 20 or 10 further nucleotides. In one embodiment, the nucleic acid molecule use in the process of the invention is identical to the sequences shown in table I, columns 5 and 7.

[0698] Also preferred is that the nucleic acid molecule used in the process of the invention encodes a polypeptide comprising the sequence shown in table II, columns 5 and 7. In one embodiment, the nucleic acid molecule encodes less than 150, 130, 100, 80, 60, 50, 40 or 30 further amino acids. In a further embodiment, the encoded polypeptide comprises less than 20, 15, 10, 9, 8, 7, 6 or 5 further amino acids. In one embodiment used in the inventive process, the encoded polypeptide is identical to the sequences shown in table II, columns 5 and 7.

[0699] In one embodiment, the nucleic acid molecule of the invention or used in the process encodes a polypeptide comprising the sequence shown in table II, columns 5 and 7 comprises less than 100 further nucleotides. In a further embodiment, said nucleic acid molecule comprises less than 30 further nucleotides. In one embodiment, the nucleic acid molecule used in the process is identical to a coding sequence of the sequences shown in table I, columns 5 and 7.

[0700] Polypeptides (=proteins), which still have the essential biological or enzymatic activity of the polypeptide of the present invention conferring increased yield, e.g. an increased yield-related trait, for example enhanced tolerance to abiotic environmental stress, for example an increased drought tolerance and/or low temperature tolerance and/or an increased nutrient use efficiency, intrinsic yield and/or another mentioned yield-related trait as compared to a corresponding, e.g. non-transformed, wild type plant cell, plant or part thereof i.e. whose activity is essentially not reduced, are polypeptides with at least 10% or 20%, by preference 30% or 40%, especially preferably 50% or 60%, very especially preferably 80% or 90 or more of the wild type biological activity or enzyme activity, advantageously, the activity is essentially not reduced in comparison with the activity of a polypeptide shown in table II, columns 5 and 7 expressed under identical conditions.

[0701] Homologues of table I, columns 5 and 7 or of the derived sequences of table II, columns 5 and 7 also mean truncated sequences, cDNA, single-stranded DNA or RNA of the coding and noncoding DNA sequence. Homologues of said sequences are also understood as meaning derivatives, which comprise noncoding regions such as, for example, UTRs, terminators, enhancers or promoter variants. The promoters upstream of the nucleotide sequences stated can be modified by one or more nucleotide substitution(s), insertion(s) and/or deletion(s) without, however, interfering with the functionality or activity either of the promoters, the open reading frame (=ORF) or with the 3′-regulatory region such as terminators or other 3′-regulatory regions, which are far away from the ORF. It is furthermore possible that the activity of the promoters is increased by modification of their sequence, or that they are replaced completely by more active promoters, even promoters from heterologous organisms. Appropriate promoters are known to the person skilled in the art and are mentioned herein below.

[0702] In addition to the nucleic acid molecules encoding the polypeptide according to the invention described above, another aspect of the invention pertains to negative regulators of the activity of a nucleic acid molecules selected from the group according to table I, column 5 and/or 7, preferably column 7. Antisense polynucleotides thereto are thought to inhibit the downregulating activity of those negative regulators by specifically binding the target polynucleotide and interfering with transcription, splicing, transport, translation, and/or stability of the target polynucleotide. Methods are described in the prior art for targeting the antisense polynucleotide to the chromosomal DNA, to a primary RNA transcript, or to a processed mRNA. Preferably, the target regions include splice sites, translation initiation codons, translation termination codons, and other sequences within the open reading frame.

[0703] The term “antisense,” for the purposes of the invention, refers to a nucleic acid comprising a polynucleotide that is sufficiently complementary to all or a portion of a gene, primary transcript, or processed mRNA, so as to interfere with expression of the endogenous gene. “Complementary” polynucleotides are those that are capable of base pairing according to the standard Watson-Crick complementarity rules. bpecifically, purines will base pair with pyrimidines to form a combination of guanine paired with cytosine (G:C) and adenine paired with either thymine (A:T) in the case of DNA, or adenine paired with uracil (A:U) in the case of RNA. It is understood that two polynucleotides may hybridize to each other even if they are not completely complementary to each other, provided that each has at least one region that is substantially complementary to the other. The term “antisense nucleic acid” includes single stranded RNA as well as double-stranded DNA expression cassettes that can be transcribed to produce an antisense RNA. “Active” antisense nucleic acids are antisense RNA molecules that are capable of selectively hybridizing with a negative regulator of the activity of a nucleic acid molecules encoding a polypeptide having at least 80% sequence identity with the polypeptide selected from the group according to table II, column 5 and/or 7, preferably column 7.

[0704] The antisense nucleic acid can be complementary to an entire negative regulator strand, or to only a portion thereof. In an embodiment, the antisense nucleic acid molecule is antisense to a “noncoding region” of the coding strand of a nucleotide sequence encoding the polypeptide according to the invention. The term “noncoding region” refers to 5′ and 3′ sequences that flank the coding region that are not translated into amino acids (i.e., also referred to as 5′ and 3′ untranslated regions). The antisense nucleic acid molecule can be complementary to only a portion of the noncoding region of a mRNA. For example, the antisense oligonucleotide can be complementary to the region surrounding the translation start site of the mRNA. An antisense oligonucleotide can be, for example, about 5, 10, 15, 20, 25, 30, 35, 40, 45 or 50 nucleotides in length. Typically, the antisense molecules of the present invention comprise an RNA having 60-100% sequence identity with at least 14 consecutive nucleotides of a noncoding region of one of the nucleic acid of table I. Preferably, the sequence identity will be at least 70%, more preferably at least 75%, 80%, 85%, 90%, 95%, 98% and most preferably 99%.

[0705] An antisense nucleic acid of the invention can be constructed using chemical synthesis and enzymatic ligation reactions using procedures known in the art. For example, an antisense nucleic acid (e.g., an antisense oligonucleotide) can be chemically synthesized using naturally occurring nucleotides or variously modified nucleotides designed to increase the biological stability of the molecules or to increase the physical stability of the duplex formed between the antisense and sense nucleic acids, e.g., phosphorothioate derivatives and acridine substituted nucleotides can be used. Examples of modified nucleotides which can be used to generate the antisense nucleic acid include 5-fluorouracil, 5-bromouracil, 5-chlorouracil, 5-iodouracil, hypoxanthine, xanthine, 4-acetylcytosine, 5-(carboxyhydroxylmethyl)-uracil, 5-carboxymethylaminomethyl-2-thiouridine, 5-carboxymethylaminomethyluracil, dihydrouracil, beta-D-galactosylqueosine, inosine, N6-isopentenyladenine, 1-methylguanine, 1-methylinosine, 2,2-dimethylguanine, 2-methyladenine, 2-methylguanine, 3-methylcytosine, 5-methylcytosine, N6-adenine, 7-methylguanine, 5-methylaminomethyluracil, 5-methoxyaminomethyl-2-thiouracil, beta-Dmannosylqueosine, 5′-methoxycarboxymethyluracil, 5-methoxyuracil, 2-methylthio-N-6-isopentenyladenine, uracil-5-oxyacetic acid (v), wybutoxosine, pseudouracil, queosine, 2-thiocytosine, 5-methyl-2-thiouracil, 2-thiouracil, 4-thiouracil, 5-methyluracil, uracil-5-oxyacetic acid methylester, 5-methyl-2-thiouracil, 3-(3-amino-3-N2-carboxypropyl)-uracil, acp3 and 2,6-diaminopurine. Alternatively, the antisense nucleic acid can be produced biologically using an expression vector into which a nucleic acid has been subcloned in an antisense orientation (i.e., RNA transcribed from the inserted nucleic acid will be of an antisense orientation to a target nucleic acid of interest, described further in the following subsection).

[0706] In yet another embodiment, the antisense nucleic acid molecule of the invention is an alpha-anomeric nucleic acid molecule. An alpha-anomeric nucleic acid molecule forms specific double-stranded hybrids with complementary RNA in which, contrary to the usual bunits, the strands run parallel to each other (Gaultier et al., Nucleic Acids. Res. 15, 6625 (1987)). The antisense nucleic acid molecule can also comprise a 2′-o-methylribonucleotide (Inoue et al., Nucleic Acids Res. 15, 6131 (1987)) or a chimeric RNA-DNA analogue (Inoue et al., FEBS Lett. 215, 327 (1987)).

[0707] The antisense nucleic acid molecules of the invention are typically administered to a cell or generated in situ such that they hybridize with or bind to cellular mRNA and/or genomic DNA. The hybridization can be by conventional nucleotide complementarity to form a stable duplex, or, for example, in the case of an antisense nucleic acid molecule which binds to DNA duplexes, through specific interactions in the major groove of the double helix. The antisense molecule can be modified such that it specifically binds to a recepfor or an antigen expressed on a selected cell surface, e.g., by linking the antisense nucleic acid molecule to a peptide or an antibody which binds to a cell surface receptor or antigen. The antisense nucleic acid molecule can also be delivered to cells using the vectors described herein. To achieve sufficient intracellular concentrations of the antisense molecules, vector constructs in which the antisense nucleic acid molecule is placed under the control of a strong prokaryotic, viral, or eukaryotic (including plant) promoter are preferred.

[0708] As an alternative to antisense polynucleotides, ribozymes, sense polynucleotides, or double stranded RNA (dsRNA) can be used to reduce expression of the polypeptide according to the invention polypeptide. By “ribozyme” is meant a catalytic RNA-based enzyme with ribonuclease activity which is capable of cleaving a single-stranded nucleic acid, such as an mRNA, to which it has a complementary region. Ribozymes (e.g., hammerhead ribozymes described in Haselhoff and Gerlach, Nature 334, 585 (1988)) can be used to catalytically cleave the mRNA transcripts to thereby inhibit translation of the mRNA. A ribozyme having specificity for the polypeptide according to the invention-encoding nucleic acid can be designed based upon the nucleotide sequence of the polypeptide according to the invention cDNA, as disclosed herein or on the basis of a heterologous sequence to be isolated according to methods taught in this invention. For example, a derivative of a Tetrahymena L-19 IVS RNA can be constructed in which the nucleotide sequence of the active site is complementary to the nucleotide sequence to be cleaved in the polypeptide according to the invention-encoding mRNA. See, e.g. U.S. Pat. Nos. 4,987,071 and 5,116,742 to Cech et al. Alternatively, the mRNA can be used to select a catalytic RNA having a specific ribonuclease activity from a pool of RNA molecules. See, e.g. Bartel D., and Szostak J. W., Science 261, 1411 (1993). In preferred embodiments, the ribozyme will contain a portion having at least 7, 8, 9, 10, 12, 14, 16, 18 or 20 nucleotides, and more preferably 7 or 8 nucleotides, that have 100% complementarity to a portion of the target RNA. Methods for making ribozymes are known to those skilled in the art. See, e.g. U.S. Pat. Nos. 6,025,167, 5,773,260 and 5,496,698.

[0709] The term “dsRNA,” as used herein, refers to RNA hybrids comprising two strands of RNA. The dsRNAs can be linear or circular in structure. In a preferred embodiment, dsRNA is specific for a polynucleotide encoding either the polypeptide according to table II or a polypeptide having at least 70% sequence identity with a polypeptide according to table II. The hybridizing RNAs may be substantially or completely complementary. By “substantially complementary,” is meant that when the two hybridizing RNAs are optimally aligned using the BLAST program as described above, the hybridizing portions are at least 95% complementary. Preferably, the dsRNA will be at least 100 base pairs in length. Typically, the hybridizing RNAs will be of identical length with no over hanging 5′ or 3′ ends and no gaps. However, dsRNAs having 5′ or 3′ overhangs of up to 100 nucleotides may be used in the methods of the invention.

[0710] The dsRNA may comprise ribonucleotides or ribonucleotide analogs, such as 2′-O-methyl ribosyl residues, or combinations thereof. See, e.g. U.S. Pat. Nos. 4,130,641 and 4,024,222. A dsRNA polyriboinosinic acid:polyribocytidylic acid is described in U.S. Pat. No. 4,283,393. Methods for making and using dsRNA are known in the art. One method comprises the simultaneous transcription of two complementary DNA strands, either in vivo, or in a single in vitro reaction mixture. See, e.g. U.S. Pat. No. 5,795,715. In one embodiment, dsRNA can be introduced into a plant or plant cell directly by standard transformation procedures. Alternatively, dsRNA can be expressed in a plant cell by transcribing two complementary RNAs.

[0711] Other methods for the inhibition of endogenous gene expression, such as triple helix formation (Moser et al., Science 238, 645 (1987), and Cooney et al., Science 241, 456 (1988)) and co-suppression (Napoli et al., The Plant Cell 2,279, 1990,) are known in the art. Partial and full-length cDNAs have been used for the c-osuppression of endogenous plant genes. See, e.g. U.S. Pat. Nos. 4,801,340, 5,034,323, 5,231,020, and 5,283,184; Van der Kroll et al., The Plant Cell 2, 291, (1990); Smith et al., Mol. Gen. Genetics 224, 477 (1990), and Napoli et al., The Plant Cell 2, 279 (1990).

[0712] For sense suppression, it is believed that introduction of a sense polynucleotide blocks transcription of the corresponding target gene. The sense polynucleotide will have at least 65% sequence identity with the target plant gene or RNA. Preferably, the percent identity is at least 80%, 90%, 95% or more. The introduced sense polynucleotide need not be full length relative to the target gene or transcript. Preferably, the sense polynucleotide will have at least 65% sequence identity with at least 100 consecutive nucleotides of one of the nucleic acids as depicted in table I. The regions of identity can comprise introns and/or exons and untranslated regions. The introduced sense polynucleotide may be present in the plant cell transiently, or may be stably integrated into a plant chromosome or extra-chromosomal replicon.

[0713] Further, embodiment of the invention is an expression vector comprising a nucleic acid molecule comprising a nucleic acid molecule selected from the group consisting of:
[0714] (a) a nucleic acid molecule encoding the polypeptide shown in column 5 or 7 of table II;
[0715] (b) a nucleic acid molecule shown in column 5 or 7 of table I;
[0716] (c) a nucleic acid molecule, which, as a result of the degeneracy of the genetic code, can be derived from a polypeptide sequence depicted in column 5 or 7 of table II, and confers an increased yield, e.g. an increased yield-related trait, for example enhanced tolerance to abiotic environmental stress, for example an increased drought tolerance and/or low temperature tolerance and/or an increased nutrient use efficiency, intrinsic yield and/or another mentioned yield-related trait as compared to a corresponding, e.g. non-transformed, wild type plant cell, a plant or a part thereof;
[0717] (d) a nucleic acid molecule having at least 30% identity, preferably at least 40%, 50%, 60%, 70%, 75%, 80%, 85%, 90%, 95%, 96%, 97%, 98%, 99%, 99.5% with the nucleic acid molecule sequence of a polynucleotide comprising the nucleic acid molecule shown in column 5 or 7 of table I, and confers increased yield, e.g. an increased yieldrelated trait, for example enhanced tolerance to abiotic environmental stress, for example an increased drought tolerance and/or low temperature tolerance and/or an increased nutrient use efficiency, intrinsic yield and/or another mentioned yield-related trait as compared to a corresponding, e.g. non-transformed, wild type plant cell, a plant or a part thereof;
[0718] (e) a nucleic acid molecule encoding a polypeptide having at least 30% identity, preferably at least 40%, 50%, 60%, 70%, 75%, 80%, 85%, 90%, 95%, 96%, 97%, 98%, 99%, 99.5%, with the amino acid sequence of the polypeptide encoded by the nucleic acid molecule of (a), (b), (c) or (d) and having the activity represented by a nucleic acid molecule comprising a polynucleotide as depicted in column 5 of table I, and confers increased yield, e.g. an increased yield-related trait, for example enhanced tolerance to abiotic environmental stress, for example an increased drought tolerance and/or low temperature tolerance and/or an increased nutrient use efficiency, intrinsic yield and/or another mentioned yield-related trait as compared to a corresponding, e.g. non-transformed, wild type plant cell, a plant or a part thereof;
[0719] (f) nucleic acid molecule which hybridizes with a nucleic acid molecule of (a), (b), (c), (d) or (e) under stringent hybridization conditions and confers increased yield, e.g. an increased yield-related trait, for example enhanced tolerance to abiotic environmental stress, for example an increased drought tolerance and/or low temperature tolerance and/or an increased nutrient use efficiency, intrinsic yield and/or another mentioned yield-related trait as compared to a corresponding, e.g. non-transformed, wild type plant cell, a plant or a part thereof;
[0720] (g) a nucleic acid molecule encoding a polypeptide which can be isolated with the aid of monoclonal or polyclonal antibodies made against a polypeptide encoded by one of the nucleic acid molecules of (a), (b), (c), (d), (e) or (f) and having the activity represented by the nucleic acid molecule comprising a polynucleotide as depicted in column 5 of table I;
[0721] (h) a nucleic acid molecule encoding a polypeptide comprising the consensus sequence or one or more polypeptide motifs as shown in column 7 of table IV, and preferably having the activity represented by a protein comprising a polypeptide as depicted in column 5 of table II or IV;
[0722] (i) a nucleic acid molecule encoding a polypeptide having the activity represented by a protein as depicted in column 5 of table II, and confers increased yield, e.g. an increased yield-related trait, for example enhanced tolerance to abiotic environmental stress, for example an increased drought tolerance and/or low temperature tolerance and/or an increased nutrient use efficiency, intrinsic yield and/or another mentioned yield-related trait as compared to a corresponding, e.g. non-transformed, wild type plant cell, a plant or a part thereof;
[0723] (j) nucleic acid molecule which comprises a polynucleotide, which is obtained by amplifying a cDNA library or a genomic library using the primers in column 7 of table III, and preferably having the activity represented by a protein comprising a polypeptide as depicted in column 5 of table II or IV; and
[0724] (k) a nucleic acid molecule which is obtainable by screening a suitable nucleic acid library, especially a cDNA library and/or a genomic library, under stringent hybridization conditions with a probe comprising a complementary sequence of a nucleic acid molecule of (a) or (b) or with a fragment thereof, having at least 15 nt, preferably 20 nt, 30 nt, 50 nt, 100 nt, 200 nt, 500 nt, 750 or 1000 nt of a nucleic acid molecule complementary to a nucleic acid molecule sequence characterized in (a) to (e) and encoding a polypeptide having the activity represented by a protein comprising a polypeptide as depicted in column 5 of table II.

[0725] The invention further provides an isolated recombinant expression vector comprising the nucleic acid molecule of the invention, wherein expression of the vector or nucleic acid molecule, respectively in a host cell results in an increased yield, e.g. an increased yield-related trait, for example enhanced tolerance to abiotic environmental stress, an increased drought tolerance and/or low temperature tolerance and/or an increased nutrient use efficiency, intrinsic yield and/or another mentioned yield-related trait as compared to the corresponding, e.g. non-transformed, wild type of the host cell.

[0726] A plant expression cassette preferably contains regulatory sequences capable of driving gene expression in plant cells and operably linked so that each sequence can fulfill its function, for example, termination of transcription by polyadenylation signals. Preferred polyadenylation signals are those originating from Agrobacterium tumefaciens T-DNA such as the gene 3 known as octopine synthase of the Ti-plasmid pTiACH5 (Gielen et al., EMBO J. 3, 835 1(984)) or functional equivalents thereof but also all other terminators functionally active in plants are suitable. As plant gene expression is very often not limited on transcriptional levels, a plant expression cassette preferably contains other operably linked sequences like translational enhancers such as the overdrive-sequence containing the 5″-untranslated leader sequence from tobacco mosaic virus enhancing the protein per RNA ratio (Gallie et al., Nucl. Acids Research 15, 8693 (1987)).

[0727] Plant gene expression has to be operably linked to an appropriate promoter conferring gene expression in a timely, cell or tissue specific manner. Preferred are promoters driving constitutive expression (Benfey et al., EMBO J. 8, 2195 (1989)) like those derived from plant viruses like the 35S CaMV (Franck et al., Cell 21, 285 (1980)), the 19S CaMV (see also U.S. Pat. No. 5,352,605 and PCT Application No. WO 84/02913) or plant promoters like those from Rubisco small subunit described in U.S. Pat. No. 4,962,028. Other promoters, e.g. super-promoter (Ni et al., Plant Journal 7, 661 (1995)), Ubiquitin promoter (Callis et al., J. Biol. Chem., 265, 12486 (1990); U.S. Pat. No. 5,510,474; U.S. Pat. No. 6,020,190; Kawalleck et al., Plant. Molecular Biology, 21, 673 (1993)) or 34S promoter (GenBank Accession numbers M59930 and X16673) were similar useful for the present invention and are known to a person skilled in the art. Developmental stage-preferred promoters are preferentially expressed at certain stages of development. Tissue and organ preferred promoters include those that are preferentially expressed in certain tissues or organs, such as leaves, roots, seeds, or xylem. Examples of tissue preferred and organ preferred promoters include, but are not limited to fruit-preferred, ovule-preferred, male tissue-preferred, seedpreferred, integument-preferred, tuber-preferred, stalk-preferred, pericarp-preferred, and leaf-preferred, stigma-preferred, pollen-preferred, anther-preferred, a petal-preferred, sepalpreferred, pedicel-preferred, silique-preferred, stem-preferred, root-preferred promoters, and the like. Seed preferred promoters are preferentially expressed during seed development and/or germination. For example, seed preferred promoters can be embryo-preferred, endosperm preferred, and seed coat-preferred. See Thompson et al., BioEssays 10, 108 (1989). Examples of seed preferred promoters include, but are not limited to, cellulose synthase (celA), Cim1, gamma-zein, globulin-1, maize 19 kD zein (cZ19B1), and the like.

[0728] Other promoters useful in the expression cassettes of the invention include, but are not limited to, the major chlorophyll a/b binding protein promoter, histone promoters, the Ap3 promoter, the β-conglycin promoter, the napin promoter, the soybean lectin promoter, the maize 15 kD zein promoter, the 22 kD zein promoter, the 27 kD zein promoter, the g-zein promoter, the waxy, shrunken 1, shrunken 2 and bronze promoters, the Zm13 promoter (U.S. Pat. No. 5,086,169), the maize polygalacturonase promoters (PG) (U.S. Pat. Nos. 5,412,085 and 5,545,546), and the SGB6 promoter (U.S. Pat. No. 5,470,359), as well as synthetic or other natural promoters.

[0729] Additional advantageous regulatory sequences are, for example, included in the plant promoters such as CaMV/35S (Franck et al., Cell 21 285 (1980)), PRP1 (Ward et al., Plant. Mol. Biol. 22, 361 (1993)), SSU, OCS, lib4, usp, STLS1, B33, LEB4, nos, ubiquitin, napin or phaseolin promoter. Also advantageous in this connection are inducible promoters such as the promoters described in EP 388 186 (benzyl sulfonamide inducible), Gatz et al., Plant J. 2, 397 (1992) (tetracyclin inducible), EP-A-0 335 528 (abscisic acid inducible) or WO 93/21334 (ethanol or cyclohexenol inducible). Additional useful plant promoters are the cytoplasmic FBPase promotor or ST-LSI promoter of potato (Stockhaus et al., EMBO J. 8, 2445 (1989)), the phosphorybosyl phyrophoshate amido transferase promoter of Glycine max (gene bank accession No. U87999) or the noden specific promoter described in EP-A-0 249 676. Additional particularly advantageous promoters are seed specific promoters which can be used for monocotyledones or dicotyledones and are described in U.S. Pat. No. 5,608,152 (napin promoter from rapeseed), WO 98/45461 (phaseolin promoter from Arabidopsis), U.S. Pat. No. 5,504,200 (phaseolin promoter from Phaseolus vulgaris), WO 91/13980 (Bce4 promoter from Brassica) and Baeumlein et al., Plant J., 2 (2), 233 (1992) (LEB4 promoter from leguminosa). Said promoters are useful in dicotyledones. The following promoters are useful for example in monocotyledones Ipt-2- or Ipt-1-promoter from barley (WO 95/15389 and WO 95/23230) or hordein promoter from barley. Other useful promoters are described in WO 99/16890. It is possible in principle to use all natural promoters with their regulatory sequences like those mentioned above for the novel process. It is also possible and advantageous in addition to use synthetic promoters.

[0730] The gene construct may also comprise further genes which are to be inserted into the organisms and which are for example involved in stress tolerance and yield increase. It is possible and advantageous to insert and express in host organisms regulatory genes such as genes for inducers, repressors or enzymes which intervene by their enzymatic activity in the regulation, or one or more or all genes of a biosynthetic pathway. These genes can be heterologous or homologous in origin. The inserted genes may have their own promoter or else be under the control of same promoter as the sequences of the nucleic acid of table I or their homologs.

[0731] The gene construct advantageously comprises, for expression of the other genes present, additionally 3′ and/or 5′ terminal regulatory sequences to enhance expression, which are selected for optimal expression depending on the selected host organism and gene or genes.

[0732] These regulatory sequences are intended to make specific expression of the genes and protein expression possible as mentioned above. This may mean, depending on the host organism, for example that the gene is expressed or over-expressed only after induction, or that it is immediately expressed and/or over-expressed.

[0733] The regulatory sequences or factors may moreover preferably have a beneficial effect on expression of the introduced genes, and thus increase it. It is possible in this way for the regulatory elements to be enhanced advantageously at the transcription level by using strong transcription signals such as promoters and/or enhancers. However, in addition, it is also possible to enhance translation by, for example, improving the stability of the mRNA.

[0734] Other preferred sequences for use in plant gene expression cassettes are targeting-sequences necessary to direct the gene product in its appropriate cell compartment (for review see Kermode, Crit. Rev. Plant Sci. 15 (4), 285 (1996) and references cited therein) such as the vacuole, the nucleus, all types of plastids like amyloplasts, chloroplasts, chromoplasts, the extracellular space, mitochondria, the endoplasmic reticulum, oil bodies, peroxisomes and other compartments of plant cells.

[0735] Plant gene expression can also be facilitated via an inducible promoter (for review see Gatz, Annu. Rev. Plant Physiol. Plant Mol. Biol. 48, 89 (1997)). Chemically inducible promoters are especially suitable if gene expression is wanted to occur in a time specific manner.

[0736] Table VI lists several examples of promoters that may be used to regulate transcription of the nucleic acid coding sequences of the present invention.

TABLE VI
Examples of tissue-specific and inducible promoters in plants

| Expression | Reference |
|---|---|
| Cor78 - Cold, drought, salt, | Ishitani, et al., Plant Cell 9, 1935 (1997), |
| ABA, wounding-inducible | Yamaguchi-Shinozaki and Shinozaki, Plant Cell 6, 251 |
| | (1994) |
| Rci2A - Cold, dehydration- | Capel et al., Plant Physiol 115, 569 (1997) |
| inducible | |
| Rd22 - Drought, salt | Yamaguchi-Shinozaki and Shinozaki, Mol. Gen. Genet. |
| | 238, 17 (1993) |
| Cor15A - Cold, dehydration, | Baker et al., Plant Mol. Biol. 24, 701 (1994) |
| ABA | |
| GH3 - Auxin inducible | Liu et al., Plant Cell 6, 645 (1994) |
| ARSK1 - Root, salt inducible | Hwang and Goodman, Plant J. 8, 37 (1995) |
| PtxA - Root, salt inducible | GenBank accession X67427 |
| SbHRGP3 - Root specific | Ahn et al., Plant Cell 8, 1477 (1998). |
| KST1 - Guard cell specific | Plesch et al., Plant Journal. 28(4), 455-(2001) |
| KAT1 - Guard cell specific | Plesch et al., Gene 249, 83 (2000), |
| | Nakamura et al., Plant Physiol. 109, 371 (1995) |
| salicylic acid inducible | PCT Application No. WO 95/19443 |
| tetracycline inducible | Gatz et al., Plant J. 2, 397 (1992) |
| Ethanol inducible | PCT Application No. WO 93/21334 |
| Pathogen inducible PRP1 | Ward et al., Plant. Mol. Biol. 22, 361-(1993) |
| Heat inducible hsp80 | U.S. Pat. No. 5,187,267 |
| Cold inducible alpha- | PCT Application No. WO 96/12814 |
| amylase | |
| Wound-inducible pinII | European Patent No. 375 091 |
| RD29A - salt-inducible | Yamaguchi-Shinozalei et al. Mol. Gen. Genet. 236, 331 |
| | (1993) |
| Plastid-specific viral RNA- | PCT Application No. WO 95/16783, PCT Application |
| polymerase | WO 97/06250 |

[0737] Additional flexibility in controlling heterologous gene expression in plants may be obtained by using DNA binding domains and response elements from heterologous sources (i.e., DNA binding domains from non-plant sources). An example of such a heterologous DNA binding domain is the LexA DNA binding domain (Brent and Ptashne, Cell 43, 729 (1985)).

[0738] In one embodiment, the language “substantially free of cellular material” includes preparations of a protein having less than about 30% (by dry weight) of contaminating material (also referred to herein as a “contaminating polypeptide”), more preferably less than about 20% of contaminating material, still more preferably less than about 10% of contaminating material, and most preferably less than about 5% contaminating material.

[0739] The nucleic acid molecules, polypeptides, polypeptide homologs, fusion polypeptides, primers, vectors, and host cells described herein can be used in one or more of the following methods: identification of S. cerevisiae, E. coli or Brassica napus, Glycine max, Zea mays or Oryza sativa and related organisms; mapping of genomes of organisms related to S. cerevisiae, E. coli; identification and localization of S. cerevisiae, E. coli or Brassica napus, Glycine max, Zea mays or Oryza sativa sequences of interest; evolutionary studies; determination of polypeptide regions required for function; modulation of a polypeptide activity; modulation of the metabolism of one or more cell functions; modulation of the transmembrane transport of one or more compounds; modulation of yield, e.g. of a yieldrelated trait, e.g. of tolerance to abiotic environmental stress, e.g. to low temperature tolerance, drought tolerance, water use efficiency, nutrient use efficiency and/or intrinsic yield; and modulation of expression of polypeptide nucleic acids.

[0740] Thenucleic acid molecules of the invention are also useful for evolutionary and polypeptide structural studies. The metabolic and transport processes in which the molecules of the invention participate are utilized by a wide variety of prokaryotic and eukaryotic cells; by comparing the sequences of the nucleic acid molecules of the present invention to those encoding similar enzymes from other organisms, the evolutionary relatedness of the organisms can be assessed. Similarly, such a comparison permits an assessment of which regions of the sequence are conserved and which are not, which may aid in determining those regions of the polypeptide that are essential for the functioning of the enzyme. This type of determination is of value for polypeptide engineering studies and may give an indication of what the polypeptide can tolerate in terms of mutagenesis without losing function.

[0741] There are a number of mechanisms by which the alteration of the polypeptide of the invention may directly affect yield, e.g. yield-related trait, for example tolerance to abiotic environmental stress, for example drought tolerance and/or low temperature tolerance, and/or nutrient use efficiency, intrinsic yield and/or another mentioned yield-related trait.

[0742] The effect of the genetic modification in plants regarding yield, e.g. yield-related trait, for example tolerance to abiotic environmental stress, for example drought tolerance and/or low temperature tolerance, and/or nutrient use efficiency, intrinsic yield and/or another mentioned yield-related trait can be assessed by growing the modified plant under less than suitable conditions and then analyzing the growth characteristics and/or metabolism of the plant. Such analysis techniques are well known to one skilled in the art, and include dry weight, fresh weight, polypeptide synthesis, carbohydrate synthesis, lipid synthesis, evapotranspiration rates, general plant and/or crop yield, flowering, reproduction, seed setting, root growth, respiration rates, photosynthesis rates, etc. (Applications of HPLC in Biochemistry in: Laboratory Techniques in Biochemistry and Molecular Biology, Vol. 17; Rehm et al., 1993 Biotechnology, Vol. 3, Chapter III: Product recovery and purification, page 469-714, VCH: Weinheim; Belter P. A. et al., 1988, Bioseparations: downstream processing for biotechnology, John Wiley and Sons; Kennedy J. F., and Cabral J. M. S., 1992, Recovery processes for biological materials, John Wiley and Sons; Shaeiwitz J. A. and Henry J. D., 1988, Biochemical separations, in Ulmann's Encyclopedia of Industrial Chemistry, Vol. B3, Chapter 11, page 1-27, VCH: Weinheim; and Dechow F. J., 1989, Separation and purification techniques in biotechnology, Noyes Publications).

[0743] For example, yeast expression vectors comprising the nucleic acids disclosed herein, or fragments thereof, can be constructed and transformed into S. cerevisiae using standard protocols. The resulting transgenic cells can then be assayed for generation or alteration of their yield, e.g. their yield-related traits, for example tolerance to abiotic environmental stress, for example drought tolerance and/or low temperature tolerance, and/or nutrient use efficiency, intrinsic yield and/or another mentioned yield-related trait. Similarly, plant expression vectors comprising the nucleic acids disclosed herein, or fragments thereof, can be constructed and transformed into an appropriate plant cell such as rape, maize, cotton, rice, wheat, sugar cane, sugar beet, soy bean, Arabidopsis thaliana, potatoe, Medicago truncatula, etc., using standard protocols. The resulting transgenic cells and/or plants derived therefrom can then be assayed for generation or alteration of their yield, e.g. their yield-related traits, for example tolerance to abiotic environmental stress, for example drought tolerance and/or low temperature tolerance, and/or nutrient use efficiency, intrinsic yield and/or another mentioned yield-related trait.

[0744] The engineering of one or more genes according to table I and coding for the polypeptides of table II of the invention may also result in altered activities which indirectly and/or directly impact the tolerance to abiotic environmental stress of algae, plants, ciliates, fungi, or other microorganisms like C. glutamicum.

[0745] In particular, the invention provides a method of producing a transgenic plant with a nucleic acid, wherein expression of the nucleic acid(s) in the plant results in in increasing yield, e.g. increasing a yield-related trait, for example enhancing tolerance to abiotic environmental stress, for example increasing drought tolerance and/or low temperature tolerance and/or increasing nutrient use efficiency, increasing intrinsic yield and/or another mentioned yield-related trait as compared to a wild type plant comprising: (a) trans-forming a plant cell with an expression vector comprising a nucleic acid set forth in Table I and (b) generating from the plant cell a transgenic plant with enhanced tolerance to abiotic environmental stress and/or increased yield as compared to a wild type plant.

[0746] The present invention also provides antibodies that specifically bind to the polypeptide according to the invention, or a portion thereof, as encoded by a nucleic acid described herein. Antibodies can be made by many well-known methods (see, e.g. Harlow and Lane, “Antibodies; A Laboratory Manual”, Cold Spring Harbor Laboratory, Cold Spring Harbor, N.Y., (1988)). Briefly, purified antigen can be injected into an animal in an amount and in intervals sufficient to elicit an immune response. Antibodies can either be purified directly, or spleen cells can be obtained from the animal. The cells can then fused with an immortal cell line and screened for antibody secretion. The antibodies can be used to screen nucleic acid clone libraries for cells secreting the antigen. Those positive clones can then be sequenced. See, for example, Kelly et al., Bio/Technology 10, 163 (1992); Bebbington et al., Bio/Technology 10, 169 (1992).

[0747] Gene expression in plants is regulated by the interaction of protein transcription factors with specific nucleotide sequences within the regulatory region of a gene. One example of transcription factors are polypeptides that contain zinc finger (ZF) motifs. Each ZF module is approximately 30 amino acids long folded around a zinc ion. The DNA recognition domain of a ZF protein is a α-helical structure that inserts into the major grove of the DNA double helix. The module contains three amino acids that bind to the DNA with each amino acid contacting a single base pair in the target DNA sequence. ZF motifs are arranged in a modular repeating fashion to form a set of fingers that recognize a contiguous DNA sequence. For example, a three-fingered ZF motif will recognize 9 by of DNA. Hundreds of proteins have been shown to contain ZF motifs with between 2 and 37 ZF modules in each protein (Isalan M. et al., Biochemistry 37 (35), 12026 (1998); Moore M. et al., Proc. Natl. Acad. Sci. USA 98 (4), 1432 (2001) and Moore M. et al., Proc. Natl. Acad. Sci. USA 98 (4), 1437 (2001); US patents U.S. Pat. No. 6,007,988 and U.S. Pat. No. 6,013,453).

[0748] The regulatory region of a plant gene contains many short DNA sequences (cisacting elements) that serve as recognition domains for transcription factors, including ZF proteins. Similar recognition domains in different genes allow the coordinate expression of several genes encoding enzymes in a metabolic pathway by common transcription factors. Variation in the recognition domains among members of a gene family facilitates differences in gene expression within the same gene family, for example, among tissues and stages of development and in response to environmental conditions.

[0749] Typical ZF proteins contain not only a DNA recognition domain but also a functional domain that enables the ZF protein to activate or repress transcription of a specific gene. Experimentally, an activation domain has been used to activate transcription of the target gene (U.S. Pat. No. 5,789,538 and patent application WO 95/19431), but it is also possible to link a transcription repressor domain to the ZF and thereby inhibit transcription (patent applications WO 00/47754 and WO 01/002019). It has been reported that an enzymatic function such as nucleic acid cleavage can be linked to the ZF (patent application WO 00/20622).

[0750] The invention provides a method that allows one skilled in the art to isolate the regulatory region of one or more polypeptide according to the invention-encoding genes from the genome of a plant cell and to design zinc finger transcription factors linked to a functional domain that will interact with the regulatory region of the gene. The interaction of the zinc finger protein with the plant gene can be designed in such a manner as to alter expression of the gene and preferably thereby to confer increasing yield, e.g. increasing a yield-related trait, for example enhancing tolerance to abiotic environmental stress, for example increasing drought tolerance and/or low temperature tolerance and/or increasing nutrient use efficiency, increasing intrinsic yield and/or another mentioned yield-related trait.

[0751] In particular, the invention provides a method of producing a transgenic plant with a coding nucleic acid, wherein expression of the nucleic acid(s) in the plant results in in increasing yield, e.g. increasing a yield-related trait, for example enhancing tolerance to abiotic environmental stress, for example increasing drought tolerance and/or low temperature tolerance and/or increasing nutrient use efficiency, increasing intrinsic yield and/or another mentioned yield-related trait as compared to a wild type plant comprising: (a) trans-forming a plant cell with an expression vector comprising a encoding nucleic acid, and (b) generating from the plant cell a transgenic plant with enhanced tolerance to abiotic environmental stress and/or increased yield as compared to a wild type plant. For such plant transformation, binary vectors such as pBinAR can be used (Hofgen and Willmitzer, Plant Science 66, 221 (1990)). Moreover suitable binary vectors are for example pBIN19, pBI101, pGPTV or pPZP (Hajukiewicz P. et al., Plant Mol. Biol., 25, 989 (1994)).

[0752] Alternate methods of transfection include the direct transfer of DNA into developing flowers via electroporation or Agrobacterium mediated gene transfer. Agrobacterium mediated plant transformation can be performed using for example the GV3101(pMP90) (Koncz and Schell, Mol. Gen. Genet. 204, 383 (1986)) or LBA4404 (Ooms et al., Plasmid, 7, 15 (1982); Hoekema et al., Nature, 303, 179 (1983)) Agrobacterium tumefaciens strain. Transformation can be performed by standard transformation and regeneration techniques (Deblaere et al., Nucl. Acids. Res. 13, 4777 (1994); Gelvin and Schilperoort, Plant Molecular Biology Manual, 2nd Ed.—Dordrecht: Kluwer Academic Publ., 1995.—in Sect., Ringbuc Zentrale Signatur: BT11-P ISBN 0-7923-2731-4; Glick B. R. and Thompson J. E., Methods in Plant Molecular Biology and Biotechnology, Boca Raton: CRC Press, 1993.-360 S., ISBN 0-8493-5164-2). For example, rapeseed can be transformed via cotyledon or hypocotyl transformation (Moloney et al., Plant Cell Reports 8, 238 (1989); De Block et al., Plant Physiol. 91, 694 (1989)). Use of antibiotics for Agrobacterium and plant selection depends on the binary vector and the Agrobacterium strain used for transformation. Rapeseed selection is normally performed using kanamycin as selectable plant marker. Agrobacterium mediated gene transfer to flax can be performed using, for example, a technique described by Mlynarova et al., Plant Cell Report 13, 282 (1994)). Additionally, transformation of soybean can be performed using for example a technique described in European Patent No. 424 047, U.S. Pat. No. 5,322,783, European Patent No. 397 687, U.S. Pat. No. 5,376,543 or U.S. Pat. No. 5,169,770. Transformation of maize can be achieved by particle bombardment, polyethylene glycol mediated DNA uptake or via the silicon carbide fiber technique (see, for example, Freeling and Walbot “The maize handbook” Springer Verlag: New York (1993) ISBN 3-540-97826-7). A specific example of maize transformation is found in U.S. Pat. No. 5,990,387 and a specific example of wheat transformation can be found in PCT Application No. WO 93/07256.

[0753] Growing the modified plants under defined N-conditions, in an especial embodiment under abiotic environmental stress conditions, and then screening and analyzing the growth characteristics and/or metabolic activity assess the effect of the genetic modification in plants on increasing yield, e.g. increasing a yield-related trait, for example enhancing tolerance to abiotic environmental stress, for example increasing drought tolerance and/or low temperature tolerance and/or increasing nutrient use efficiency, increasing intrinsic yield and/or another mentioned yield-related trait. Such analysis techniques are well known to one skilled in the art. They include beneath to screening (Römpp Lexikon Biotechnologie, Stuttgart/N.Y.: Georg Thieme Verlag 1992, “screening” p. 701) dry weight, fresh weight, protein synthesis, carbohydrate synthesis, lipid synthesis, evapotranspiration rates, general plant and/or crop yield, flowering, reproduction, seed setting, root growth, respiration rates, photosynthesis rates, etc. (Applications of HPLC in Biochemistry in: Laboratory Techniques in Biochemistry and Molecular Biology, Vol. 17; Rehm et al., 1993 Biotechnology, Vol. 3, Chapter III: Product recovery and purification, page 469-714, VCH: Weinheim; Better, P. A. et al., 1988 Bioseparations: downstream processing for biotechnology, John Wiley and Sons; Kennedy J. F. and Cabral J. M. S., 1992 Recovery processes for biological materials, John Wiley and Sons; Shaeiwitz J. A. and Henry J. D., 1988 Biochemical separations, in: Ullmann's Encyclopedia of Industrial Chemistry, Vol. B3, Chapter 11, page 1-27, VCH: Weinheim; and Dechow F. J. (1989) Separation and purification techniques in biotechnology, Noyes Publications).

[0754] In one embodiment, the present invention relates to a method for the identification of a gene product conferring in increasing yield, e.g. increasing a yield-related trait, for example enhancing tolerance to abiotic environmental stress, for example increasing drought tolerance and/or low temperature tolerance and/or increasing nutrient use efficiency, increasing intrinsic yield and/or another mentioned yield-related trait as compared to a corresponding, e.g. non-transformed, wild type cell in a cell of an organism for example plant, comprising the following steps:
[0755] (a) contacting, e.g. hybridizing, some or all nucleic acid molecules of a sample, e.g. cells, tissues, plants or microorganisms or a nucleic acid library, which can contain a candidate gene encoding a gene product conferring increasing yield, e.g. increasing a yield-related trait, for example enhancing tolerance to abiotic environmental stress, for example increasing drought tolerance and/or low temperature tolerance and/or increasing nutrient use efficiency, increasing i, with a nucleic acid molecule as shown in column 5 or 7 of table I A or B, or a functional homologue thereof;
[0756] (b) identifying the nucleic acid molecules, which hybridize under relaxed stringent conditions with said nucleic acid molecule, in particular to the nucleic acid molecule sequence shown in column 5 or 7 of table I, and, optionally, isolating the full length cDNA clone or complete genomic clone;
[0757] (c) identifying the candidate nucleic acid molecules or a fragment thereof in host cells, preferably in a plant cell;
[0758] (d) increasing the expressing of the identified nucleic acid molecules in the host cells for which enhanced tolerance to abiotic environmental stress and/or increased yield are desired;
[0759] (e) assaying the level of enhanced tolerance to abiotic environmental stress and/or increased yield of the host cells; and
[0760] (f) identifying the nucleic acid molecule and its gene product which confers increasing yield, e.g. increasing a yield-related trait, for example enhancing tolerance to abiotic environmental stress, for example increasing drought tolerance and/or low temperature tolerance and/or increasing nutrient use efficiency, increasing intrinsic yield and/or another mentioned yield-related trait in the host cell compared to the wild type.

[0761] Relaxed hybridization conditions are: After standard hybridization procedures washing steps can be performed at low to medium stringency conditions usually with washing conditions of 40°-55° C. and salt conditions between 2×SSC and 0.2×SSC with 0.1% SDS in comparison to stringent washing conditions as e.g. 60° to 68° C. with 0.1% SDS. Further examples can be found in the references listed above for the stringend hybridization conditions. Usually washing steps are repeated with increasing stringency and length until a useful signal to noise ratio is detected and depend on many factors as the target, e.g. its purity, GC-content, size etc, the probe, e.g. its length, is it a RNA or a DNA probe, salt conditions, washing or hybridization temperature, washing or hybridization time etc.

[0762] In another embodiment, the present invention relates to a method for the identification of a gene product the expression of which confers increased yield, e.g. an increased yield-related trait, for example enhanced tolerance to abiotic environmental stress, for example an increased drought tolerance and/or low temperature tolerance and/or an increased nutrient use efficiency, intrinsic yield and/or another mentioned yield-related trait in a cell, comprising the following steps:
[0763] (a) identifying a nucleic acid molecule in an organism, which is at least 20%, preferably 25%, more preferably 30%, even more preferred are 35%. 40% or 50%, even more preferred are 60%, 70% or 80%, most preferred are 90% or 95% or more homolog to the nucleic acid molecule encoding a protein comprising the polypeptide molecule as shown in column 5 or 7 of table II, or comprising a consensus sequence or a polypeptide motif as shown in column 7 of table IV, or being encoded by a nucleic acid molecule comprising a polynucleotide as shown in column 5 or 7 of table I, or a homologue thereof as described herein, for example via homology search in a data bank;
[0764] (b) enhancing the expression of the identified nucleic acid molecules in the host cells;
[0765] (c) assaying the level of enhancement of in increasing yield, e.g. increasing a yieldrelated trait, for example enhancing tolerance to abiotic environmental stress, for example increasing drought tolerance and/or low temperature tolerance and/or increasing nutrient use efficiency, increasing intrinsic yield and/or another mentioned yieldrelated trait in the host cells; and
[0766] (d) identifying the host cell, in which the enhanced expression confers in increasing yield, e.g. increasing a yield-related trait, for example enhancing tolerance to abiotic environmental stress, for example increasing drought tolerance and/or low temperature tolerance and/or increasing nutrient use efficiency, increasing intrinsic yield and/or another mentioned yield-related trait in the host cell compared to a wild type.

[0767] Further, the nucleic acid molecule disclosed herein, in particular the nucleic acid molecule shown column 5 or 7 of table I A or B, may be sufficiently homologous to the sequences of related species such that these nucleic acid molecules may serve as markers for the construction of a genomic map in related organism or for association mapping. Furthermore natural variation in the genomic regions corresponding to nucleic acids disclosed herein, in particular the nucleic acid molecule shown column 5 or 7 of table I A or B, or homologous thereof may lead to variation in the activity of the proteins disclosed herein, in particular the proteins comprising polypeptides as shown in column 5 or 7 of table II A or B, or comprising the consensus sequence or the polypeptide motif as shown in column 7 of table IV, and their homolgous and in consequence in a natural variation of an increased yield, e.g. an increased yield-related trait, for example enhanced tolerance to abiotic environmental stress, for example an increased drought tolerance and/or low temperature tolerance and/or an increased nutrient use efficiency, and/or another mentioned yield-related trait.

[0768] In consequence natural variation eventually also exists in form of more active allelic variants leading already to a relative increase in yield, e.g. an increase in an yieldrelated trait, for example enhanced tolerance to abiotic environmental stress, for example drought tolerance and/or low temperature tolerance and/or nutrient use efficiency, and/or another mentioned yield-related trait. Different variants of the nucleic acids molecule disclosed herein, in particular the nucleic acid comprising the nucleic acid molecule as shown column 5 or 7 of table I A or B, which corresponds to different levels of increased yield, e.g. different levels of increased yield-related trait, for example different enhancing tolerance to abiotic environmental stress, for example increased drought tolerance and/or low temperature tolerance and/or increasing nutrient use efficiency, increasing intrinsic yield and/or another mentioned yield-related trait, can be indentified and used for marker assisted breeding for an increased yield, e.g. an increased yield-related trait, for example enhanced tolerance to abiotic environmental stress, for example an increased drought tolerance and/or low temperature tolerance and/or an increased nutrient use efficiency, and/or another mentioned yield-related trait.

[0769] Accordingly, the present invention relates to a method for breeding plants with an increased yield, e.g. an increased yield-related trait, for example enhanced tolerance to abiotic environmental stress, for example an increased drought tolerance and/or low temperature tolerance and/or an increased nutrient use efficiency, comprising
[0770] (a) selecting a first plant variety with an increased yield, e.g. an increased yield-related trait, for example enhanced tolerance to abiotic environmental stress, for example an increased drought tolerance and/or low temperature tolerance and/or an increased nutrient use efficiency based on increased expression of a nucleic acid of the invention as disclosed herein, in particular of a nucleic acid molecule comprising a nucleic acid molecule as shown in column 5 or 7 of table I A or B, or a polypeptide comprising a polypeptide as shown in column 5 or 7 of table II A or B, or comprising a consensus sequence or a polypeptide motif as shown in column 7 of table IV, or a homologue thereof as described herein;
[0771] (b) associating the level of increased yield, e.g. increased yield-related trait, for example enhanced tolerance to abiotic environmental stress, for example increased drought tolerance and/or low temperature tolerance and/or an increased nutrient use efficiency, and/or another mentioned yield-related trait with the expression level or the genomic structure of a gene encoding said polypeptide or said nucleic acid molecule;
[0772] (c) crossing the first plant variety with a second plant variety, which significantly differs in its level of increased yield, e.g. increased yield-related trait, for example enhanced tolerance to abiotic environmental stress, for example an increased drought tolerance and/or low temperature tolerance and/or an increased nutrient use efficiency, and/or another mentioned yield-related trait; and
[0773] (d) identifying, which of the offspring varieties has got increased levels of an increased yield, e.g. an increased yield-related trait, for example enhanced tolerance to abiotic environmental stress, for example an increased drought tolerance and/or low temperature tolerance and/or an increased nutrient use efficiency, and/or another mentioned yield-related trait

[0774] In another embodiment, the present invention relates to a kit comprising the nucleic acid molecule, the vector, the host cell, the polypeptide, or the antisense, RNAi, snRNA, dsRNA, siRNA, miRNA, ta-siRNA, cosuppression molecule, or ribozyme molecule, or the viral nucleic acid molecule, the antibody, plant cell, the plant or plant tissue, the harvestable part, the propagation material and/or the compound and/or agonist identified according to the method of the invention.

[0775] The compounds of the kit of the present invention may be packaged in containers such as vials, optionally with/in buffers and/or solution. If appropriate, one or more of said components might be packaged in one and the same container. Additionally or alternatively, one or more of said components might be adsorbed to a solid support as, e.g. a nitrocellulose filter, a glas plate, a chip, or a nylon membrane or to the well of a micro titerplate. The kit can be used for any of the herein described methods and embodiments, e.g. for the production of the host cells, transgenic plants, pharmaceutical compositions, detection of homologous sequences, identification of antagonists or agonists, as food or feed or as a supplement thereof or as supplement for the treating of plants, etc. Further, the kit can comprise instructions for the use of the kit for any of said embodiments. In one embodiment said kit comprises further a nucleic acid molecule encoding one or more of the aforementioned protein, and/or an antibody, a vector, a host cell, an antisense nucleic acid, a plant cell or plant tissue or a plant. In another embodiment said kit comprises PCR primers to detect and discrimante the nucleic acid molecule to be reduced in the process of the invention, e.g. of the nucleic acid molecule of the invention.

[0776] In a further embodiment, the present invention relates to a method for the production of an agricultural composition providing the nucleic acid molecule for the use according to the process of the invention, the nucleic acid molecule of the invention, the vector of the invention, the antisense, RNAi, snRNA, dsRNA, siRNA, miRNA, ta-siRNA, cosuppression molecule, ribozyme, or antibody of the invention, the viral nucleic acid molecule of the invention, or the polypeptide of the invention or comprising the steps of the method according to the invention for the identification of said compound or agonist; and formulating the nucleic acid molecule, the vector or the polypeptide of the invention or the agonist, or compound identified according to the methods or processes of the present invention or with use of the subject matters of the present invention in a form applicable as plant agricultural composition.

[0777] In another embodiment, the present invention relates to a method for the production of the plant culture composition comprising the steps of the method of the present invention; and formulating the compound identified in a form acceptable as agricultural composition.

[0778] Under “acceptable as agricultural composition” is understood, that such a composition is in agreement with the laws regulating the content of fungicides, plant nutrients, herbizides, etc. Preferably such a composition is without any harm for the protected plants and the animals (humans included) fed therewith. said polypeptide or nucleic acid molecule or the genomic structure of the genes encoding said polypeptide or nucleic acid molecule of the invention.

[0779] Throughout this application, various publications are referenced. The disclosures of all of these publications and those references cited within those publications in their entireties are hereby incorporated by reference into this application in order to more fully describe the state of the art to which this invention pertains.

[0780] It should also be understood that the foregoing relates to preferred embodiments of the present invention and that numerous changes and variations may be made therein without departing from the scope of the invention. The invention is further illustrated by the following examples, which are not to be construed in any way as limiting. On the contrary, it is to be clearly understood that various other embodiments, modifications and equivalents thereof, which, after reading the description herein, may suggest themselves to those skilled in the art without departing from the spirit of the present invention and/or the scope of the claims.

[0781] In one embodiment, the increased yield results in an increase of the production of a specific ingredient including, without limitation, an enhanced and/or improved sugar content or sugar composition, an enhanced or improved starch content and/or starch composition, an enhanced and/or improved oil content and/or oil composition (such as enhanced seed oil content), an enhanced or improved protein content and/or protein composition (such as enhanced seed protein content), an enhanced and/or improved vitamin content and/or vitamin composition, or the like.

[0782] Further, in one embodiment, the method of the present invention comprises harvesting the plant or a part of the plant produced or planted and producing fuel with or from the harvested plant or part thereof. Further, in one embodiment, the method of the present invention comprises harvesting a plant part useful for starch isolation and isolating starch from this plant part, wherein the plant is plant useful for starch production, e.g. potato. Further, in one embodiment, the method of the present invention comprises harvesting a plant part useful for oil isolation and isolating oil from this plant part, wherein the plant is plant useful for oil production, e.g. oil seed rape or Canola, cotton, soy, or sunflower.

[0783] For example, in one embodiment, the oil content in the corn seed is increased. Thus, the present invention relates to the production of plants with increased oil content per acre (harvestable oil).

[0784] For example, in one embodiment, the oil content in the soy seed is increased. Thus, the present invention relates to the production of soy plants with increased oil content per acre (harvestable oil).

[0785] For example, in one embodiment, the oil content in the OSR seed is increased.

[0786] Thus, the present invention relates to the production of OSR plants with increased oil content per acre (harvestable oil).

[0787] For example, the present invention relates to the production of cotton plants with increased oil content per acre (harvestable oil).

[0788] The present invention is illustrated by the following examples which are not meant to be limiting.

### Example 1

[0789] Engineering Arabidopsis plants with an increased yield, e.g. an increased yield-related trait, for example enhanced tolerance to abiotic environmental stress, for example an increased drought tolerance and/or low temperature tolerance and/or an increased nutrient use efficiency, and/or another mentioned yield-related trait by over-expressing the genes of Table I, e.g. expressing genes of the present invention.

[0790] Cloning of the sequences of the present invention as shown in table I, column 5 and 7, for the expression in plants.

[0791] Unless otherwise specified, standard methods, for example as described in Sambrook et al., Molecular Cloning: A laboratory manual, Cold Spring Harbor 1989, Cold Spring Harbor Laboratory Press can be used.

[0792] The inventive sequences as shown in table I, column 5, were amplified by PCR as described in the protocol of the Pfu Ultra, Pfu Turbo or Herculase DNA polymerase (Stratagene). The composition for the protocol of the Pfu Ultra, Pfu Turbo or Herculase DNA polymerase was as follows: 1×PCR buffer (Stratagene), 0.2 mM of each dNTP, 100 ng genomic DNA of Saccharomyces cerevisiae (strain S288C; Research Genetics, Inc., now Invitrogen), Escherichia coli (strain MG1655; E. coli Genetic Stock Center), Synechocystis sp. (strain PCC6803), Azotobacter vinelandii (strain N. R. Smith, 16), Thermus thermophilus (HB8) or 50 ng cDNA from various tissues and development stages of Arabidopsis thaliana (ecotype Columbia), Physcomitrella patens, Populus trichocarpa, Oryza sativa, Glycine max (variety Resnick), or Zea mays (variety B73, Mo17, A188), 50 μmol forward primer, 50 μmol reverse primer, with or without 1 M Betaine, 2.5 u Pfu Ultra, Pfu Turbo or Herculase DNA polymerase.

[0793] The amplification cycles were as follows:

[0794] 1 cycle of 2-3 minutes at 94-95° C., then 25-36 cycles with 30-60 seconds at 94-95° C., 30-45 seconds at 50-60° C. and 210-480 seconds at 72° C., followed by 1 cycle of 5-10 minutes at 72° C., then 4-16° C.—preferably for Saccharomyces cerevisiae, Escherichia coli, Synechocystis sp., Azotobacter vinelandii, Thermus thermophilus.

[0795] In case of Arabidopsis thaliana, Brassica napus, Glycine max, Oryza sativa, Physcomitrella patens, Populus trichocarpa, Zea mays the amplification cycles were as follows:

1 cycle with 30 seconds at 94° C., 30 seconds at 61° C., 15 minutes at 72° C.,
then 2 cycles with 30 seconds at 94° C., 30 seconds at 60° C., 15 minutes at 72° C.,
then 3 cycles with 30 seconds at 94° C., 30 seconds at 59° C., 15 minutes at 72° C.,
then 4 cycles with 30 seconds at 94° C., 30 seconds at 58° C., 15 minutes at 72° C.,
then 25 cycles with 30 seconds at 94° C., 30 seconds at 57° C., 15 minutes at 72° C.,
then 1 cycle with 10 minutes at 72° C.,
then finally 4-16° C.

[0796] RNA were generated with the RNeasy Plant Kit according to the standard protocol (Qiagen) and Superscript II Reverse Transkriptase was used to produce double stranded cDNA according to the standard protocol (Invitrogen).

[0797] ORF specific primer pairs for the genes to be expressed are shown in table III, column 7. The following adapter sequences were added to Saccharomyces cerevisiae ORF specific primers (see table III) for cloning purposes:

SEQ ID NO: 1
i) foward primer: 5′-GGAATTCCAGCTGACCACC-3′
SEQ ID NO: 2
ii) reverse primer: 5′-GATCCCCGGGAATTGCCATG-3′

[0798] These adaptor sequences allow cloning of the ORF into the various vectors containing the Resgen adaptors, see table column E of table VII.

[0799] The following adapter sequences were added to Saccharomyces cerevisiae, Escherichia coli, Synechocystis sp., Azotobacter vinelandii, Thermus thermophilus, Arabidopsis thaliana, Brassica napus, Glycine max, Oryza sativa, Physcomitrella patens, Populus trichocarpa, or Zea mays ORF specific primers for cloning purposes:

SEQ ID NO: 3
iii) forward primer: 5′-TTGCTCTTCC-3′
SEQ ID NO: 4
iiii) reverse primer: 5′-TTGCTCTTCG-3′

[0800] The adaptor sequences allow cloning of the ORF into the various vectors containing the Colic adaptors, see table column E of table VII.

[0801] Therefore for amplification and cloning of Saccharomyces cerevisiae SEQ ID NO: 5042, a primer consisting of the adaptor sequence i) and the ORF specific sequence SEQ ID NO: 5058 and a second primer consisting of the adaptor sequence ii) and the ORF specific sequence SEQ ID NO: 5059 were used.

[0802] For amplification and cloning of Escherichia coli SEQ ID NO: 1709, a primer consisting of the adaptor sequence iii) and the ORF specific sequence SEQ ID NO: 2221 and a second primer consisting of the adaptor sequence iiii) and the ORF specific sequence SEQ ID NO: 2222 were used.

[0803] For amplification and cloning of Thermus thermophilus SEQ ID NO: 4630, a primer consisting of the adaptor sequence iii) and the ORF specific sequence SEQ ID NO: 5036 and a second primer consisting of the adaptor sequence iiii) and the ORF specific sequence SEQ ID NO: 5037 were used.

[0804] For amplification and cloning of Arabidopsis thaliana SEQ ID NO: 63, a primer consisting of the adaptor sequence iii) and the ORF specific sequence SEQ ID NO: 377 and a second primer consisting of the adaptor sequence iiii) and the ORF specific sequence SEQ ID NO: 378 were used.

[0805] For amplification and cloning of Oryza sativa SEQ ID NO: 9854, a primer consisting of the adaptor sequence iii) and the ORF specific sequence SEQ ID NO: 9964 and a second primer consisting of the adaptor sequence iiii) and the ORF specific sequence SEQ ID NO: 9965 were used.

[0806] For amplification and cloning of Populus trichocarpa SEQ ID NO: 2457, a primer consisting of the adaptor sequence iii) and the ORF specific sequence SEQ ID NO: 3457 and a second primer consisting of the adaptor sequence iiii) and the ORF specific sequence SEQ ID NO: 3458 were used.

[0807] For amplification and cloning of Zea mays SEQ ID NO: 5492, a primer consisting of the adaptor sequence iii) and the ORF specific sequence SEQ ID NO: 5834 and a second primer consisting of the adaptor sequence iiii) and the ORF specific sequence SEQ ID NO: 5835 were used.

[0808] Following these examples every sequence disclosed in table I, preferably column 5, can be cloned by fusing the adaptor sequences to the respective specific primers sequences as disclosed in table III, column 7 using the respective vectors shown in Table VII.

TABLE VII
Overview of the different vectors used for cloning the ORFs and shows their SEQIDs
(column A), their vector names (column B), the promotors they contain for expression
of the ORFs (column C), the additional artificial targeting sequence column D), the
adapter sequence (column E), the expression type conferred by the promoter
mentioned in column B (column F) and the figure number (column G).

| A | B | C | D | E | F | |
|---|---|---|---|---|---|---|
| Seq | Vector | Promoter | Target | Adapter | Expression | G |
| ID | Name | Name | Sequence | Sequence | Type | FIG. |
| 9 | pMTX0270p | Super | | Colic | non targeted constitutive | 6 |
| | | | | | expression preferentially | |
| | | | | | in green tissues | |
| 31 | pMTX155 | Big35S | | Resgen | non targeted constitutive | 7 |
| | | | | | expression preferentially | |
| | | | | | in green tissues | |
| 32 | VC- | Super | FNR | Resgen | plastidic targeted constitutive | 3 |
| | MME354- | | | | expression | |
| | 1QCZ | | | | preferentially in green | |
| | | | | | tissues | |
| 34 | VC- | Super | IVD | Resgen | mitochondric targeted | 8 |
| | MME356- | | | | constitutive expression | |
| | 1QCZ | | | | preferentially in green | |
| | | | | | tissues | |
| 36 | VC- | USP | | Resgen | non targeted expression | 9 |
| | MME301- | | | | preferentially in | |
| | 1QCZ | | | | seeds | |
| 37 | pMTX461korrp | USP | FNR | Resgen | plastidic targeted expression | 10 |
| | | | | | preferentially | |
| | | | | | in seeds | |
| 39 | VC- | USP | IVD | Resgen | mitochondric targeted | 11 |
| | MME462- | | | | expression preferentially | |
| | 1QCZ | | | | in seeds | |
| 41 | VC- | Super | | Colic | non targeted constitutive | 1 |
| | MME220- | | | | expression preferentially | |
| | 1qcz | | | | in green tissues | |
| 42 | VC- | Super | FNR | Colic | plastidic targeted constitutive | 4 |
| | MME432- | | | | expression | |
| | 1qcz | | | | preferentially in green | |
| | | | | | tissues | |
| 44 | VC- | Super | IVD | Colic | mitochondric targeted | 12 |
| | MME431- | | | | constitutive expression | |
| | 1qcz | | | | preferentially in green | |
| | | | | | tissues | |
| 46 | VC- | PcUbi | | Colic | non targeted constitutive | 2 |
| | MME221- | | | | expression preferentially | |
| | 1qcz | | | | in green tissues | |
| 47 | pMTX447korr | PcUbi | FNR | Colic | plastidic targeted constitutive | 13 |
| | | | | | expression | |
| | | | | | preferentially in green | |
| | | | | | tissues | |
| 49 | VC- | PcUbi | IVD | Colic | mitochondric targeted | 14 |
| | MME445- | | | | constitutive expression | |
| | 1qcz | | | | preferentially in green | |
| | | | | | tissues | |
| 51 | VC- | USP | | Colic | non targeted expression | 15 |
| | MME289- | | | | preferentially in | |
| | 1qcz | | | | seeds | |
| 52 | VC- | USP | FNR | Colic | plastidic targeted expression | 16 |
| | MME464- | | | | preferentially | |
| | 1qcz | | | | in seeds | |
| 54 | VC- | USP | IVD | Colic | mitochondric targeted | 17 |
| | MME465- | | | | expression in preferentially | |
| | 1qcz | | | | seeds | |
| 56 | VC- | Super | | Resgen | non targeted constitutive | 5 |
| | MME489- | | | | expression preferentially | |
| | 1QCZ | | | | in green tissues | |

### Example 1b

### Construction of Binary Vectors for Non-Targeted Expression of Proteins.

[0809] “Non-targeted” expression in this context means, that no additional targeting sequence were added to the ORF to be expressed.

[0810] For non-targeted expression the binary vectors used for cloning were VC-MME220-1qcz SEQ ID NO 41 (FIG. 2), VC-MME221-1qcz SEQ ID NO 46 (FIG. 2) and VC-MME489-1QCZ SEQ ID NO: 56 (FIG. 5), respectively. The binary vectors used for cloning the targeting sequence were VC-MME489-1QCZ SEQ ID NO: 56 (FIG. 5), pMTX155 SEQ ID NO 31 (FIG. 7) and pMTX0270p SEQ ID NO 9 (FIG. 6), respectively. For non-targeted constitutive expression in preferentially green tissues the Big35S promoter ((Comai et al., Plant Mol Biol 15, 373-383 (1990), Kawalleck et al., Plant. Molecular Biology, 21, 673 (1993)) was used in context of the vector pMTX155. Other useful binary vectors are known to the skilled worker; an overview of binary vectors and their use can be found in Hellens R., Mullineaux P. and Klee H., (Trends in Plant Science, 5 (10), 446 (2000)). Such vectors have to be equally equipped with appropriate promoters and targeting sequences.

### Example 1C

[0811] Amplification of the Plastidic Targeting Sequence of the Gene FNR from Spinacia oleracea and Construction of Vector for Plastid-Targeted Expression in Preferential Green Tissues or Preferential in Seeds.

[0812] In order to amplify the targeting sequence of the FNR gene from S. oleracea, genomic DNA was extracted from leaves of 4 weeks old S. oleracea plants (DNeasy Plant Mini Kit, Qiagen, Hilden). The gDNA was used as the template for a PCR.

[0813] To enable cloning of the transit sequence into the vector VC-MME489-1QCZ an EcoRI restriction enzyme recognition sequence was added to both the forward and reverse primers, whereas for cloning in the vectors pMTX0270p, VC-MME220-1qcz and VC-MME221-1qcz a Pmel restriction enzyme recognition sequence was added to the forward primer and a NcoI site was added to the reverse primer.

FNR5EcoResgen
SEQ ID NO: 5
ATA GAA TTC GCA TAA ACT TAT CTT CAT AGT TGC C
FNR3EcoResgen
SEQ ID NO: 6
ATA GAA TTC AGA GGC GAT CTG GGC CCT
FNR5PmeColic
SEQ ID NO: 7
ATA GTT TAA ACG CAT AAA CTT ATC TTC ATA GTT GCC
FNR3NcoColic
SEQ ID NO: 8
ATA CCA TGG AAG AGC AAG AGG CGA TCT GGG CCC T

[0814] The resulting sequence SEQ ID NO: 29 amplified from genomic spinach DNA, comprised a 5″UTR (bp 1-165), and the coding region (bp 166-273 and 351-419). The coding sequence is interrupted by an intronic sequence from by 274 to bp 350:

(SEQ ID NO: 29)
gcataaacttatcttcatagttgccactccaatttgctccttgaatctcctccacccaatacataatccactcctccatcaccc
acttcactactaaatcaaacttaactctgtttttctctctcctcctttcatttcttattcttccaatcatcgtactccgccatgaccac
cgctgtcaccgccgctgtttctttcccctctaccaaaaccacctctctctccgcccgaagctcctccgtcatttcccctgaca
aaatcagctacaaaaaggtgattcccaatttcactgtgttttttattaataatttgttattttgatgatgagatgattaatttgggt
gctgcaggttcctttgtactacaggaatgtatctgcaactgggaaaatgggacccatcagggcccagatcgcctct

[0815] The PCR fragment derived with the primers FNR5EcoResgen and FNR3EcoResgen was digested with EcoRI and ligated in the vector VC-MME489-1QCZ that had also been digested with EcoRI. The correct orientation of the FNR targeting sequence was tested by sequencing. The vector generated in this ligation step were VC-MME354-1QCZ.

[0816] The PCR fragment derived with the primers FNR5PmeColic and FNR3NcoColic was digested with Pmel and NcoI and ligated in the vectors VC-MME220-1qcz and VCMME221-1qcz that had been digested with SmaI and NcoI. The vectors generated in this ligation step were VC-MME432-1qcz and pMTX447korr, respectively.

[0817] For plastidic-targeted constitutive expression in preferentially green tissues an artifical promoter A(ocs)3AmasPmas promoter (Super promotor)) (Ni et al., Plant Journal 7, 661 (1995), WO 95/14098) was used in context of the vector VC-MME354-1QCZ for ORFs from Saccharomyces cerevisiae and in context of the vector VC-MME432-1qcz for ORFs from Escherichia coli, resulting in each case in an “in-frame” fusion of the FNR targeting sequence with the ORFs.

[0818] For plastidic-targeted constitutive expression in preferentially green tissues and seeds the PcUbi promoter was used in context of the vector pMTX447korr for ORFs from Saccharomyces cerevisiae, Escherichia coli, Synechocystis sp., Azotobacter vinelandii, Thermus thermophilus, Arabidopsis thaliana, Brassica napus, Glycine max, Oryza sativa, Physcomitrella patens, Populus trichocarpa, or Zea mays, resulting in each case in an “inframe” fusion of the FNR targeting sequence with the ORFs.

### Example 1D

### Construction of Binary Vectors for Mitochondric-Targeted Expression of Proteins

[0819] Amplification of the mitochondrial targeting sequence of the gene IVD from Arabidopsis thaliana and construction of vector for mitochondrial-targeted expression in preferential green tissues or preferential in seeds.

[0820] In order to amplify the targeting sequence of the IVD gene from A. thaliana, genomic DNA was extracted from leaves of A. thaliana plants (DNeasy Plant Mini Kit, Qiagen, Hilden). The gDNA was used as the template for a PCR.

[0821] To enable cloning of the transit sequence into the vectors VC-MME489-1QCZ and VC-MME301-1QCZ an EcoRI restriction enzyme recognition sequence was added to both the forward and reverse primers, whereas for cloning in the vectors VC-MME220-1qcz, VC-MME221-1qcz and VC-MME289-1qcz a Pmel restriction enzyme recognition sequence was added to the forward primer and a NcoI site was added to the reverse primer.

IVD5EcoResgen
SEQ ID NO: 57
ATA GAA TTC ATG CAG AGG TTT TTC TCC GC
IVD3EcoResgen
SEQ ID NO: 58
ATAg AAT TCC gAA gAA CgA gAA gAg AAA g
IVD5PmeColic
SEQ ID NO: 59
ATA GTT TAA ACA TGC AGA GGT TTT TCT CCG C
IVD3NcoColic
SEQ ID NO: 60
ATA CCA TGG AAG AGC AAA GGA GAG ACG AAG AAC GAG

[0822] The resulting sequence (SEQ ID NO: 61) amplified from genomic A. thaliana DNA with IVD5EcoResgen and IVD3EcoResgen comprised 81 bp:

SEQ ID NO: 61
atgcagaggttttctccgccagatcgattctcggttacgccgtcaagacgcggaggaggtctttctcttctcgttcttcg

The resulting sequence (SEQ ID NO: 62) amplified from genomic A. thaliana DNA with IVD5PmeColic and IVD3NcoColic comprised 89 bp:

SEQ ID NO: 62
atgcagaggtttttctccgccagatcgattctcggttacgccgtcaagacgcggaggaggtctttctcttctcgttcttcgtctctcct

[0823] The PCR fragment derived with the primers IVD5EcoResgen and IVD3EcoResgen was digested with EcoRI and ligated in the vectors VC-MME489-1QCZ and VC-MME301-1QCZ that had also been digested with EcoRI. The correct orientation of the IVD targeting sequence was tested by sequencing. The vectors generated in this ligation step were VC-MME356-1QCZ and VC-MME462-1QCZ, respectively.

[0824] The PCR fragment derived with the primers IVD5PmeColic and IVD3NcoColic was digested with Pmel and NcoI and ligated in the vectors VC-MME220-1qcz, VCMME221-1qcz and VC-MME289-1qcz that had been digested with SmaI and NcoI. The vectors generated in this ligation step were VC-MME431-1qcz, VC-MME465-1qcz and VCMME445-1qcz, respectively.

[0825] For mitochondrial-targeted constitutive expression in preferentially green tissues an artifical promoter A(ocs)₃AmasPmas promoter (Super promotor) (Ni et al., Plant Journal 7, 661 (1995), WO 95/14098) was used in context of the vector VC-MME356-1QCZ for ORFs from Saccharomyces cerevisiae and in context of the vector VC-MME431-1qcz for ORFs from Escherichia coli, resulting in each case in an “in-frame” fusion between the IVD sequence and the respective ORFs.

[0826] For mitochondrial-targeted constitutive expression in preferentially seeds the USP promoter (Bäumlein et al., Mol Gen Genet. 225(3):459-67 (1991)) was used in context of the vector VC-MME462-1QCZ for ORFs from Saccharomyces cerevisiae and in context of the vector VC-MME465-1qcz for ORFs from Escherichia coli, resulting in each case in an “in-frame” fusion between the IVD sequence and the respective ORFs.

[0827] For mitochondrial-targeted constitutive expression in preferentially green tissues and seeds the PcUbi promoter was used in context of the vector VC-MME445-1qcz for ORFs from Saccharomyces cerevisiae, Escherichia coli, Synechocystis sp., Azotobacter vinelandii, Thermus thermophilus, Arabidopsis thaliana, Brassica napus, Glycine max, Oryza sativa, Physcomitrella patens, Populus trichocarpa, or Zea mays, resulting in each case in an “in-frame” fusion between the IVD sequence and the respective ORFs.

[0828] Other useful binary vectors are known to the skilled worker; an overview of binary vectors and their use can be found in Hellens R., Mullineaux P. and Klee H., (Trends in Plant Science, 5 (10), 446 (2000)). Such vectors have to be equally equipped with appropriate promoters and targeting sequences.

### Example 1E

### Cloning of Inventive Sequences as Shown in Table I, Column 5 in the Different Expression Vectors.

[0829] For cloning the ORFs of SEQ ID NO: 5042 from S. cerevisiae into vectors containing the Resgen adaptor sequence the respective vector DNA was treated with the restriction enzyme NcoI. For cloning of ORFs from Saccharomyces cerevisiae into vectors containing the Colic adaptor sequence, the respective vector DNA was treated with the restriction enzymes PacI and NcoI following the standard protocol (MBI Fermentas). For cloning of ORFs from Escherichia coli, Synechocystis sp., Azotobacter vinelandii, Thermus thermophilus, Arabidopsis thaliana, Brassica napus, Glycine max, Oryza sativa, Physcomitrella patens, Populus trichocarpa, or Zea mays the vector DNA was treated with the restriction enzymes PacI and NcoI following the standard protocol (MBI Fermentas). In all cases the reaction was stopped by inactivation at 70° C. for 20 minutes and purified over QIAquick or NucleoSpin Extract II columns following the standard protocol (Qiagen or MachereyNagel).

[0830] Then the PCR-product representing the amplified ORF with the respective adapter sequences and the vector DNA were treated with T4 DNA polymerase according to the standard protocol (MBI Fermentas) to produce single stranded overhangs with the parameters 1 unit T4 DNA polymerase at 37° C. for 2-10 minutes for the vector and 1-2 u T4 DNA polymerase at 15-17° C. for 10-60 minutes for the PCR product representing SEQ ID NO: 5042.

[0831] The reaction was stopped by addition of high-salt buffer and purified over QIAquick or NucleoSpin Extract II columns following the standard protocol (Qiagen or Macherey-Nagel).

[0832] According to this example the skilled person is able to clone all sequences disclosed in table I, preferably column 5.

[0833] Approximately 30-60 ng of prepared vector and a defined amount of prepared amplificate were mixed and hybridized at 65° C. for 15 minutes followed by 37° C. 0.1° C./1 seconds, followed by 37° C. 10 minutes, followed by 0.1° C./1 seconds, then 4-10° C.

[0834] The ligated constructs were transformed in the same reaction vessel by addition of competent E. coli cells (strain DHSalpha) and incubation for 20 minutes at 1° C. followed by a heat shock for 90 seconds at 42° C. and cooling to 1-4° C. Then, complete medium (SOC) was added and the mixture was incubated for 45 minutes at 37° C. The entire mixture was subsequently plated onto an agar plate with 0.05 mg/ml kanamycin and incubated overnight at 37° C.

[0835] The outcome of the cloning step was verified by amplification with the aid of primers which bind upstream and downstream of the integration site, thus allowing the amplification of the insertion. The amplifications were carried out as described in the protocol of Taq DNA polymerase (Gibco-BRL). The amplification cycles were as follows:

[0836] 1 cycle of 1-5 minutes at 94° C., followed by 35 cycles of in each case 15-60 seconds at 94° C., 15-60 seconds at 50-66° C. and 5-15 minutes at 72° C., followed by 1 cycle of 10 minutes at 72° C., then 4-16° C.

[0837] Several colonies were checked, but only one colony for which a PCR product of the expected size was detected was used in the following steps.

[0838] A portion of this positive colony was transferred into a reaction vessel filled with complete medium (LB) supplemented with kanamycin and incubated overnight at 37° C.

[0839] The plasmid preparation was carried out as specified in the Qiaprep or NucleoSpin Multi-96 Plus standard protocol (Qiagen or Macherey-Nagel).

[0840] Generation of transgenic plants which express SEQ ID NO: 5042 or any other sequence disclosed in table I, preferably column 5

[0841] 1-5 ng of the plasmid DNA isolated as described above was transformed by electroporation or transformation into competent cells of Agrobacterium tumefaciens. For expression of OS02G44730 (SEQ ID NO 13501), the same amount of isolated plasmid DNA of the polynucleotide sequence given in SEQ ID NO: 13933 isolated according preparation method was used. Agrobacterium tumefaciens was strain GV 3101 pMP90 (Koncz and Schell, Mol. Gen. Gent. 204, 383 (1986)). After transformation, complete medium (YEP) was added and the mixture was transferred into a fresh reaction vessel for 3 hours at 28° C. Thereafter, all of the reaction mixture was plated onto YEP agar plates supplemented with the respective antibiotics, e.g. rifampicine (0.1 mg/ml), gentamycine (0.025 mg/ml and kanamycin (0.05 mg/ml) and incubated for 48 hours at 28° C.

[0842] The agrobacteria that contains the plasmid construct were then used for the transformation of plants.

[0843] A colony was picked from the agar plate with the aid of a pipette tip and taken up in 3 ml of liquid TB medium, which also contained suitable antibiotics as described above. The preculture was grown for 48 hours at 28° C. and 120 rpm.

[0844] 400 ml of LB medium containing the same antibiotics as above were used for the main culture. The preculture was transferred into the main culture. It was grown for 18 hours at 28° C. and 120 rpm. After centrifugation at 4 000 rpm, the pellet was resuspended in infiltration medium (MS medium, 10% sucrose).

[0845] In order to grow the plants for the transformation, dishes (Piki Saat 80, green, provided with a screen bottom, 30×20×4.5 cm, from Wiesauplast, Kunststofftechnik, Germany) were half-filled with a GS 90 substrate (standard soil, Werkverband E. V., Germany). The dishes were watered overnight with 0.05% Proplant solution (Chimac-Apriphar, Belgium). A. thaliana C24 seeds (Nottingham Arabidopsis Stock Centre, UK; NASC Stock N906) were scattered over the dish, approximately 1 000 seeds per dish. The dishes were covered with a hood and placed in the stratification facility (8 h, 110 μmol/m²s¹, 22° C.; 16 h, dark, 6° C.). After 5 days, the dishes were placed into the short-day controlled environment chamber (8 h, 130 μmol/m²s¹, 22° C.; 16 h, dark, 20° C.), where they remained for approximately 10 days until the first true leaves had formed.

[0846] The seedlings were transferred into pots containing the same substrate (Teku pots, 7 cm, LC series, manufactured by Poppelmann GmbH & Co, Germany). Five plants were pricked out into each pot. The pots were then returned into the short-day controlled environment chamber for the plant to continue growing.

After 10 days, the plants were transferred into the greenhouse cabinet (supplementary illumination, 16 h, 340 μE/m²s, 22° C.; 8 h, dark, 20° C.), where they were allowed to grow for further 17 days.

[0847] For the transformation, 6-week-old Arabidopsis plants, which had just started flowering were immersed for 10 seconds into the above-described agrobacterial suspension which had previously been treated with 10 μl Silwett L77 (Crompton S. A., Osi Specialties, Switzerland). The method in question is described by Clough J. C. and Bent A. F. (Plant J. 16, 735 (1998)).

[0848] The plants were subsequently placed for 18 hours into a humid chamber. Thereafter, the pots were returned to the greenhouse for the plants to continue growing. The plants remained in the greenhouse for another 10 weeks until the seeds were ready for harvesting.

[0849] Depending on the tolerance marker used for the selection of the transformed plants the harvested seeds were planted in the greenhouse and subjected to a spray selection or else first sterilized and then grown on agar plates supplemented with the respective selection agent. Since the vector contained the bar gene as the tolerance marker, plantlets were sprayed four times at an interval of 2 to 3 days with 0.02% BASTA(O) and transformed plants were allowed to set seeds.

The seeds of the transgenic A. thaliana plants were stored in the freezer (at −20° C.).

[0850] Plant Screening for Yield Increase Under Standardised Growth Conditions

[0851] In this experiment, a plant screening for yield increase (in this case: biomass yield increase) under standardised growth conditions in the absence of substantial abiotic stress has been performed. In a standard experiment soil is prepared as 3.5:1 (v/v) mixture of nutrient rich soil (GS90, Tantau, Wansdorf, Germany) and quarz sand. Alternatively, plants were sown on nutrient rich soil (GS90, Tantau, Germany). Pots were filled with soil mixture and placed into trays. Water was added to the trays to let the soil mixture take up appropriate amount of water for the sowing procedure. The seeds for transgenic A. thaliana plants and their non-trangenic wild-type controls were sown in pots (6 cm diameter). Then the filled tray was covered with a transparent lid and transferred into a precooled (4° C.-5° C.) and darkened growth chamber. Stratification was established for a period of 3-4 days in the dark at 4° C.-5° C. Germination of seeds and growth was initiated at a growth condition of 20° C., 60% relative humidity, 16 h photoperiod and illumination with fluorescent light at approximately 170 μmol/m2s. Covers were removed 7-8 days after sowing. BASTA selection was done at day 10 or day 11 (9 or 10 days after sowing) by spraying pots with plantlets from the top. In the standard experiment, a 0.07% (v/v) solution of BASTA concentrate (183 g/l glufosinate-ammonium) in tap water was sprayed once or, alternatively, a 0.02% (v/v) solution of BASTA was sprayed three times. The wild-type control plants were sprayed with tap water only (instead of spraying with BASTA dissolved in tap water) but were otherwise treated identically. Plants were individualized 13-14 days after sowing by removing the surplus of seedlings and leaving one seedling in soil. Transgenic events and wild-type control plants were evenly distributed over the chamber.

[0852] Watering was carried out every two days after removing the covers in a standard experiment or, alternatively, every day. For measuring biomass performance, plant fresh weight was determined at harvest time (28-29 days after sowing) by cutting shoots and weighing them. Plants were in the stage prior to flowering and prior to growth of inflorescence when harvested. Transgenic plants were compared to the non-transgenic wild-type control plants harvested at the same day. Significance values for the statistical significance of the biomass changes were calculated by applying the ‘student's’ t test (parameters: twosided, unequal variance).

[0853] Per transgenic construct up to 4 independent transgenic lines (=events) were tested and biomass performance was evaluated as described above.

TABLE VIIII-D
Biomass production of transgenic A. thaliana grown under
standardised growth conditions.
Biomass production was measured by weighing plant rosettes.
Biomass increase was calculated as ratio of average weight of
transgenic plants compared to average weight of wild-type control
plants from the same experiment. The mean biomass increase of
transgenic constructs is given (significance value <0.3 and
biomass increase >5% (ratio >1.05)).

| SeqID | Target | ORF | Biomass Increase |
|---|---|---|---|
| 63 | cytoplasmic | AT1G06620_modified | 1.17 |
| 641 | cytoplasmic | AT1G53885 | 1.25 |
| 2457 | cytoplasmic | CDS5293_modified | 1.11 |
| 3463 | cytoplasmic | CDS5305 | 1.06 |
| 6494 | cytoplasmic | AT3G09480 | 1.19 |
| 7434 | cytoplasmic | AT4G11890 | 1.24 |
| 7513 | cytoplasmic | AT5G07310 | 1.40 |
| 7545 | cytoplasmic | CDS5422 | 1.12 |
| 8287 | cytoplasmic | AT4G22240.1 | 1.14 |
| 7864 | cytoplasmic | AT1G09350.1 | 1.13 |
| 8152 | cytoplasmic | AT2G42540.1 | 1.06 |
| 8408 | cytoplasmic | At5g37670.1 | 1.06 |
| 10880 | cytoplasmic | AT1G44760 | 1.05 |
| 10965 | cytoplasmic | AT1G54050.1 | 1.13 |
| 11418 | cytoplasmic | AT2G27040 | 1.06 |
| 12196 | cytoplasmic | AT2G35300 | 1.23 |
| 12316 | cytoplasmic | AT2G35930 | 1.08 |
| 13276 | cytoplasmic | AT5G13220 | 1.24 |
| 13245 | cytoplasmic | AT4G15420.1 | 1.23 |
| 10753 | cytoplasmic | 60952769.R01.1 | 1.15 |
| 13309 | cytoplasmic | AT5G42380 | 1.32 |
| 10749 | cytoplasmic | 57972199.R01.1 | 1.30 |
| 13501 | cytoplasmic | OS02G44730 | 1.30 |
| 13102 | cytoplasmic | AT3G24515 | 1.23 |

### Example 1G

### Plant Screening (Arabidopsis) for Growth Under Limited Nitrogen Supply

[0854] Three different procedures were used for screening:

[0855] Procedure 1). Per transgenic construct 4 independent transgenic lines (=events) were tested (22-28 plants per construct). Arabidopsis thaliana seeds were sown in pots containing a 1:1 (v:v) mixture of nutrient depleted soil (“Einheitserde Typ 0”, 30% clay, Tantau, Wansdorf Germany) and sand. Germination was induced by a four day period at 4° C., in the dark. Subsequently the plants were grown under standard growth conditions (photoperiod of 16 h light and 8 h dark, 20° C., 60% relative humidity, and a photon flux density of 200 μE). The plants were grown and cultured, inter alia they were watered every second day with a N-depleted nutrient solution. The N-depleted nutrient solution e.g. contained beneath water

| mineral nutrient | final concentration |
|---|---|
| KCl | 3.00 mM |
| MgSO₄ × 7H₂O | 0.5 mM |
| CaCl₂ × 6H₂O | 1.5 mM |
| K₂SO₄ | 1.5 mM |
| NaH₂PO₄ | 1.5 mM |
| Fe-EDTA | 40 μM |
| H₃BO₃ | 25 μM |
| MnSO₄ × H₂O | 1 μM |
| ZnSO₄ × 7H₂O | 0.5 μM |
| Cu₂SO₄ × 5H₂O | 0.3 μM |
| Na₂MoO₄ × 2H₂O | 0.05 μM |

[0856] After 9 to 10 days the plants were individualized. After a total time of 28 to 31 days the plants were harvested and rated by the fresh weight of the aerial parts of the plants. The biomass increase has been measured as ratio of the fresh weight of the aerial parts of the respective transgenic plant and the non-transgenic wild type plant.

[0857] Procedure 2) Per transgenic construct 4-7 independent transgenic lines (=events) were tested (21-28 plants per construct). Arabidopsis thaliana seeds were sown in pots containing a 1:0.45:0.45 (v:v:v) mixture of nutrient depleted soil (“Einheitserde Typ 0”, 30% clay, Tantau, Wansdorf Germany), sand and vermiculite. Dependent on the nutrient-content of each batch of nutrient-depleted soil, macronutrients, except nitrogen, were added to the soil-mixture to obtain a nutrient-content in the pre-fertilized soil comparable to fully fertilized soil. Nitrogen was added to a content of about 15% compared to fully fertilized soil. The median concentration of macronutrients in fully fertilized and nitrogen-depleted soil is stated in the following table.

| | Median concentration of | Median concentration of |
|---|---|---|
| | macronutrients in nitrogen- | macronutrients in fully |
| Macronutrient | depleted soil [mg/l] | fertilized soil [mg/l] |
| N (soluble) | 27.9 | 186.0 |
| P | 142.0 | 142.0 |
| K | 246.0 | 246.0 |
| Mg | 115.0 | 115.0 |

[0858] Germination was induced by a four day period at 4° C., in the dark. Subsequently the plants were grown under standard growth conditions (photoperiod of 16 h light and 8 h dark, 20° C., 60% relative humidity, and a photon flux density of 200 μE). The plants were grown and cultured, inter alia they were watered with de-ionized water every second day. After 9 to 10 days the plants were individualized. After a total time of 28 to 31 days the plants were harvested and rated by the fresh weight of the aerial parts of the plants. The biomass increase has been measured as ratio of the fresh weight of the aerial parts of the respective transgenic plant and the non-transgenic wild type plant.

[0859] Procedure 3. For screening of transgenic plants a specific culture facility was used. For high-throughput purposes plants were screened for biomass production on agar plates with limited supply of nitrogen (adapted from Estelle and Somerville, 1987). This screening pipeline consists of two levels. Transgenic lines were subjected to subsequent level if biomass production was significantly improved in comparison to wild type plants. With each level number of replicates and statistical stringency was increased.

[0860] For the sowing, the seeds were removed from the Eppendorf tubes with the aid of a toothpick and transferred onto the above-mentioned agar plates, with limited supply of nitrogen (0.05 mM KNO₃). In total, approximately 15-30 seeds were distributed horizontally on each plate (12×12 cm).

[0861] After the seeds have been sown, plates were subjected to stratification for 2-4 days in the dark at 4° C. After the stratification, the test plants were grown for 22 to 25 days at a 16-h-light, 8-h-dark rhythm at 20° C., an atmospheric humidity of 60% and a CO₂ concentration of approximately 400 ppm. The light sources used generate a light resembling the solar color spectrum with a light intensity of approximately 100 μE. After 10 to 11 days the plants were individualized. Improved growth under nitrogen limited conditions was assessed by biomass production of shoots and roots of transgenic plants in comparison to wild type control plants after 20-25 days growth.

[0862] Transgenic lines showing a significant improved biomass production in comparison to wild type plants were subjected to following experiment of the subsequent level on soil as described in procedure 1, however, 3-6 lines per construct were tested (up to 60 plants per construct).

[0863] Biomass production of transgenic Arabidopsis thaliana grown under limited nitrogen supply is shown in Table VIIIa: Biomass production was measured by weighing plant rosettes. Biomass increase was calculated as ratio of median weight for transgenic plants compared to median weight of wild type control plants from the same experiment. The biomass increase of transgenic constructs is given (significance value <0.21 and biomass increase >5% (ratio>1.05))

TABLE VIII-A
(nitrogen use efficency)

| SeqID | Target | ORF | Biomass Increase |
|---|---|---|---|
| 63 | cytoplasmic | AT1G06620_modified | 1.49 |
| 384 | cytoplasmic | AT1G06680.1 | 1.37 |
| 504 | cytoplasmic | AT1G14130.1 | 1.28 |
| 607 | cytoplasmic | AT1G20810.1_modified | 1.28 |
| 641 | cytoplasmic | AT1G53885 | 1.33 |
| 672 | cytoplasmic | AT2G38730.1 | 1.19 |
| 1551 | cytoplasmic | AT3G01150.1_truncated | 1.17 |
| 1628 | cytoplasmic | AT5G47440_modified | 1.56 |
| 1709 | plastidic | B1208 | 1.27 |
| 2226 | plastidic | B4214 | 1.15 |
| 2457 | cytoplasmic | CDS5293_modified | 1.25 |
| 3463 | cytoplasmic | CDS5305 | 1.13 |
| 3794 | cytoplasmic | CDS5397 | 1.35 |
| 4630 | cytoplasmic | TTC1186 | 1.36 |
| 5042 | cytoplasmic | YKL124W | 1.29 |
| 5069 | cytoplasmic | YNL093W | 1.66 |
| 5492 | cytoplasmic | ZM_7266_BQ538406_CORN_LOFI_344_730_B | 1.10 |
| 5838 | cytoplasmic | AT1G29250.1 | 1.06 |
| 5982 | cytoplasmic | AT1G55920.1 | 1.15 |
| 6494 | cytoplasmic | AT3G09480 | 1.20 |
| 7364 | cytoplasmic | AT4G01870 | 1.17 |
| 7434 | cytoplasmic | AT4G11890 | 1.13 |
| 7513 | cytoplasmic | AT5G07310 | 1.33 |
| 7545 | cytoplasmic | CDS5422 | 1.14 |
| 7721 | cytoplasmic | AT1G03905.1 | 1.24 |
| 8287 | cytoplasmic | AT4G22240.1 | 1.12 |
| 7864 | cytoplasmic | AT1G09350.1 | 1.17 |
| 8064 | cytoplasmic | AT1G30135.1 | 1.57 |
| 8104 | cytoplasmic | AT1G35680.1 | 1.60 |
| 8152 | cytoplasmic | AT2G42540.1 | 1.12 |
| 8206 | cytoplasmic | AT3G02990.1 | 1.15 |
| 8408 | cytoplasmic | At5g37670.1 | 1.17 |
| 8842 | cytoplasmic | CDS5376 | 1.31 |
| 9854 | cytoplasmic | LOC_Os02g13560.1 | 1.77 |
| 9981 | cytoplasmic | YCR024C | 1.17 |
| 10798 | cytoplasmic | AT1G05100_truncated | 1.20 |
| 10838 | cytoplasmic | AT1G09450 | 1.24 |
| 10880 | cytoplasmic | AT1G44760 | 1.21 |
| 10965 | cytoplasmic | AT1G54050.1 | 1.16 |
| 11418 | cytoplasmic | AT2G27040 | 1.18 |
| 11752 | cytoplasmic | AT2G29490 | 1.18 |
| 12196 | cytoplasmic | AT2G35300 | 1.20 |
| 12316 | cytoplasmic | AT2G35930 | 1.16 |
| 12573 | cytoplasmic | AT3G04620 | 1.11 |
| 12668 | cytoplasmic | AT3G20960 | 1.34 |
| 13131 | cytoplasmic | AT3G61580.1 | 1.95 |
| 13276 | cytoplasmic | AT5G13220 | 1.17 |
| 13436 | cytoplasmic | CDS5394 | 1.33 |
| 13477 | cytoplasmic | CDS5401_TRUNCATED | 1.23 |
| 13551 | cytoplasmic | ZM06LC319_CORN_LOFI_151_2385_A | 1.12 |
| 13245 | cytoplasmic | AT4G15420.1 | 1.32 |
| 10753 | cytoplasmic | 60952769.R01.1 | 1.18 |
| 13309 | cytoplasmic | AT5G42380 | 1.33 |
| 10749 | cytoplasmic | 57972199.R01.1 | 1.14 |
| 13501 | cytoplasmic | OS02G44730 | 1.14 |
| 13102 | cytoplasmic | AT3G24515 | 1.17 |

### Example 1H

[0864] Plant Screening for Growth Under Low Temperature Conditions

[0865] In a standard experiment soil was prepared as 3.5:1 (v/v) mixture of nutrient rich soil (GS90, Tantau, Wansdorf, Germany) and sand. Pots were filled with soil mixture and placed into trays. Water was added to the trays to let the soil mixture take up appropriate amount of water for the sowing procedure. The seeds for transgenic A. thaliana plants were sown in pots (6 cm diameter). Stratification was established for a period of 3-4 days in the dark at 4° C.-5° C. Germination of seeds and growth was initiated at a growth condition of 20° C., approx. 60% relative humidity, 16 h photoperiod and illumination with fluorescent light at 150-200 μmol/m2s. BASTA selection was done at day 9 after sowing by spraying pots with plantlets from the top. Therefore, a 0.07% (v/v) solution of BASTA concentrate (183 g/l glufosinate-ammonium) in tap water was sprayed. The wild-type control plants were sprayed with tap water only (instead of spraying with BASTA dissolved in tap water) but were otherwise treated identically. Transgenic events and wildtype control plants were distributed randomly over the chamber. Watering was carried out every two days after covers were removed from the trays. Plants were individualized 12-13 days after sowing by removing the surplus of seedlings leaving one seedling in a pot. Cold (chilling to 11° C.-12° C.) was applied 14-16 days after sowing until the end of the experiment. For measuring biomass performance, plant fresh weight was determined at harvest time (35-37 days after sowing) by cutting shoots and weighing them. Plants were in the stage prior to flowering and prior to growth of inflorescence when harvested. Transgenic plants were compared to the non-transgenic wild-type control plants harvested at the same day. Significance values for the statistical significance of the biomass changes were calculated by applying the ‘student's’ t test (parameters: two-sided, unequal variance).

[0866] Per transgenic construct up to 4 independent transgenic lines (=events) were tested (21-28 plants per construct) and biomass performance was evaluated as described above.

TABLE VIII-B
(LT): Biomass production of transgenic A. thaliana after imposition of chilling stress.
Biomass production was measured by weighing plant rosettes. Biomass increase was calculated
as ratio of average weight of transgenic plants compared to average weight of wild-type control
plants from the same experiment. The mean biomass increase of transgenic constructs is given
(significance value <0.3 and biomass increase >5% (ratio >1.05)).

| SeqID | Target | ORF | Biomass Increase |
|---|---|---|---|
| 607 | cytoplasmic | AT1G20810.1_modified | 1.08 |
| 641 | cytoplasmic | AT1G53885 | 1.07 |
| 672 | cytoplasmic | AT2G38730.1 | 1.18 |
| 1628 | cytoplasmic | AT5G47440_modified | 1.07 |
| 1709 | plastidic | B1208 | 1.24 |
| 2226 | plastidic | B4214 | 1.09 |
| 3463 | cytoplasmic | CDS5305 | 1.09 |
| 4630 | cytoplasmic | TTC1186 | 1.06 |
| 5492 | cytoplasmic | ZM_7266_BQ538406_CORN_LOFI_344_730_B | 1.09 |
| 5838 | cytoplasmic | AT1G29250.1 | 1.20 |
| 5982 | cytoplasmic | AT1G55920.1 | 1.22 |
| 7364 | cytoplasmic | AT4G01870 | 1.11 |
| 7434 | cytoplasmic | AT4G11890 | 1.07 |
| 7513 | cytoplasmic | AT5G07310 | 1.31 |
| 7545 | cytoplasmic | CDS5422 | 1.13 |
| 8287 | cytoplasmic | AT4G22240.1 | 1.12 |
| 8064 | cytoplasmic | AT1G30135.1 | 1.10 |
| 8104 | cytoplasmic | AT1G35680.1 | 1.08 |
| 8408 | cytoplasmic | At5g37670.1 | 1.11 |
| 8842 | cytoplasmic | CDS5376 | 1.15 |
| 10880 | cytoplasmic | AT1G44760 | 1.07 |
| 10965 | cytoplasmic | AT1G54050.1 | 1.15 |
| 12196 | cytoplasmic | AT2G35300 | 1.10 |
| 13131 | cytoplasmic | AT3G61580.1 | 1.08 |
| 13436 | cytoplasmic | CDS5394 | 1.12 |
| 13477 | cytoplasmic | CDS5401_TRUNCATED | 1.16 |
| 13551 | cytoplasmic | ZM06LC319_CORN_LOFI_151_2385_A | 1.14 |
| 13245 | cytoplasmic | AT4G15420.1 | 1.25 |

### Example 1I

### Plant Screening for Growth Under Cycling Drought Conditions

[0867] Plant screening for growth under cycling drought conditions can be performed for example as follows:

[0868] In the cycling drought assay repetitive stress is applied to plants without leading to desiccation. In a standard experiment soil can be prepared as 1:1 (v/v) mixture of nutrient rich soil (GS90, Tantau, Wansdorf, Germany) and quarz sand. Pots (6 cm diameter) are filled with this mixture and placed into trays. Water is added to the trays to let the soil mixture take up appropriate amount of water for the sowing procedure (day 1) and subsequently seeds of transgenic A. thaliana plants and their wild-type controls are sown in pots. Then the filled tray is covered with a transparent lid and transferred into a precooled (4° C.-5° C.) and darkened growth chamber. Stratification is established for a period of 3 days in the dark at 4° C.-5° C. or, alternatively, for 4 days in the dark at 4° C. Germination of seeds and growth is initiated at a growth condition of 20° C., 60% relative humidity, 16 h photoperiod and illumination with fluorescent light at approximately 200 μmol/m2s. Covers are removed 7-8 days after sowing. BASTA selection is done at day 10 or day 11 (9 or 10 days after sowing) by spraying pots with plantlets from the top. In the standard experiment, a 0.07% (v/v) solution of BASTA concentrate (183 g/l glufosinate-ammonium) in tap water is sprayed once or, alternatively, a 0.02% (v/v) solution of BASTA is sprayed three times. The wild-type control plants are sprayed with tap water only (instead of spraying with BASTA dissolved in tap water) but are otherwise treated identically. Plants are individualized 13-14 days after sowing by removing the surplus of seedlings and leaving one seedling in soil. Transgenic events and wild-type control plants are evenly distributed over the chamber.

[0869] The water supply throughout the experiment is limited and plants are subjected to cycles of drought and re-watering. Watering is carried out at day 1 (before sowing), day 14 or day 15, day 21 or day 22, and, finally, day 27 or day 28. For measuring biomass production, plant fresh weight is determined one day after the final watering (day 28 or day 29) by cutting shoots and weighing them. Besides weighing, phenotypic information can be added in case of plants that differ from the wild type control. Plants are in the stage prior to flowering and prior to growth of inflorescence when harvested. Significance values for the statistical significance of the biomass changes are calculated by applying the ‘student's’ t test (parameters: two-sided, unequal variance).

[0870] Up to five lines (events) per transgenic construct are tested in successive experimental levels (up to 4). Only constructs that display positive performance are subjected to the next experimental level. Usually in the first level five plants per construct are tested and in the subsequent levels 30-60 plants are tested. Biomass performance is evaluated as described above. Data are shown for constructs that displayed increased biomass performance in at least two successive experimental levels.

[0871] Biomass production can be measured by weighing plant rosettes. Biomass increase is calculated as ratio of average weight for transgenic plants compared to average weight of wild type control plants from the same experiment. The mean biomass increase of transgenic constructs can be given for exmple with a significance value <0.3 and biomass increase >5% (ratio>1.05)).

### Example 2

[0872] Engineering Arabidopsis plants with an increased yield, e.g. an increased yield-related trait, for example enhanced tolerance to abiotic environmental stress, for example an increased drought tolerance and/or low temperature tolerance and/or an increased nutrient use efficiency, and/or another mentioned yield-related trait by over-expressing, the yieldincreasing, e.g. the polypeptide according to the invention, e.g. low temperature resistance and/or tolerance related protein encoding genes from Saccharomyces cerevisiae or Synechocystis or Azotobacter vinelandii or Thermus thermophilus or E. coli using tissuespecific and/or stress inducible promoters.

[0873] Transgenic Arabidopsis plants can be created as in example 1 to express the polypeptide according to the invention, e.g. yield increasing, e.g. low temperature resistance and/or tolerance related protein encoding transgenes under the control of a tissuespecific and/or stress inducible promoter.

[0874] T2 generation plants are produced and are grown under stress conditions, preferably conditions of low temperature. Biomass production is determined after a total time of 29 to 30 days starting with the sowing. The transgenic Arabidopsis plant produces more biomass than non-transgenic control plants.

### Example 3

[0875] Over-expression of the yield-increasing, e.g. the polypeptide according to the invention, e.g. low temperature resistance and/or tolerance related protein, e.g. stress related genes from Saccharomyces cerevisiae or Synechocystis or Azotobacter vinelandii or Thermus thermophilus or E. coli provides tolerance of multiple abiotic stresses.

[0876] Plants that exhibit tolerance of one abiotic stress often exhibit tolerance of another environmental stress. This phenomenon of cross-tolerance is not understood at a mechanistic level (McKersie and Leshem, 1994). Nonetheless, it is reasonable to expect that plants exhibiting enhanced tolerance to low temperature, e.g. chilling temperatures and/or freezing temperatures, due to the expression of a transgene might also exhibit tolerance to drought and/or salt and/or other abiotic stresses. In support of this hypothesis, the expression of several genes are up or down-regulated by multiple abiotic stress factors including low temperature, drought, salt, osmoticum, ABA, etc. (e.g. Hong et al., Plant Mol Biol 18, 663 (1992); Jagendorf and Takabe, Plant Physiol 127, 1827 (2001)); Mizoguchi et al., Proc Natl Acad Sci USA 93, 765 (1996); Zhu, Curr Opin Plant Biol 4, 401 (2001)).

[0877] To determine salt tolerance, seeds of A. thaliana can be sterilized (100% bleach, 0.1% TritonX for five minutes two times and rinsed five times with ddH2O). Seeds were plated on non-selection media (½ MS, 0.6% phytagar, 0.5 g/L MES, 1% sucrose, 2 μg/ml benamyl). Seeds are allowed to germinate for approximately ten days. At the 4-5 leaf stage, transgenic plants were potted into 5.5 cm diameter pots and allowed to grow (22° C., continuous light) for approximately seven days, watering as needed. To begin the assay, two liters of 100 mM NaCl and ⅛ MS are added to the tray under the pots. To the tray containing the control plants, three liters of ⅛ MS are added. The concentrations of NaCl supplementation are increased stepwise by 50 mM every 4 days up to 200 mM. After the salt treatment with 200 mM, fresh and survival and biomass production of the plants is determined.

[0878] To determine drought tolerance, seeds of the transgenic and low temperature lines can be germinated and grown for approximately 10 days to the 4-5 leaf stage as above. The plants are then transferred to drought conditions and can be grown through the flowering and seed set stages of development. Photosynthesis can be measured using chlorophyll fluorescence as an indicator of photosynthetic fitness and integrity of the photosystems. Survival and plant biomass production as an indicators for seed yield is determined.

[0879] Plants that have tolerance to salinity or low temperature have higher survival rates and biomass production including seed yield and dry matter production than susceptible plants.

### Example 4

[0880] Engineering alfalfa plants with an increased yield, e.g. an increased yield-related trait, for example enhanced tolerance to abiotic environmental stress, for example an increased drought tolerance and/or low temperature tolerance and/or an increased nutrient use efficiency, and/or another mentioned yield-related trait, e.g. enhanced abiotic environmental stress tolerance and/or increased biomass production by over-expressing yield-increasing, e.g. the polypeptide according to the invention-coding, e.g. low temperature resistance and/or tolerance related genes from Saccharomyces cerevisiae or Synechocystis or Azotobacter vinelandii or Thermus thermophilus or E. coli.

[0881] A regenerating clone of alfalfa (Medicago sativa) can be transformed using state of the art methods (e.g. McKersie et al., Plant Physiol 119, 839 (1999)). Regeneration and transformation of alfalfa is genotype dependent and therefore a regenerating plant is required. Methods to obtain regenerating plants have been described. For example, these can be selected from the cultivar Rangelander (Agriculture Canada) or any other commercial alfalfa variety as described by Brown D. C. W. and Atanassov A. (Plant Cell Tissue Organ Culture 4, 111 (1985)). Alternatively, the RA3 variety (University of Wisconsin) is selected for use in tissue culture (Walker et al., Am. J. Bot. 65, 654 (1978)).

[0882] Petiole explants are cocultivated with an overnight culture of Agrobacterium tumefaciens C58C1 pMP90 (McKersie et al., Plant Physiol 119, 839 (1999)) or LBA4404 containing a binary vector. Many different binary vector systems have been described for plant transformation (e.g. An G., in Agrobacterium Protocols, Methods in Molecular Biology, Vol 44, pp 47-62, Gartland K. M. A. and Davey M. R. eds. Humana Press, Totowa, N.J.). Many are based on the vector pBIN19 described by Bevan (Nucleic Acid Research. 12, 8711 (1984)) that includes a plant gene expression cassette flanked by the left and right border sequences from the Ti plasmid of Agrobacterium tumefaciens. A plant gene expression cassette consists of at least two genes—a selection marker gene and a plant promoter regulating the transcription of the cDNA or genomic DNA of the trait gene. Various selection marker genes can be used including the Arabidopsis gene encoding a mutated acetohydroxy acid synthase (AHAS) enzyme (U.S. Pat. Nos. 5,7673,666 and 6,225,105). Similarly, various promoters can be used to regulate the trait gene that provides constitutive, developmental, tissue or environmental regulation of gene transcription. In this example, the 34S promoter (GenBank Accession numbers M59930 and X16673) is used to provide constitutive expression of the trait gene.

[0883] The explants are cocultivated for 3 days in the dark on SH induction medium containing 288 mg/L Pro, 53 mg/L thioproline, 4.35 g/L K₂SO₄, and 100 μm acetosyringinone. The explants are washed in half-strength Murashige-Skoog medium (Murashige and Skoog, 1962) and plated on the same SH induction medium without acetosyringinone but with a suitable selection agent and suitable antibiotic to inhibit Agrobacterium growth. After several weeks, somatic embryos are transferred to BOi2Y development medium containing no growth regulators, no antibiotics, and 50 g/L sucrose. Somatic embryos are subsequently germinated on half-strength Murashige-Skoog medium. Rooted seedlings are transplanted into pots and grown in a greenhouse.

[0884] T1 or T2 generation plants are produced and subjected to low temperature experiments, e.g. as described above in example 1. For the assessment of yield increase, e.g. tolerance to low temperature, biomass production, intrinsic yield and/or dry matter production and/or seed yield is compared to plants lacking the transgene, e.g. corresponding non-transgenic wild type plants.

### Example 5

[0885] Engineering ryegrass plants with an increased yield, e.g. an increased yield-related trait, for example enhanced tolerance to abiotic environmental stress, for example an increased drought tolerance and/or low temperature tolerance and/or an increased nutrient use efficiency, and/or another mentioned yield-related trait e.g. enhanced stress tolerance, preferably tolerance to low temperature, and/or increased biomass production by overexpressing yield-increasing, e.g. the polypeptide according to the invention-coding, e.g. tolerance to low temperature related genes from Saccharomyces cerevisiae or Azotobacter vinelandii or Thermus thermophilus or Synechocystis or E. coli

[0886] Seeds of several different ryegrass varieties may be used as explant sources for transformation, including the commercial variety Gunne available from Svalof Weibull seed company or the variety Affinity. Seeds are surface-sterilized sequentially with 1% Tween-20 for 1 minute, 100% bleach for 60 minutes, 3 rinses with 5 minutes each with deionized and distilled H2O, and then germinated for 3-4 days on moist, sterile filter paper in the dark. Seedlings are further sterilized for 1 minute with 1% Tween-20, 5 minutes with 75% bleach, and rinsed 3 times with dd H₂O, 5 min each.

[0887] Surface-sterilized seeds are placed on the callus induction medium containing Murashige and Skoog basal salts and vitamins, 20 g/L sucrose, 150 mg/L asparagine, 500 mg/L casein hydrolysate, 3 g/L Phytagel, 10 mg/L BAP, and 5 mg/L dicamba. Plates are incubated in the dark at 25° C. for 4 weeks for seed germination and embryogenic callus induction.

[0888] After 4 weeks on the callus induction medium, the shoots and roots of the seedlings are trimmed away, the callus is transferred to fresh media, maintained in culture for another 4 weeks, and then transferred to MSO medium in light for 2 weeks. Several pieces of callus (11-17 weeks old) are either strained through a 10 mesh sieve and put onto callus induction medium, or cultured in 100 ml of liquid ryegrass callus induction media (same medium as for callus induction with agar) in a 250 ml flask. The flask is wrapped in foil and shaken at 175 rpm in the dark at 23° C. for 1 week. Sieving the liquid culture with a 40-mesh sieve collected the cells. The fraction collected on the sieve is plated and cultured on solid ryegrass callus induction medium for 1 week in the dark at 25° C. The callus is then trans-ferred to and cultured on MS medium containing 1% sucrose for 2 weeks.

[0889] Transformation can be accomplished with either Agrobacterium of with particle bombardment methods. An expression vector is created containing a constitutive plant promoter and the cDNA of the gene in a pUC vector. The plasmid DNA is prepared from E. coli cells using with Qiagen kit according to manufacturer's instruction. Approximately 2 g of embryogenic callus is spread in the center of a sterile filter paper in a Petri dish. An aliquot of liquid MSO with 10 g/L sucrose is added to the filter paper. Gold particles (1.0 μm in size) are coated with plasmid DNA according to method of Sanford et al., 1993 and delivered to the embryogenic callus with the following parameters: 500 μg particles and 2 μg DNA per shot, 1300 psi and a target distance of 8.5 cm from stopping plate to plate of callus and 1 shot per plate of callus.

[0890] After the bombardment, calli are transferred back to the fresh callus development medium and maintained in the dark at room temperature for a 1-week period. The callus is then transferred to growth conditions in the light at 25° C. to initiate embryo differentiation with the appropriate selection agent, e.g. 250 nM Arsenal, 5 mg/L PPT or 50 mg/L kanamycin. Shoots resistant to the selection agent are appearing and once rotted are trans-ferred to soil.

[0891] Samples of the primary transgenic plants (T0) are analyzed by PCR to confirm the presence of T-DNA. These results are confirmed by Southern hybridization in which DNA is electrophoresed on a 1% agarose gel and transferred to a positively charged nylon membrane (Roche Diagnostics). The PCR DIG Probe Synthesis Kit (Roche Diagnostics) is used to prepare a digoxigenin-labelled probe by PCR, and used as recommended by the manufacturer.

[0892] Transgenic T0 ryegrass plants can be propagated vegetatively by excising tillers. The transplanted tillers are maintained in the greenhouse for 2 months until well established. The shoots are defoliated and allowed to grow for 2 weeks.

[0893] T1 or T2 generation plants are produced and subjected to low temperature experiments, e.g. as described above in example 1. For the assessment of t yield increase, e.g. tolerance to low temperature, biomass production, intrinsic yield and/or dry matter production and/or seed yield is compared to plants lacking the transgene, e.g. corresponding non-transgenic wild type plants.

### Example 6

[0894] Engineering soybean plants with an increased yield, e.g. an increased yield-related trait, for example enhanced tolerance to abiotic environmental stress, for example an increased drought tolerance and/or low temperature tolerance and/or an increased nutrient use efficiency, and/or another mentioned yield-related trait e.g. enhanced stress tolerance, preferably tolerance to low temperature, and/or increased biomass production by overexpressing yield-increasing, e.g. the polypeptide according to the invention-coding, e.g. tolerance to low temperature related genes from Saccharomyces cerevisiae or Synechocystis or Azotobacter vinelandii or Thermus thermophilus or E. coli

[0895] Soybean can be transformed according to the following modification of the method described in the Texas A&M patent U.S. Pat. No. 5,164,310. Several commercial soybean varieties are amenable to transformation by this method. The cultivar Jack (available from the Illinois Seed Foundation) is a commonly used for transformation. Seeds are sterilized by immersion in 70% (v/v) ethanol for 6 min and in 25% commercial bleach (NaOCl) supplemented with 0.1% (v/v) Tween for 20 min, followed by rinsing 4 times with sterile double distilled water. Seven-day seedlings are propagated by removing the radicle, hypocotyl and one cotyledon from each seedling. Then, the epicotyl with one cotyledon is transferred to fresh germination media in petri dishes and incubated at 25° C. under a 16-h photoperiod (approx. 100 μmol/m²s) for three weeks. Axillary nodes (approx. 4 mm in length) were cut from 3-4 week-old plants. Axillary nodes are excised and incubated in Agrobacterium LBA4404 culture.

[0896] Many different binary vector systems have been described for plant transformation (e.g. An G., in Agrobacterium Protocols. Methods in Molecular Biology Vol. 44, p. 47-62, Gartland K. M. A. and Davey M. R. eds. Humana Press, Totowa, N.J.). Many are based on the vector pBIN19 described by Bevan (Nucleic Acid Research. 12, 8711 (1984)) that includes a plant gene expression cassette flanked by the left and right border sequences from the Ti plasmid of Agrobacterium tumefaciens. A plant gene expression cassette consists of at least two genes—a selection marker gene and a plant promoter regulating the transcription of the cDNA or genomic DNA of the trait gene. Various selection marker genes can be used including the Arabidopsis gene encoding a mutated acetohydroxy acid synthase (AHAS) enzyme (U.S. Pat. Nos. 5,7673,666 and 6,225,105). Similarly, various promoters can be used to regulate the trait gene to provide constitutive, developmental, tissue or environmental regulation of gene transcription. In this example, the 34S promoter (GenBank Accession numbers M59930 and X16673) can be used to provide constitutive expression of the trait gene.

[0897] After the co-cultivation treatment, the explants are washed and transferred to selection media supplemented with 500 mg/L timentin. Shoots are excised and placed on a shoot elongation medium. Shoots longer than 1 cm are placed on rooting medium for two to four weeks prior to transplanting to soil.

[0898] The primary transgenic plants (T0) are analyzed by PCR to confirm the presence of T-DNA. These results are confirmed by Southern hybridization in which DNA is electrophoresed on a 1% agarose gel and transferred to a positively charged nylon membrane (Roche Diagnostics). The PCR DIG Probe Synthesis Kit (Roche Diagnostics) is used to prepare a digoxigenin-labelled probe by PCR, and used as recommended by the manufacturer.

[0899] T1 or T2 generation plants are produced and subjected to low temperature experiments, e.g. as described above in example 1. For the assessment of yield increase, e.g. tolerance to low temperature, biomass production, intrinsic yield and/or dry matter production and/or seed yield is compared to plants lacking the transgene, e.g. corresponding non-transgenic wild type plants.

### Example 7

[0900] Engineering Rapeseed/Canola plants with an increased yield, e.g. an increased yield-related trait, for example enhanced tolerance to abiotic environmental stress, for example an increased drought tolerance and/or low temperature tolerance and/or an increased nutrient use efficiency, and/or another mentioned yield-related trait, e.g. enhanced stress tolerance, preferably tolerance to low temperature, and/or increased biomass production by over-expressing yield-increasing, e.g. the polypeptide according to the inventioncoding, e.g. tolerance to low temperature related genes from Saccharomyces cerevisiae or Azotobacter vinelandii or Thermus thermophilus or Synechocystis or E. coli

[0901] Cotyledonary petioles and hypocotyls of 5-6 day-old young seedlings can be used as explants for tissue culture and transformed according to Babic et al. (Plant Cell Rep 17, 183 (1998)). The commercial cultivar Westar (Agriculture Canada) is the standard variety used for transformation, but other varieties can be used.

[0902] Agrobacterium tumefaciens LBA4404 containing a binary vector can be used for canola transformation. Many different binary vector systems have been described for plant transformation (e.g. An G., in Agrobacterium Protocols. Methods in Molecular Biology Vol. 44, p. 47-62, Gartland K. M. A. and Davey M. R. eds. Humana Press, Totowa, N.J.). Many are based on the vector pBIN19 described by Bevan (Nucleic Acid Research. 12, 8711 (1984)) that includes a plant gene expression cassette flanked by the left and right border sequences from the Ti plasmid of Agrobacterium tumefaciens. A plant gene expression cassette consists of at least two genes—a selection marker gene and a plant promoter regulating the transcription of the cDNA or genomic DNA of the trait gene. Various selection marker genes can be used including the Arabidopsis gene encoding a mutated acetohydroxy acid synthase (AHAS) enzyme (U.S. Pat. Nos. 5,7673,666 and 6,225,105). Similarly, various promoters can be used to regulate the trait gene to provide constitutive, developmental, tissue or environmental regulation of gene transcription. In this example, the 34S promoter (GenBank Accession numbers M59930 and X16673) can be used to provide constitutive expression of the trait gene.

[0903] Canola seeds are surface-sterilized in 70% ethanol for 2 min., and then in 30% Clorox with a drop of Tween-20 for 10 min, followed by three rinses with sterilized distilled water. Seeds are then germinated in vitro 5 days on half strength MS medium without hormones, 1% sucrose, 0.7% Phytagar at 23° C., 16 h light. The cotyledon petiole explants with the cotyledon attached are excised from the in vitro seedlings, and inoculated with Agrobacterium by dipping the cut end of the petiole explant into the bacterial suspension. The explants are then cultured for 2 days on MSBAP-3 medium containing 3 mg/L BAP, 3% sucrose, 0.7% Phytagar at 23° C., 16 h light. After two days of co-cultivation with Agrobacterium, the petiole explants are transferred to MSBAP-3 medium containing 3 mg/L BAP, cefotaxime, carbenicillin, or timentin (300 mg/L) for 7 days, and then cultured on MSBAP-3 medium with cefotaxime, carbenicillin, or timentin and selection agent until shoot regeneration. When the shoots were 5-10 mm in length, they are cut and transferred to shoot elongation medium (MSBAP-0.5, containing 0.5 mg/L BAP). Shoots of about 2 cm in length are transferred to the rooting medium (MSO) for root induction.

[0904] Samples of the primary transgenic plants (T0) are analyzed by PCR to confirm the presence of T-DNA. These results are confirmed by Southern hybridization in which DNA is electrophoresed on a 1% agarose gel and transferred to a positively charged nylon membrane (Roche Diagnostics). The PCR DIG Probe Synthesis Kit (Roche Diagnostics) is used to prepare a digoxigenin-labelled probe by PCR, and used as recommended by the manufacturer.

T1 or T2 generation plants are produced and subjected to low temperature experiments, e.g. as described above in example 1. For the assessment of yield increase, e.g. tolerance to low temperature, biomass production, intrinsic yield and/or dry matter production and/or seed yield is compared to plants lacking the transgene, e.g. corresponding non-transgenic wild type plants.

### Example 8

[0905] Engineering corn plants with an increased yield, e.g. an increased yield-related trait, for example enhanced tolerance to abiotic environmental stress, for example an increased drought tolerance and/or low temperature tolerance and/or an increased nutrient use efficiency, and/or another mentioned yield-related trait, e.g. enhanced stress tolerance, preferably tolerance to low temperature, and/or increased biomass production by overexpressing yield-increasing, e.g. the polypeptide according to the invention-coding, e.g. low temperature resistance and/or tolerance related genes from Saccharomyces cerevisiae or Synechocystis or Azotobacter vinelandii or Thermus thermophilus or E. coli

[0906] Transformation of maize (Zea Mays L.) can be performed with a modification of the method described by Ishida et al. (Nature Biotech 14745 (1996)). Transformation is genotype-dependent in corn and only specific genotypes are amenable to transformation and regeneration. The inbred line A188 (University of Minnesota) or hybrids with A188 as a parent are good sources of donor material for transformation (Fromm et al. Biotech 8, 833 (1990)), but other genotypes can be used successfully as well. Ears are harvested from corn plants at approximately 11 days after pollination (DAP) when the length of immature embryos is about 1 to 1.2 mm. Immature embryos are co-cultivated with Agrobacterium tumefaciens that carry “super binary” vectors and transgenic plants are recovered through organogenesis. The super binary vector system of Japan Tobacco is described in WO patents WO 94/00977 and WO 95/06722. Vectors were constructed as described. Various selection marker genes can be used including the maize gene encoding a mutated acetohydroxy acid synthase (AHAS) enzyme (U.S. Pat. No. 6,025,541). Similarly, various promoters can be used to regulate the trait gene to provide constitutive, developmental, tissue or environmental regulation of gene transcription. In this example, the 34S promoter (GenBank Accession numbers M59930 and X16673) was used to provide constitutive expression of the trait gene.

[0907] Excised embryos are grown on callus induction medium, then maize regeneration medium, containing imidazolinone as a selection agent. The Petri plates are incubated in the light at 25° C. for 2-3 weeks, or until shoots develop. The green shoots are transferred from each embryo to maize rooting medium and incubated at 25° C. for 2-3 weeks, until roots develop. The rooted shoots are transplanted to soil in the greenhouse. T1 seeds are produced from plants that exhibit tolerance to the imidazolinone herbicides and which are PCR positive for the transgenes.

[0908] The T1 transgenic plants are then evaluated for their enhanced stress tolerance, like tolerance to low temperature, and/or increased biomass production according to the method described in Example 1. The T1 generation of single locus insertions of the T-DNA will segregate for the transgene in a 3:1 ratio. Those progeny containing one or two copies of the transgene are tolerant regarding the imidazolinone herbicide, and exhibit an increased yield, e.g. an increased yield-related trait, for example an enhancement of stress tolerance, like tolerance to low temperature, and/or increased biomass production than those progeny lacking the transgenes.

[0909] T1 or T2 generation plants are produced and subjected to low temperature experiments, e.g. as described above in example 2. For the assessment of yield increase, e.g. tolerance to low temperature, biomass production, intrinsic yield and/or dry matter production and/or seed yield is compared to e.g. corresponding non-transgenic wild type plants.

[0910] Homozygous T2 plants exhibited similar phenotypes. Hybrid plants (F1 progeny) of homozygous transgenic plants and non-transgenic plants also exhibited increased yield, e.g. an increased yield-related trait, for example enhanced tolerance to abiotic environmental stress, for example an increased drought tolerance and/or an increased nutrient use efficiency, and/or another mentioned yield-related trait, e.g. enhanced tolerance to low temperature.

### Example 9

[0911] Engineering wheat plants with an increased yield, e.g. an increased yield-related trait, for example enhanced tolerance to abiotic environmental stress, for example an increased drought tolerance and/or low temperature tolerance and/or an increased nutrient use efficiency, and/or another mentioned yield-related trait, e.g. enhanced stress tolerance, preferably tolerance to low temperature, and/or increased biomass production by overexpressing yield-increasing, e.g. the polypeptide according to the invention-coding, e.g. low temperature resistance and/or tolerance related genes from Saccharomyces cerevisiae or Synechocystis or Azotobacter vinelandii or Thermus thermophilus or E. coli

[0912] Transformation of wheat can be performed with the method described by Ishida et al. (Nature Biotech. 14745 (1996)). The cultivar Bobwhite (available from CYMMIT, Mexico) is commonly used in transformation. Immature embryos are co-cultivated with Agrobacterium tumefaciens that carry “super binary” vectors, and transgenic plants are recovered through organogenesis. The super binary vector system of Japan Tobacco is described in WO patents WO 94/00977 and WO 95/06722. Vectors were constructed as described. Various selection marker genes can be used including the maize gene encoding a mutated acetohydroxy acid synthase (AHAS) enzyme (U.S. Pat. No. 6,025,541). Similarly, various promoters can be used to regulate the trait gene to provide constitutive, developmental, tissue or environmental regulation of gene transcription. In this example, the 34S promoter (GenBank Accession numbers M59930 and X16673) was used to provide constitutive expression of the trait gene.

[0913] After incubation with Agrobacterium, the embryos are grown on callus induction medium, then regeneration medium, containing imidazolinone as a selection agent. The Petri plates are incubated in the light at 25° C. for 2-3 weeks, or until shoots develop. The green shoots are transferred from each embryo to rooting medium and incubated at 25° C. for 2-3 weeks, until roots develop. The rooted shoots are transplanted to soil in the greenhouse. T1 seeds are produced from plants that exhibit tolerance to the imidazolinone herbicides and which are PCR positive for the transgenes.

[0914] The T1 transgenic plants are then evaluated for their enhanced tolerance to low temperature and/or increased biomass production according to the method described in example 2. The T1 generation of single locus insertions of the T-DNA will segregate for the transgene in a 3:1 ratio. Those progeny containing one or two copies of the transgene are tolerant regarding the imidazolinone herbicide, and exhibit an increased yield, e.g. an increased yield-related trait, for example an enhanced tolerance to low temperature and/or increased biomass production compared to the progeny lacking the transgenes. Homozygous T2 plants exhibit similar phenotypes.

[0915] For the assessment of yield increase, e.g. tolerance to low temperature, biomass production, intrinsic yield and/or dry matter production and/or seed yield can be compared to e.g. corresponding non-transgenic wild type plants. For example, plants with an increased yield, e.g. an increased yield-related trait, e.g. higher tolerance to stress, e.g. with an increased nutrient use efficiency or an increased intrinsic yield, and e.g. with higher tolerance to low temperature may show increased biomass production and/or dry matter production and/or seed yield under low temperature when compared to plants lacking the transgene, e.g. to corresponding non-transgenic wild type plants.

### Example 10

### Identification of Identical and Heterologous Genes

[0916] Gene sequences can be used to identify identical or heterologous genes from cDNA or genomic libraries. Identical genes (e.g. full-length cDNA clones) can be isolated via nucleic acid hybridization using for example cDNA libraries. Depending on the abundance of the gene of interest, 100,000 up to 1,000,000 recombinant bacteriophages are plated and transferred to nylon membranes. After denaturation with alkali, DNA is immobilized on the membrane by e.g. UV cross linking. Hybridization is carried out at high stringency conditions. In aqueous solution, hybridization and washing is performed at an ionic strength of 1 M NaCl and a temperature of 68° C. Hybridization probes are generated by e.g. radioactive (32P) nick transcription labeling (High Prime, Roche, Mannheim, Germany). Signals are detected by autoradiography.

[0917] Partially identical or heterologous genes that are related but not identical can be identified in a manner analogous to the above-described procedure using low stringency hybridization and washing conditions. For aqueous hybridization, the ionic strength is normally kept at 1 M NaCl while the temperature is progressively lowered from 68 to 42° C.

[0918] Isolation of gene sequences with homology (or sequence identity/similarity) only in a distinct domain of (for example 10-20 amino acids) can be carried out by using synthetic radio labeled oligonucleotide probes. Radiolabeled oligonucleotides are prepared by phosphorylation of the 5-prime end of two complementary oligonucleotides with T4 polynucleotide kinase. The complementary oligonucleotides are annealed and ligated to form concatemers. The double stranded concatemers are than radiolabeled by, for example, nick transcription. Hybridization is normally performed at low stringency conditions using high oligonucleotide concentrations.

[0919] Oligonucleotide hybridization solution:

### 6×SSC

[0920] 0.01 M sodium phosphate

### 1 mM EDTA (pH 8)

### 0.5% SDS

[0921] 100 μg/ml denatured salmon sperm DNA
0.1% nonfat dried milk
During hybridization, temperature is lowered stepwise to 5-10° C. below the estimated oligonucleotide Tₘ or down to room temperature followed by washing steps and autoradiography. Washing is performed with low stringency such as 3 washing steps using 4×SSC. Further details are described by Sambrook J. et al., 1989, “Molecular Cloning: A Laboratory Manual,” Cold Spring Harbor Laboratory Press or Ausubel F. M. et al., 1994, “Current Protocols in Molecular Biology,” John Wiley & Sons.

### Example 11

[0922] Identification of Identical Genes by Screening Expression Libraries with Antibodies

[0923] c-DNA clones can be used to produce recombinant polypeptide for example in E. coli (e.g. Qiagen QIAexpress pQE system). Recombinant polypeptides are then normally affinity purified via Ni-NTA affinity chromatography (Qiagen). Recombinant polypeptides are then used to produce specific antibodies for example by using standard techniques for rabbit immunization. Antibodies are affinity purified using a Ni-NTA column saturated with the recombinant antigen as described by Gu et al., BioTechniques 17, 257 (1994). The anti-body can than be used to screen expression cDNA libraries to identify identical or heterologous genes via an immunological screening (Sambrook, J. et al., 1989, “Molecular Cloning: A Laboratory Manual,” Cold Spring Harbor Laboratory Press or Ausubel, F. M. et al., 1994, “Current Protocols in Molecular Biology”, John Wiley & Sons).

### Example 12

[0924] In vivo Mutagenesis

[0925] In vivo mutagenesis of microorganisms can be performed by passage of plasmid (or other vector) DNA through E. coli or other microorganisms (e.g. Bacillus spp. or yeasts such as S. cerevisiae) which are impaired in their capabilities to maintain the integrity of their genetic information. Typical mutator strains have mutations in the genes for the DNA repair system (e.g., mutHLS, mutD, mutT, etc.; for reference, see Rupp W. D., DNA repair mechanisms, in: E. coli and Salmonella, p. 2277-2294, ASM, 1996, Washington.) Such strains are well known to those skilled in the art. The use of such strains is illustrated, for example, in Greener A. and Callahan M., Strategies 7, 32 (1994). Transfer of mutated DNA molecules into plants is preferably done after selection and testing in microorganisms. Transgenic plants are generated according to various examples within the exemplification of this document.

### Example 13

[0926] Engineering Arabidopsis plants with increased yield, e.g. an increased yield-related trait, for example an enhanced stress tolerance, preferably tolerance to low temperature, and/or increased biomass production by over-expressing the polypeptide according to the inventionencoding genes for example from A. thaliana, Brassica napus, Glycine max, Zea mays or Physcomitrella patens, or Populus trichocarpa or Oryza sativa using tissue-specific or stress-inducible promoters.

[0927] Transgenic Arabidopsis plants over-expressing genes encoding the polypeptide according to the invention, e.g. low temperature resistance and/or tolerance related protein encoding genes, from for example Brassica napus, Glycine max, Zea mays and Oryza sativa can be created as described in example 1 to express the polypeptide according to the invention-encoding transgenes under the control of a tissue-specific or stress-inducible promoter. T2 generation plants are produced and grown under stress or non-stress conditions, e.g. low temperature conditions. Plants with an increased yield, e.g. an increased yield-related trait, e.g. higher tolerance to stress, e.g. low temperature, or with an increased nutrient use efficiency or an increased intrinsic yield, show increased biomass production and/or dry matter production and/or seed yield under low temperature conditions when compared to plants lacking the transgene, e.g. to corresponding non-transgenic wild type plants.

### Example 14

[0928] Engineering alfalfa plants with increased yield, e.g. an increased yield-related trait, for example an enhanced stress tolerance, preferably tolerance to low temperature, and/or increased biomass production by over-expressing genes encoding the polypeptide according to the invention, e.g. low temperature resistance and/or tolerance related genes for example from A. thaliana, Brassica napus, Glycine max, Zea mays or Physcomitrella patens or Populus trichocarpa or Oryza sativa for example.

[0929] A regenerating clone of alfalfa (Medicago sativa) can be transformed using the method of McKersie et al., (Plant Physiol. 119, 839 (1999)). Regeneration and transformation of alfalfa is genotype dependent and therefore a regenerating plant is required. Methods to obtain regenerating plants have been described. For example, these can be selected from the cultivar Rangelander (Agriculture Canada) or any other commercial alfalfa variety as described by Brown and Atanassov (Plant Cell Tissue Organ Culture 4, 111 (1985)). Alternatively, the RA3 variety (University of Wisconsin) has been selected for use in tissue culture (Walker et al., Am. J. Bot. 65, 54 (1978)).

[0930] Petiole explants are cocultivated with an overnight culture of Agrobacterium tumefaciens C58C1 pMP90 (McKersie et al., Plant Physiol 119, 839 (1999)) or LBA4404 containing a binary vector. Many different binary vector systems have been described for plant transformation (e.g. An G., in Agrobacterium Protocols. Methods in Molecular Biology Vol. 44, p. 47-62, Gartland K. M. A. and Davey M. R. eds. Humana Press, Totowa, N.J.). Many are based on the vector pBIN19 described by Bevan (Nucleic Acid Research. 12, 8711 (1984)) that includes a plant gene expression cassette flanked by the left and right border sequences from the Ti plasmid of Agrobacterium tumefaciens. A plant gene expression cassette consists of at least two genes—a selection marker gene and a plant promoter regulating the transcription of the cDNA or genomic DNA of the trait gene. Various selection marker genes can be used including the Arabidopsis gene encoding a mutated acetohydroxy acid synthase (AHAS) enzyme (U.S. Pat. Nos. 5,7673,666 and 6,225,105). Similarly, various promoters can be used to regulate the trait gene that provides constitutive, developmental, tissue or environmental regulation of gene transcription. In this example, the 34S promoter (GenBank Accession numbers M59930 and X16673) was used to provide constitutive expression of the trait gene.

[0931] The explants are cocultivated for 3 days in the dark on SH induction medium containing 288 mg/L Pro, 53 mg/L thioproline, 4.35 g/L K₂SO₄, and 100 μm acetosyringinone. The explants were washed in half-strength Murashige-Skoog medium (Murashige and Skoog, 1962) and plated on the same SH induction medium without acetosyringinone but with a suitable selection agent and suitable antibiotic to inhibit Agrobacterium growth. After several weeks, somatic embryos are transferred to BOi2Y development medium containing no growth regulators, no antibiotics, and 50 g/L sucrose. Somatic embryos are subsequently germinated on half-strength Murashige-Skoog medium. Rooted seedlings are transplanted into pots and grown in a greenhouse.

[0932] The T0 transgenic plants are propagated by node cuttings and rooted in Turface growth medium. T1 or T2 generation plants are produced and subjected to experiments comprising stress or non-stress conditions, e.g. low temperature conditions as described in previous examples.

[0933] For the assessment of yield increase, e.g. tolerance to low temperature, biomass production, intrinsic yield and/or dry matter production and/or seed yield is compared to e.g. corresponding non-transgenic wild type plants.

[0934] For example, plants with an increased yield, e.g. an increased yield-related trait, e.g. higher tolerance to stress, e.g. with an increased nutrient use efficiency or an increased intrinsic yield, and e.g. with higher tolerance to low temperature may show increased biomass production and/or dry matter production and/or seed yield under low temperature when compared to plants lacking the transgene, e.g. to corresponding non-transgenic wild type plants.

### Example 15

[0935] Engineering ryegrass plants with increased yield, e.g. an increased yield-related trait, for example an enhanced stress tolerance, preferably tolerance to low temperature, and/or increased biomass production by over-expressing genes encoding the polypeptide according to the invention, e.g. low temperature resistance and/or tolerance related genes for example from A. thaliana, Brassica napus, Glycine max, Zea mays or Physcomitrella patens or Populus trichocarpa or Oryza sativa

[0936] Seeds of several different ryegrass varieties may be used as explant sources for transformation, including the commercial variety Gunne available from Svalöf Weibull seed company or the variety Affinity. Seeds are surface-sterilized sequentially with 1% Tween-20 for 1 minute, 100% bleach for 60 minutes, 3 rinses of 5 minutes each with deionized and distilled H₂O, and then germinated for 3-4 days on moist, sterile filter paper in the dark. Seedlings are further sterilized for 1 minute with 1% Tween-20, 5 minutes with 75% bleach, and rinsed 3 times with double destilled H₂O, 5 min each.

[0937] Surface-sterilized seeds are placed on the callus induction medium containing Murashige and Skoog basal salts and vitamins, 20 g/L sucrose, 150 mg/L asparagine, 500 mg/L casein hydrolysate, 3 g/L Phytagel, 10 mg/L BAP, and 5 mg/L dicamba. Plates are incubated in the dark at 25° C. for 4 weeks for seed germination and embryogenic callus induction.

[0938] After 4 weeks on the callus induction medium, the shoots and roots of the seedlings are trimmed away, the callus is transferred to fresh media, maintained in culture for another 4 weeks, and then transferred to MSO medium in light for 2 weeks. Several pieces of callus (11-17 weeks old) are either strained through a 10 mesh sieve and put onto callus induction medium, or cultured in 100 ml of liquid ryegrass callus induction media (same medium as for callus induction with agar) in a 250 ml flask. The flask is wrapped in foil and shaken at 175 rpm in the dark at 23° C. for 1 week. Sieving the liquid culture with a 40-mesh sieve collect the cells. The fraction collected on the sieve is plated and cultured on solid ryegrass callus induction medium for 1 week in the dark at 25° C. The callus is then transferred to and cultured on MS medium containing 1% sucrose for 2 weeks.

[0939] Transformation can be accomplished with either Agrobacterium of with particle bombardment methods. An expression vector is created containing a constitutive plant promoter and the cDNA of the gene in a pUC vector. The plasmid DNA is prepared from E. coli cells using with Qiagen kit according to manufacturer's instruction. Approximately 2 g of embryogenic callus is spread in the center of a sterile filter paper in a Petri dish. An aliquot of liquid MSO with 10 g/l sucrose is added to the filter paper. Gold particles (1.0 μm in size) are coated with plasmid DNA according to method of Sanford et al., 1993 and delivered to the embryogenic callus with the following parameters: 500 μg particles and 2 μg DNA per shot, 1300 psi and a target distance of 8.5 cm from stopping plate to plate of callus and 1 shot per plate of callus.

[0940] After the bombardment, calli are transferred back to the fresh callus development medium and maintained in the dark at room temperature for a 1-week period. The callus is then transferred to growth conditions in the light at 25° C. to initiate embryo differentiation with the appropriate selection agent, e.g. 250 nM Arsenal, 5 mg/L PPT or 50 mg/L kanamycin. Shoots resistant to the selection agent appeared and once rooted are trans-ferred to soil.

[0941] Samples of the primary transgenic plants (T0) are analyzed by PCR to confirm the presence of T-DNA. These results are confirmed by Southern hybridization in which DNA is electrophoresed on a 1% agarose gel and transferred to a positively charged nylon membrane (Roche Diagnostics). The PCR DIG Probe Synthesis Kit (Roche Diagnostics) is used to prepare a digoxigenin-labelled probe by PCR, and used as recommended by the manufacturer.

[0942] Transgenic T0 ryegrass plants are propagated vegetatively by excising tillers. The transplanted tillers are maintained in the greenhouse for 2 months until well established. T1 or T2 generation plants are produced and subjected to stress or non-stress conditions, e.g. low temperature experiments, e.g. as described above in example 1.

[0943] For the assessment of yield increase, e.g. tolerance to low temperature, biomass production, intrinsic yield and/or dry matter production and/or seed yield is compared to e.g. corresponding non-transgenic wild type plants. For example, plants with an increased yield, e.g. an increased yield-related trait, e.g. higher tolerance to stress, e.g. with an increased nutrient use efficiency or an increased intrinsic yield, and e.g. with higher tolerance to low temperature may show increased biomass production and/or dry matter production and/or seed yield under low temperature when compared to plants lacking the transgene, e.g. to corresponding non-transgenic wild type plants.

### Example 16

[0944] Engineering soybean plants with increased yield, e.g. an increased yield-related trait, for example an enhanced stress tolerance, preferably tolerance to low temperature, and/or increased biomass production by over-expressing genes encoding the polypeptide according to the invention, e.g. low temperature resistance and/or tolerance related genes, for example from A. thaliana, Brassica napus, Glycine max, Zea mays or Physcomitrella patens or Populus trichocarpa or Oryza sativa

[0945] Soybean can be transformed according to the following modification of the method described in the Texas A&M patent U.S. Pat. No. 5,164,310. Several commercial soybean varieties are amenable to transformation by this method. The cultivar Jack (available from the Illinois Seed Foundation) is a commonly used for transformation. Seeds are sterilized by immersion in 70% (v/v) ethanol for 6 min and in 25% commercial bleach (NaOCl) supplemented with 0.1% (v/v) Tween for 20 min, followed by rinsing 4 times with sterile double distilled water. Seven-day old seedlings are propagated by removing the radicle, hypocotyl and one cotyledon from each seedling. Then, the epicotyl with one cotyledon is transferred to fresh germination media in petri dishes and incubated at 25° C. under a 16 h photoperiod (approx. 100 μmol/ms) for three weeks. Axillary nodes (approx. 4 mm in length) are cut from 3-4 week-old plants. Axillary nodes are excised and incubated in Agrobacterium LBA4404 culture.

[0946] Many different binary vector systems have been described for plant transformation (e.g. An G., in Agrobacterium Protocols. Methods in Molecular Biology Vol 44, p. 47-62, Gartland K. M. A. and Davey M. R. eds. Humana Press, Totowa, N.J.). Many are based on the vector pBIN19 described by Bevan (Nucleic Acid Research. 12, 8711 (1984)) that includes a plant gene expression cassette flanked by the left and right border sequences from the Ti plasmid of Agrobacterium tumefaciens. A plant gene expression cassette consists of at least two genes—a selection marker gene and a plant promoter regulating the transcription of the cDNA or genomic DNA of the trait gene. Various selection marker genes can be used including the Arabidopsis gene encoding a mutated acetohydroxy acid synthase (AHAS) enzyme (U.S. Pat. Nos. 5,7673,666 and 6,225,105). Similarly, various promoters can be used to regulate the trait gene to provide constitutive, developmental, tissue or environmental regulation of gene transcription. In this example, the 34S promoter (GenBank Accession numbers M59930 and X16673) is used to provide constitutive expression of the trait gene.

[0947] After the co-cultivation treatment, the explants are washed and transferred to selection media supplemented with 500 mg/L timentin. Shoots are excised and placed on a shoot elongation medium. Shoots longer than 1 cm are placed on rooting medium for two to four weeks prior to transplanting to soil.

[0948] The primary transgenic plants (T0) are analyzed by PCR to confirm the presence of T-DNA. These results are confirmed by Southern hybridization in which DNA is electrophoresed on a 1% agarose gel and transferred to a positively charged nylon membrane (Roche Diagnostics). The PCR DIG Probe Synthesis Kit (Roche Diagnostics) is used to prepare a digoxigenin-labelled probe by PCR, and used as recommended by the manufacturer.

[0949] Soybean plants over-expressing genes encoding the polypeptide according to the invention, e.g. low temperature resistance and/or tolerance related genes from A. thaliana, Brassica napus, Glycine max, Zea mays or Oryza sativa, show increased yield, for example, have higher seed yields.

[0950] T1 or T2 generation plants are produced and subjected to stress and non-stress conditions, e.g. low temperature experiments, e.g. as described above in example 1.

[0951] For the assessment of yield increase, e.g. tolerance to low temperature, biomass production, intrinsic yield and/or dry matter production and/or seed yield is compared to e.g. corresponding non-transgenic wild type plants. For example, plants with an increased yield, e.g. an increased yield-related trait, e.g. higher tolerance to stress, e.g. with an increased nutrient use efficiency or an increased intrinsic yield, and e.g. with higher tolerance to low temperature may show increased biomass production and/or dry matter production and/or seed yield under low temperature when compared to plants lacking the transgene, e.g. to corresponding non-transgenic wild type plants.

### Example 17

[0952] Engineering rapeseed/canola plants with increased yield, e.g. an increased yield-related trait, for example an enhanced stress tolerance, preferably tolerance to low temperature, and/or increased biomass production by over-expressing genes encoding the polypeptide according to the invention, e.g. low temperature resistance and/or tolerance related genes for example from A. thaliana, Brassica napus, Glycine max, Zea mays or Physcomitrella patens or Populus trichocarpa or Oryza sativa

[0953] Cotyledonary petioles and hypocotyls of 5-6 day-old young seedlings can be used as explants for tissue culture and transformed according to Babic et al. (Plant Cell Rep 17, 183 (1998)). The commercial cultivar Westar (Agriculture Canada) is the standard variety used for transformation, but other varieties can be used.

[0954] Agrobacterium tumefaciens LBA4404 containing a binary vector can be used for canola transformation. Many different binary vector systems have been described for plant transformation (e.g. An G., in Agrobacterium Protocols. Methods in Molecular Biology Vol. 44, p. 47-62, Gartland K. M. A. and Davey M. R. eds. Humana Press, Totowa, N.J.). Many are based on the vector pBIN19 described by Bevan (Nucleic Acid Research. 12, 8711 (1984)) that includes a plant gene expression cassette flanked by the left and right border sequences from the Ti plasmid of Agrobacterium tumefaciens. A plant gene expression cassette consists of at least two genes—a selection marker gene and a plant promoter regulating the transcription of the cDNA or genomic DNA of the trait gene. Various selection marker genes can be used including the Arabidopsis gene encoding a mutated acetohydroxy acid synthase (AHAS) enzyme (U.S. Pat. Nos. 5,7673,666 and 6,225,105). Similarly, various promoters can be used to regulate the trait gene to provide constitutive, developmental, tissue or environmental regulation of gene transcription. In this example, the 34S promoter (GenBank Accession numbers M59930 and X16673) is used to provide constitutive expression of the trait gene.

[0955] Canola seeds are surface-sterilized in 70% ethanol for 2 min., and then in 30% Clorox with a drop of Tween-20 for 10 min, followed by three rinses with sterilized distilled water. Seeds are then germinated in vitro 5 days on half strength MS medium without hormones, 1% sucrose, 0.7% Phytagar at 23° C., 16 h light. The cotyledon petiole explants with the cotyledon attached are excised from the in vitro seedlings, and inoculated with Agrobacterium by dipping the cut end of the petiole explant into the bacterial suspension. The explants are then cultured for 2 days on MSBAP-3 medium containing 3 mg/L BAP, 3% sucrose, 0.7% Phytagar at 23° C., 16 h light. After two days of co-cultivation with Agrobacterium, the petiole explants are transferred to MSBAP-3 medium containing 3 mg/l BAP, cefotaxime, carbenicillin, or timentin (300 mg/L) for 7 days, and then cultured on MSBAP-3 medium with cefotaxime, carbenicillin, or timentin and selection agent until shoot regeneration. When the shoots are 5-10 mm in length, they are cut and transferred to shoot elongation medium (MSBAP-0.5, containing 0.5 mg/L BAP). Shoots of about 2 cm in length are trans-ferred to the rooting medium (MSO) for root induction.

[0956] Samples of the primary transgenic plants (T0) are analyzed by PCR to confirm the presence of T-DNA. These results are confirmed by Southern hybridization in which DNA is electrophoresed on a 1% agarose gel and transferred to a positively charged nylon membrane (Roche Diagnostics). The PCR DIG Probe Synthesis Kit (Roche Diagnostics) is used to prepare a digoxigenin-labelled probe by PCR, and used as recommended by the manufacturer.

[0957] The transgenic plants can then be evaluated for their increased yield, e.g. an increased yield-related trait, e.g. higher tolerance to stress, e.g. enhanced tolerance to low temperature and/or increased biomass production according to the method described in Example 2. It is found that transgenic rapeseed/canola over-expressing genes encoding the polypeptide according to the invention, e.g. low temperature resistance and/or tolerance related genes, from A. thaliana, Brassica napus, Glycine max, Zea mays or Oryza sativa show increased yield, for example show an increased yield, e.g. an increased yield-related trait, e.g. higher tolerance to stress, e.g. with enhanced tolerance to low temperature and/or increased biomass production compared to plants without the transgene, e.g. corresponding non-transgenic control plants.

### Example 18

[0958] Engineering corn plants with increased yield, e.g. an increased yield-related trait, for example an enhanced stress tolerance, preferably tolerance to low temperature, and/or increased biomass production by over-expressing genes encoding the polypeptide according to the invention, e.g. tolerance to low temperature related genes for example from A. thaliana, Brassica napus, Glycine max, Zea mays Physcomitrella patens or Populus trichocarpa or or Oryza sativa

[0959] Transformation of corn (Zea mays L.) can be performed with a modification of the method described by Ishida et al. (Nature Biotech 14745 (1996)). Transformation is genotype-dependent in corn and only specific genotypes are amenable to transformation and regeneration. The inbred line A188 (University of Minnesota) or hybrids with A188 as a parent are good sources of donor material for transformation (Fromm et al. Biotech 8, 833 (1990), but other genotypes can be used successfully as well. Ears are harvested from corn plants at approximately 11 days after pollination (DAP) when the length of immature embryos is about 1 to 1.2 mm. Immature embryos can be co-cultivated with Agrobacterium tumefaciens that carry “super binary” vectors and transgenic plants are recovered through organogenesis. The super binary vector system of Japan Tobacco is described in WO patents WO 94/00977 and WO 95/06722. Vectors are constructed as described. Various selection marker genes can be used including the corn gene encoding a mutated acetohydroxy acid synthase (AHAS) enzyme (U.S. Pat. No. 6,025,541). Similarly, various promoters can be used to regulate the trait gene to provide constitutive, developmental, tissue or environmental regulation of gene transcription. In this example, the 34S promoter (GenBank Accession numbers M59930 and X16673) is used to provide constitutive expression of the trait gene.

[0960] Excised embryos are grown on callus induction medium, then corn regeneration medium, containing imidazolinone as a selection agent. The Petri plates were incubated in the light at 25° C. for 2-3 weeks, or until shoots develop. The green shoots from each embryo are transferred to corn rooting medium and incubated at 25° C. for 2-3 weeks, until roots develop. The rooted shoots are transplanted to soil in the greenhouse. T1 seeds are produced from plants that exhibit tolerance to the imidazolinone herbicides and are PCR positive for the transgenes.

[0961] The T1 transgenic plants can then be evaluated for increased yield, e.g. an increased yield-related trait, e.g. higher tolerance to stress, e.g. with enhanced tolerance to low temperature and/or increased biomass production according to the methods described in Example 2. The T1 generation of single locus insertions of the T-DNA will segregate for the transgene in a 1:2:1 ratio. Those progeny containing one or two copies of the transgene (¾ of the progeny) are tolerant regarding the imidazolinone herbicide, and exhibit an increased yield, e.g. an increased yield-related trait, e.g. higher tolerance to stress, e.g. with enhanced tolerance to low temperature and/or increased biomass production compared to those progeny lacking the transgenes. Tolerant plants have higher seed yields. Homozygous T2 plants exhibited similar phenotypes. Hybrid plants (F1 progeny) of homozygous transgenic plants and non-transgenic plants also exhibited an increased yield, e.g. an increased yield-related trait, e.g. higher tolerance to stress, e.g. with enhanced tolerance to low temperature and/or increased biomass production.

### Example 19

[0962] Engineering wheat plants with increased yield, e.g. an increased yield-related trait, for example an enhanced stress tolerance, preferably tolerance to low temperature, and/or increased biomass production by over-expressing genes encoding the polypeptide according to the invention, e.g. low temperature resistance and/or tolerance related genes, for example from A. thaliana, Brassica napus, Glycine max, Zea mays Physcomitrella patens or Populus trichocarpa or or Oryza sativa

[0963] Transformation of wheat can be performed with the method described by Ishida et al. (Nature Biotech. 14745 (1996)). The cultivar Bobwhite (available from CYMMIT, Mexico) is commonly used in transformation. Immature embryos are co-cultivated with Agrobacterium tumefaciens that carry “super binary” vectors, and transgenic plants are recovered through organogenesis. The super binary vector system of Japan Tobacco is described in WO patents WO 94/00977 and WO 95/06722. Vectors are constructed as described. Various selection marker genes can be used including the maize gene encoding a mutated acetohydroxy acid synthase (AHAS) enzyme (U.S. Pat. No. 6,025,541). Similarly, various promoters can be used to regulate the trait gene to provide constitutive, developmental, tissue or environmental regulation of gene transcription. In this example, the 34S promoter (GenBank Accession numbers M59930 and X16673) is used to provide constitutive expression of the trait gene.

[0964] After incubation with Agrobacterium, the embryos are grown on callus induction medium, then regeneration medium, containing imidazolinone as a selection agent. The Petri plates are incubated in the light at 25° C. for 2-3 weeks, or until shoots develop. The green shoots are transferred from each embryo to rooting medium and incubated at 25° C. for 2-3 weeks, until roots develop. The rooted shoots are transplanted to soil in the greenhouse. T1 seeds are produced from plants that exhibit tolerance to the imidazolinone herbicides and which are PCR positive for the transgenes.

[0965] The T1 transgenic plants can then be evaluated for their increased yield, e.g. an increased yield-related trait, e.g. higher tolerance to stress, e.g. with enhanced tolerance to low temperature and/or increased biomass production according to the method described in example 2. The T1 generation of single locus insertions of the T-DNA will segregate for the transgene in a 1:2:1 ratio. Those progeny containing one or two copies of the transgene (¾ of the progeny) are tolerant regarding the imidazolinone herbicide, and exhibit an increased yield, e.g. an increased yield-related trait, e.g. higher tolerance to stress, e.g. with enhanced tolerance to low temperature and/or increased biomass production compared to those progeny lacking the transgenes.

[0966] For the assessment of yield increase, e.g. tolerance to low temperature, biomass production, intrinsic yield and/or dry matter production and/or seed yield can be compared to e.g. corresponding non-transgenic wild type plants. For example, plants with an increased yield, e.g. an increased yield-related trait, e.g. higher tolerance to stress, e.g. with an increased nutrient use efficiency or an increased intrinsic yield, and e.g. with higher tolerance to low temperature may show increased biomass production and/or dry matter production and/or seed yield under low temperature when compared plants lacking the transgene, e.g. to corresponding non-transgenic wild type plants.

### Example 20

[0967] Engineering rice plants with increased yield under condition of transient and repetitive abiotic stress by over-expressing stress related genes from Saccharomyces cerevisiae or E. coli or Azotobacter vinelandii or Thermus thermophilus or Synechocystis

### Rice Transformation

[0968] The Agrobacterium containing the expression vector of the invention can be used to transform Oryza sativa plants. Mature dry seeds of the rice japonica cultivar Nipponbare are dehusked. Sterilization is carried out by incubating for one minute in 70% ethanol, followed by 30 minutes in 0.2% HgCl₂, followed by a 6 times 15 minutes wash with sterile distilled water. The sterile seeds are then germinated on a medium containing 2,4-D (callus induction medium). After incubation in the dark for four weeks, embryogenic, scutellum-derived calli are excised and propagated on the same medium. After two weeks, the calli are multiplied or propagated by subculture on the same medium for another 2 weeks. Embryogenic callus pieces are sub-cultured on fresh medium 3 days before co-cultivation (to boost cell division activity).

[0969] Agrobacterium strain LBA4404 containing the expression vector of the invention can be used for co-cultivation. Agrobacterium is inoculated on AB medium with the appropriate antibiotics and cultured for 3 days at 28° C. The bacteria are then collected and suspended in liquid co-cultivation medium to a density (OD₆₀₀) of about 1. The suspension is then transferred to a Petri dish and the calli immersed in the suspension for 15 minutes. The callus tissues are then blotted dry on a filter paper and transferred to solidified, cocultivation medium and incubated for 3 days in the dark at 25° C. Co-cultivated calli are grown on 2,4-D-containing medium for 4 weeks in the dark at 28° C. in the presence of a selection agent. During this period, rapidly growing resistant callus islands developed. After transfer of this material to a regeneration medium and incubation in the light, the embryogenic potential is released and shoots developed in the next four to five weeks. Shoots are excised from the calli and incubated for 2 to 3 weeks on an auxin-containing medium from which they are transferred to soil. Hardened shoots are grown under high humidity and short days in a greenhouse.

[0970] Approximately 35 independent T0 rice transformants are generated for one construct. The primary transformants are transferred from a tissue culture chamber to a greenhouse. After a quantitative PCR analysis to verify copy number of the T-DNA insert, only single copy transgenic plants that exhibit tolerance to the selection agent are kept for harvest of T1 seed. Seeds are then harvested three to five months after transplanting. The method yielded single locus transformants at a rate of over 50% (Aldemita and Hodges1996, Chan et al. 1993, Hiei et al. 1994).

[0971] For the cycling drought assay repetitive stress is applied to plants without leading to desiccation. The water supply throughout the experiment is limited and plants are subjected to cycles of drought and re-watering. For measuring biomass production, plant fresh weight is determined one day after the final watering by cutting shoots and weighing them.

### Example 21

[0972] Engineering rice plants with increased yield under condition of transient and repetitive abiotic stress by over-expressing yield and stress related genes for example from A. thaliana, Brassica napus, Glycine max, Zea mays or Physcomitrella patens or Populus trichocarpa or Oryza sativa for example

[0973] Rice Transformation:

[0974] The Agrobacterium containing the expression vector of the invention can be used to transform Oryza sativa plants. Mature dry seeds of the rice japonica cultivar Nipponbare are dehusked. Sterilization is carried out by incubating for one minute in 70% ethanol, followed by 30 minutes in 0.2% HgCl2, followed by a 6 times 15 minutes wash with sterile distilled water. The sterile seeds are then germinated on a medium containing 2,4-D (callus induction medium). After incubation in the dark for four weeks, embryogenic, scutellum-derived calli are excised and propagated on the same medium. After two weeks, the calli are multiplied or propagated by subculture on the same medium for another 2 weeks. Embryogenic callus pieces are sub-cultured on fresh medium 3 days before co-cultivation (to boost cell division activity).

[0975] Agrobacterium strain LBA4404 containing the expression vector of the invention can be used for co-cultivation. Agrobacterium is inoculated on AB medium with the appropriate antibiotics and cultured for 3 days at 28° C. The bacteria are then collected and suspended in liquid co-cultivation medium to a density (OD600) of about 1. The suspension is then transferred to a Petri dish and the calli immersed in the suspension for 15 minutes. The callus tissues are then blotted dry on a filter paper and transferred to solidified, cocultivation medium and incubated for 3 days in the dark at 25° C. Co-cultivated calli are grown on 2,4-D-containing medium for 4 weeks in the dark at 28° C. in the presence of a selection agent. During this period, rapidly growing resistant callus islands developed. After transfer of this material to a regeneration medium and incubation in the light, the embryogenic potential is released and shoots developed in the next four to five weeks. Shoots are excised from the calli and incubated for 2 to 3 weeks on an auxin-containing medium from which they are transferred to soil. Hardened shoots are grown under high humidity and short days in a greenhouse.

[0976] Approximately 35 independent TO rice transformants are generated for one construct. The primary transformants are transferred from a tissue culture chamber to a greenhouse. After a quantitative PCR analysis to verify copy number of the T-DNA insert, only single copy transgenic plants that exhibit tolerance to the selection agent are kept for harvest of T1 seed. Seeds are then harvested three to five months after transplanting. The method yielded single locus transformants at a rate of over 50% (Aldemita and Hodges1996, Chan et al. 1993, Hiei et al. 1994).

[0977] For the cycling drought assay repetitive stress is applied to plants without leading to desiccation. The water supply throughout the experiment is limited and plants are subjected to cycles of drought and re-watering. For measuring biomass production, plant fresh weight is determined one day after the final watering by cutting shoots and weighing them. At an equivalent degree of drought stress, tolerant plants are able to resume normal growth whereas susceptible plants have died or suffer significant injury resulting in shorter leaves and less dry matter.

### FIGURES

[0978] FIG. 1. Vector VC-MME220-1qcz (SEQ ID NO: 41) used for cloning gene of interest for non-targeted expression.

[0979] FIG. 2. Vector VC-MME221-1qcz (SEQ ID NO: 46) used for cloning gene of interest for non-targeted expression.

[0980] FIG. 3. Vector VC-MME354-1QCZ (SEQ ID NO: 32) used for cloning gene of interest for plastidic targeted expression.

[0981] FIG. 4. Vector VC-MME432-1qcz (SEQ ID NO: 42) used for cloning gene of interest for plastidic targeted expression.

[0982] FIG. 5. Vector VC-MME489-1QCZ (SEQ ID NO: 56) used for cloning gene of interest for non-targeted expression and cloning of a targeting sequence.

[0983] FIG. 6. Vector pMTX0270p (SEQ ID NO: 9) used for cloning of a targeting sequence.

[0984] FIG. 7. Vector pMTX155 (SEQ ID NO: 31) used for used for cloning gene of interest for non-targeted expression.

[0985] FIG. 8. Vector VC-MME356-1QCZ (SEQ ID NO: 34) used for mitochondric targeted expression.

[0986] FIG. 9. Vector VC-MME301-1QCZ (SEQ ID NO: 36) used for non-targeted expression in preferentially seeds.

[0987] FIG. 10. Vector pMTX461korrp (SEQ ID NO: 37) used for plastidic targeted expression in preferentially seeds.

[0988] FIG. 11. Vector VC-MME462-1QCZ (SEQ ID NO: 39) used for mitochondric targeted expression in preferentially seeds.

[0989] FIG. 12. Vector VC-MME431-1° qcz (SEQ ID NO: 44) used for mitochondric targeted expression.

[0990] FIG. 13. Vector pMTX447korr (SEQ ID NO: 47) used for plastidic targeted expression.

[0991] FIG. 14. Vector VC-MME445-1° qcz (SEQ ID NO: 49) used for mitochondric targeted expression.

[0992] FIG. 15. Vector VC-MME289-1° qcz (SEQ ID NO: 51) used for non targeted expression in preferentially seeds.

[0993] FIG. 16. Vector VC-MME464-1qcz (SEQ ID NO: 52) used for plastidic targeted expression in preferentially seeds.

[0994] FIG. 17. Vector VC-MME465-1qcz (SEQ ID NO: 54) used for mitochondric targeted expression in preferentially seeds.

TABLE IA
Nucleic acid sequence ID numbers

| | 1. | 2. | 3. | 4. | 5. | 6. | 7. |
|---|---|---|---|---|---|---|---|
| Application | Hit | Project | Locus | Organism | Lead SEQ ID | Target | SEQ IDs of Nucleic Acid Homologs |
| 1 | 1 | NUE_OEX3 | AT1G06620_modified | A. th. | 63 | cytoplasmic | 65, 67, 69, 71, 73, 75, 77, 79, 81, 83, 85, 87, 89, 91, 93, 95, 97, |
| | | | | | | | 99, 101, 103, 105, 107, 109, 111, 113, 115, 117, 119, 121, 123, |
| | | | | | | | 125, 127, 129, 131, 133, 135, 137, 139, 141, 143, 145, 147, 149, |
| | | | | | | | 151, 153, 155, 157, 159, 161, 163, 165, 167, 169, 171, 173, 175, |
| | | | | | | | 177, 179, 181, 183, 185, 187, 189, 191, 193, 195, 197, 199, 201, |
| | | | | | | | 203, 205, 207, 209, 211, 213, 215, 217, 219, 221, 223, 225, 227, |
| | | | | | | | 229, 231, 233, 235, 237, 239, 241, 243, 245, 247, 249, 251, 253, |
| | | | | | | | 255, 257, 259, 261, 263, 265, 267, 269, 271, 273, 275, 277, 279, |
| | | | | | | | 281, 283, 285, 287, 289, 291, 293, 295, 297, 299, 301, 303, 305, |
| | | | | | | | 307, 309, 311 |
| 1 | 2 | NUE_OEX3 | AT1G06680.1 | A. th. | 384 | cytoplasmic | 386, 388, 390, 392, 394, 396, 398, 400, 402, 404, 406, 408, 410, |
| | | | | | | | 412, 414, 416, 418, 420, 422, 424, 426, 428, 430, 432, 434, 436, |
| | | | | | | | 438, 440, 442, 444, 446, 448, 450, 452, 454, 456, 458, 460, 462, |
| | | | | | | | 464, 466, 468, 470, 472 |
| 1 | 3 | NUE_OEX3 | AT1G14130.1 | A. th. | 504 | cytoplasmic | 506, 508, 510, 512, 514, 516, 518, 520, 522, 524, 526, 528, 530, |
| | | | | | | | 532, 534, 536, 538, 540, 542, 544 |
| 1 | 4 | NUE_OEX3 | AT1G20810.1_modified | A. th. | 607 | cytoplasmic | 609, 611, 613, 615, 617, 619, 621, 623 |
| 1 | 5 | NUE_OEX3 | AT1G53885 | A. th. | 641 | cytoplasmic | 643, 645, 647, 649, 651, 653, 655, 657 |
| 1 | 6 | NUE_OEX3 | At2G38730.1 | A. th. | 672 | cytoplasmic | 674, 676, 678, 680, 682, 684, 686, 688, 690, 692, 694, 696, 698, |
| | | | | | | | 700, 702, 704, 706, 708, 710, 712, 714, 716, 718, 720, 722, 724, |
| | | | | | | | 726, 728, 730, 732, 734, 736, 738, 740, 742, 744, 746, 748, 750, |
| | | | | | | | 752, 754, 756, 758, 760, 762, 764, 766, 768, 770, 772, 774, 776, |
| | | | | | | | 778, 780, 782, 784, 786, 788, 790, 792, 794, 796, 798, 800, 802, |
| | | | | | | | 804, 806, 808, 810, 812, 814, 816, 818, 820, 822, 824, 826, 828, |
| | | | | | | | 830, 832, 834, 836, 838, 840, 842, 844, 846, 848, 850, 852, 854, |
| | | | | | | | 856, 858, 860, 862, 864, 866, 868, 870, 872, 874, 876, 878, 880, |
| | | | | | | | 882, 884, 886, 888, 890, 892, 894, 896, 898, 900, 902, 904, 906, |
| | | | | | | | 908, 910, 912, 914, 916, 918, 920, 922, 924, 926, 928, 930, 932, |
| | | | | | | | 934, 936, 938, 940, 942, 944, 946, 948, 950, 952, 954, 956, 958, |
| | | | | | | | 960, 962, 964, 966, 968, 970, 972, 974, 976, 978, 980, 982, 984, |
| | | | | | | | 986, 988, 990, 992, 994, 996, 998, 1000, 1002, 1004, 1006, |
| | | | | | | | 1008, 1010, 1012, 1014, 1016, 1018, 1020, 1022, 1024, 1026, |
| | | | | | | | 1028, 1030, 1032, 1034, 1036, 1038, 1040, 1042, 1044, 1046, |
| | | | | | | | 1048, 1050, 1052, 1054, 1056, 1058, 1060, 1062, 1064, 1066, |
| | | | | | | | 1068, 1070, 1072, 1074, 1076, 1078, 1080, 1082, 1084, 1086, |
| | | | | | | | 1088, 1090, 1092, 1094, 1096, 1098, 1100, 1102, 1104, 1106, |
| | | | | | | | 1108, 1110, 1112, 1114, 1116, 1118, 1120, 1122, 1124, 1126, |
| | | | | | | | 1128, 1130, 1132, 1134, 1136, 1138, 1140, 1142, 1144, 1146, |
| | | | | | | | 1148, 1150, 1152, 1154, 1156, 1158, 1160, 1162, 1164, 1166, |
| | | | | | | | 1168, 1170, 1172, 1174, 1176, 1178, 1180, 1182, 1184, 1186, |
| | | | | | | | 1188, 1190, 1192, 1194, 1196, 1198, 1200, 1202, 1204, 1206, |
| | | | | | | | 1208, 1210, 1212, 1214, 1216, 1218, 1220, 1222, 1224, 1226, |
| | | | | | | | 1228, 1230, 1232, 1234, 1236, 1238, 1240, 1242, 1244, 1246, |
| | | | | | | | 1248, 1250, 1252, 1254, 1256, 1258, 1260, 1262, 1264, 1266, |
| | | | | | | | 1268, 1270, 1272, 1274, 1276, 1278, 1280, 1282, 1284, 1286, |
| | | | | | | | 1288, 1290, 1292, 1294, 1296, 1298, 1300, 1302, 1304, 1306, |
| | | | | | | | 1308, 1310, 1312, 1314, 1316, 1318, 1320, 1322, 1324, 1326, |
| | | | | | | | 1328, 1330, 1332, 1334, 1336, 1338, 1340, 1342, 1344, 1346, |
| | | | | | | | 1348, 1350, 1352, 1354, 1356, 1358, 1360, 1362, 1364, 1366, |
| | | | | | | | 1368, 1370, 1372, 1374, 1376 |
| 1 | 7 | NUE_OEX3 | AT3G01150.1_truncated | A. th. | 1551 | cytoplasmic | 1553, 1555, 1557, 1559, 1561, 1563, 1565, 1567, 1569, 1571, |
| | | | | | | | 1573, 1575, 1577, 1579, 1581, 1583, 1585, 1587, 1589, 1591, |
| | | | | | | | 1593, 1595, 1597, 1599, 1601, 1603, 1605, 1607, 1609, 1611, |
| | | | | | | | 1613, 1615, 1617 |
| 1 | 8 | NUE_OEX3 | AT5G47440_modified | A. th. | 1628 | cytoplasmic | 1630, 1632, 1634, 1636, 1638, 1640, 1642, 1644, 1646, 1648, |
| | | | | | | | 1650, 1652, 1654, 1656, 1658, 1660, 1662, 1664, 1666, 1668, |
| | | | | | | | 1670, 1672, 1674, 1676, 1678, 1680, 1682, 1684, 1686, 1688 |
| 1 | 9 | NUE_OEX3 | B1208 | E. coli | 1709 | plastidic | 1711, 1713, 1715, 1717, 1719, 1721, 1723, 1725, 1727, 1729, |
| | | | | | | | 1731, 1733, 1735, 1737, 1739, 1741, 1743, 1745, 1747, 1749, |
| | | | | | | | 1751, 1753, 1755, 1757, 1759, 1761, 1763, 1765, 1767, 1769, |
| | | | | | | | 1771, 1773, 1775, 1777, 1779, 1781, 1783, 1785, 1787, 1789, |
| | | | | | | | 1791, 1793, 1795, 1797, 1799, 1801, 1803, 1805, 1807, 1809, |
| | | | | | | | 1811, 1813, 1815, 1817, 1819, 1821, 1823, 1825, 1827, 1829, |
| | | | | | | | 1831, 1833, 1835, 1837, 1839, 1841, 1843, 1845, 1847, 1849, |
| | | | | | | | 1851, 1853, 1855, 1857, 1859, 1861, 1863, 1865, 1867, 1869, |
| | | | | | | | 1871, 1873, 1875, 1877, 1879, 1881, 1883, 1885, 1887, 1889, |
| | | | | | | | 1891, 1893, 1895, 1897, 1899, 1901, 1903, 1905, 1907, 1909, |
| | | | | | | | 1911, 1913, 1915, 1917, 1919, 1921, 1923, 1925, 1927, 1929, |
| | | | | | | | 1931, 1933, 1935, 1937, 1939, 1941, 1943, 1945, 1947, 1949, |
| | | | | | | | 1951, 1953, 1955, 1957, 1959, 1961, 1963, 1965, 1967, 1969, |
| | | | | | | | 1971, 1973, 1975, 1977, 1979, 1981, 1983, 1985, 1987, 1989, |
| | | | | | | | 1991, 1993, 1995, 1997, 1999, 2001, 2003, 2005, 2007, 2009, |
| | | | | | | | 2011, 2013, 2015, 2017, 2019, 2021, 2023, 2025, 2027, 2029, |
| | | | | | | | 2031, 2033, 2035, 2037, 2039, 2041, 2043, 2045, 2047, 2049, |
| | | | | | | | 2051, 2053, 2055, 2057, 2059, 2061, 2063, 2065, 2067, 2069, |
| | | | | | | | 2071, 2073, 2075, 2077, 2079, 2081, 2083, 2085, 2087, 2089, |
| | | | | | | | 2091, 2093, 2095, 2097, 2099, 2101, 2103, 2105, 2107, 2109, |
| | | | | | | | 2111, 2113, 2115, 2117, 2119, 2121, 2123, 2125, 2127, 2129, |
| | | | | | | | 2131, 2133, 2135, 2137, 2139, 2141, 2143, 2145, 2147, 2149, |
| | | | | | | | 2151, 2153, 2155, 2157, 2159, 2161, 2163, 2165, 2167, 2169, |
| | | | | | | | 2171, 2173, 2175, 2177, 2179, 2181, 2183, 2185, 2187, 2189, |
| | | | | | | | 2191, 2193, 2195, 2197, 2199, 2201, 2203, 2205, 2207, 2209, |
| | | | | | | | 2211, 2213, 2215, 2217 |
| 1 | 10 | NUE_OEX3 | B4214 | E. coli | 2226 | plastidic | 2228, 2230, 2232, 2234, 2236, 2238, 2240, 2242, 2244, 2246, |
| | | | | | | | 2248, 2250, 2252, 2254, 2256, 2258, 2260, 2262, 2264, 2266, |
| | | | | | | | 2268, 2270, 2272, 2274, 2276, 2278, 2280, 2282, 2284, 2286, |
| | | | | | | | 2288, 2290, 2292, 2294, 2296, 2298, 2300, 2302, 2304, 2306, |
| | | | | | | | 2308, 2310, 2312, 2314, 2316, 2318, 2320, 2322, 2324, 2326, |
| | | | | | | | 2328, 2330, 2332, 2334, 2336, 2338, 2340, 2342, 2344, 2346, |
| | | | | | | | 2348, 2350, 2352, 2354, 2356, 2358, 2360, 2362, 2364, 2366, |
| | | | | | | | 2368, 2370, 2372, 2374, 2376, 2378, 2380, 2382, 2384, 2386, |
| | | | | | | | 2388, 2390, 2392, 2394, 2396, 2398, 2400, 2402, 2404, 2406, |
| | | | | | | | 2408, 2410, 2412, 2414, 2416, 2418, 2420, 2422, 2424, 2426, |
| | | | | | | | 2428, 2430, 2432, 2434, 2436, 2438, 2440, 2442, 2444 |
| 1 | 11 | NUE_OEX3 | CDS5293_modified | P. trichocarpa | 2457 | cytoplasmic | 2459, 2461, 2463, 2465, 2467, 2469, 2471, 2473, 2475, 2477, |
| | | | | | | | 2479, 2481, 2483, 2485, 2487, 2489, 2491, 2493, 2495, 2497, |
| | | | | | | | 2499, 2501, 2503, 2505, 2507, 2509, 2511, 2513, 2515, 2517, |
| | | | | | | | 2519, 2521, 2523, 2525, 2527, 2529, 2531, 2533, 2535, 2537, |
| | | | | | | | 2539, 2541, 2543, 2545, 2547, 2549, 2551, 2553, 2555, 2557, |
| | | | | | | | 2559, 2561, 2563, 2565, 2567, 2569, 2571, 2573, 2575, 2577, |
| | | | | | | | 2579, 2581, 2583, 2585, 2587, 2589, 2591, 2593, 2595, 2597, |
| | | | | | | | 2599, 2601, 2603, 2605, 2607, 2609, 2611, 2613, 2615, 2617, |
| | | | | | | | 2619, 2621, 2623, 2625, 2627, 2629, 2631, 2633, 2635, 2637, |
| | | | | | | | 2639, 2641, 2643, 2645, 2647, 2649, 2651, 2653, 2655, 2657, |
| | | | | | | | 2659, 2661, 2663, 2665, 2667, 2669, 2671, 2673, 2675, 2677, |
| | | | | | | | 2679, 2681, 2683, 2685, 2687, 2689, 2691, 2693, 2695, 2697, |
| | | | | | | | 2699, 2701, 2703, 2705, 2707, 2709, 2711, 2713, 2715, 2717, |
| | | | | | | | 2719, 2721, 2723, 2725, 2727, 2729, 2731, 2733, 2735, 2737, |
| | | | | | | | 2739, 2741, 2743, 2745, 2747, 2749, 2751, 2753, 2755, 2757, |
| | | | | | | | 2759, 2761, 2763, 2765, 2767, 2769, 2771, 2773, 2775, 2777, |
| | | | | | | | 2779, 2781, 2783, 2785, 2787, 2789, 2791, 2793, 2795, 2797, |
| | | | | | | | 2799, 2801, 2803, 2805, 2807, 2809, 2811, 2813, 2815, 2817, |
| | | | | | | | 2819, 2821, 2823, 2825, 2827, 2829, 2831, 2833, 2835, 2837, |
| | | | | | | | 2839, 2841, 2843, 2845, 2847, 2849, 2851, 2853, 2855, 2857, |
| | | | | | | | 2859, 2861, 2863, 2865, 2867, 2869, 2871, 2873, 2875, 2877, |
| | | | | | | | 2879, 2881, 2883, 2885, 2887, 2889, 2891, 2893, 2895, 2897, |
| | | | | | | | 2899, 2901, 2903, 2905, 2907, 2909, 2911, 2913, 2915, 2917, |
| | | | | | | | 2919, 2921, 2923, 2925, 2927, 2929, 2931, 2933, 2935, 2937, |
| | | | | | | | 2939, 2941, 2943, 2945, 2947, 2949, 2951, 2953, 2955, 2957, |
| | | | | | | | 2959, 2961, 2963, 2965, 2967, 2969, 2971, 2973, 2975, 2977, |
| | | | | | | | 2979, 2981, 2983, 2985, 2987, 2989, 2991, 2993, 2995, 2997, |
| | | | | | | | 2999, 3001, 3003, 3005, 3007, 3009, 3011, 3013, 3015, 3017, |
| | | | | | | | 3019, 3021, 3023, 3025, 3027, 3029, 3031, 3033, 3035, 3037, |
| | | | | | | | 3039, 3041, 3043, 3045, 3047, 3049, 3051, 3053, 3055, 3057, |
| | | | | | | | 3059, 3061, 3063, 3065, 3067, 3069, 3071, 3073, 3075, 3077, |
| | | | | | | | 3079, 3081, 3083, 3085, 3087, 3089, 3091, 3093, 3095, 3097, |
| | | | | | | | 3099, 3101, 3103, 3105, 3107, 3109, 3111, 3113, 3115, 3117, |
| | | | | | | | 3119, 3121, 3123, 3125, 3127, 3129, 3131, 3133, 3135, 3137, |
| | | | | | | | 3139, 3141, 3143, 3145, 3147, 3149, 3151, 3153, 3155, 3157, |
| | | | | | | | 3159, 3161, 3163, 3165, 3167, 3169, 3171, 3173, 3175, 3177, |
| | | | | | | | 3179, 3181, 3183, 3185, 3187, 3189, 3191, 3193, 3195, 3197, |
| | | | | | | | 3199, 3201, 3203, 3205, 3207, 3209, 3211, 3213, 3215, 3217, |
| | | | | | | | 3219, 3221, 3223, 3225, 3227, 3229, 3231, 3233, 3235, 3237, |
| | | | | | | | 3239, 3241, 3243, 3245, 3247, 3249, 3251, 3253, 3255, 3257, |
| | | | | | | | 3259, 3261, 3263, 3265, 3267, 3269, 3271, 3273, 3275, 3277, |
| | | | | | | | 3279, 3281, 3283, 3285, 3287, 3289, 3291, 3293, 3295, 3297, |
| | | | | | | | 3299, 3301, 3303, 3305, 3307, 3309, 3311, 3313, 3315, 3317, |
| | | | | | | | 3319, 3321, 3323, 3325, 3327, 3329, 3331, 3333, 3335, 3337, |
| | | | | | | | 3339, 3341, 3343, 3345, 3347, 3349, 3351, 3353, 3355, 3357, |
| | | | | | | | 3359, 3361, 3363, 3365, 3367, 3369, 3371, 3373, 3375, 3377, |
| | | | | | | | 3379, 3381, 3383, 3385, 3387, 3389, 3391, 3393, 3395, 3397, |
| | | | | | | | 3399, 3401, 3403, 3405, 3407 |
| 1 | 12 | NUE_OEX3 | CDS5305 | P. trichocarpa | 3463 | cytoplasmic | 3465, 3467, 3469, 3471, 3473, 3475, 3477, 3479, 3481, 3483, |
| | | | | | | | 3485, 3487, 3489, 3491, 3493, 3495, 3497, 3499, 3501, 3503, |
| | | | | | | | 3505, 3507, 3509, 3511, 3513, 3515, 3517, 3519, 3521, 3523, |
| | | | | | | | 3525, 3527, 3529, 3531, 3533, 3535, 3537, 3539, 3541, 3543, |
| | | | | | | | 3545, 3547, 3549, 3551, 3553, 3555, 3557, 3559, 3561, 3563, |
| | | | | | | | 3565, 3567, 3569, 3571, 3573, 3575, 3577, 3579, 3581, 3583, |
| | | | | | | | 3585, 3587, 3589, 3591, 3593, 3595, 3597, 3599, 3601, 3603, |
| | | | | | | | 3605, 3607, 3609, 3611, 3613, 3615, 3617, 3619, 3621, 3623, |
| | | | | | | | 3625, 3627, 3629, 3631, 3633, 3635, 3637, 3639, 3641, 3643, |
| | | | | | | | 3645, 3647, 3649, 3651, 3653, 3655, 3657, 3659, 3661, 3663, |
| | | | | | | | 3665, 3667, 3669, 3671, 3673, 3675, 3677, 3679, 3681, 3683, |
| | | | | | | | 3685, 3687, 3689, 3691, 3693, 3695, 3697, 3699, 3701, 3703, |
| | | | | | | | 3705, 3707, 3709, 3711, 3713, 3715, 3717, 3719, 3721, 3723, |
| | | | | | | | 3725, 3727, 3729, 3731, 3733, 3735, 3737, 3739, 3741, 3743, |
| | | | | | | | 3745, 3747, 3749, 3751, 3753, 3755 |
| 1 | 13 | NUE_OEX3 | CDS5397 | P. trichocarpa | 3794 | cytoplasmic | 3796, 3798, 3800, 3802, 3804, 3806, 3808, 3810, 3812, 3814, |
| | | | | | | | 3816, 3818, 3820, 3822, 3824, 3826, 3828, 3830, 3832, 3834, |
| | | | | | | | 3836, 3838, 3840, 3842, 3844, 3846, 3848, 3850, 3852, 3854, |
| | | | | | | | 3856, 3858, 3860, 3862, 3864, 3866, 3868, 3870, 3872, 3874, |
| | | | | | | | 3876, 3878, 3880, 3882, 3884, 3886, 3888, 3890, 3892, 3894, |
| | | | | | | | 3896, 3898, 3900, 3902, 3904, 3906, 3908, 3910, 3912, 3914, |
| | | | | | | | 3916, 3918, 3920, 3922, 3924, 3926, 3928, 3930, 3932, 3934, |
| | | | | | | | 3936, 3938, 3940, 3942, 3944, 3946, 3948, 3950, 3952, 3954, |
| | | | | | | | 3956, 3958, 3960, 3962, 3964, 3966, 3968, 3970, 3972, 3974, |
| | | | | | | | 3976, 3978, 3980, 3982, 3984, 3986, 3988, 3990, 3992, 3994, |
| | | | | | | | 3996, 3998, 4000, 4002, 4004, 4006, 4008, 4010, 4012, 4014, |
| | | | | | | | 4016, 4018, 4020, 4022, 4024, 4026, 4028, 4030, 4032, 4034, |
| | | | | | | | 4036, 4038, 4040, 4042, 4044, 4046, 4048, 4050, 4052, 4054, |
| | | | | | | | 4056, 4058, 4060, 4062, 4064, 4066, 4068, 4070, 4072, 4074, |
| | | | | | | | 4076, 4078, 4080, 4082, 4084, 4086, 4088, 4090, 4092, 4094, |
| | | | | | | | 4096, 4098, 4100, 4102, 4104, 4106, 4108, 4110, 4112, 4114, |
| | | | | | | | 4116, 4118, 4120, 4122, 4124, 4126, 4128, 4130, 4132, 4134, |
| | | | | | | | 4136, 4138, 4140, 4142, 4144, 4146, 4148, 4150, 4152, 4154, |
| | | | | | | | 4156, 4158, 4160, 4162, 4164, 4166, 4168, 4170, 4172, 4174, |
| | | | | | | | 4176, 4178, 4180, 4182, 4184, 4186, 4188, 4190, 4192, 4194, |
| | | | | | | | 4196, 4198, 4200, 4202, 4204, 4206, 4208, 4210, 4212, 4214, |
| | | | | | | | 4216, 4218, 4220, 4222, 4224, 4226, 4228, 4230, 4232, 4234, |
| | | | | | | | 4236, 4238, 4240, 4242, 4244, 4246, 4248, 4250, 4252, 4254, |
| | | | | | | | 4256, 4258, 4260, 4262, 4264, 4266, 4268, 4270, 4272, 4274, |
| | | | | | | | 4276, 4278, 4280, 4282, 4284, 4286, 4288, 4290, 4292, 4294, |
| | | | | | | | 4296, 4298, 4300, 4302, 4304, 4306, 4308, 4310, 4312, 4314, |
| | | | | | | | 4316, 4318, 4320, 4322, 4324, 4326, 4328, 4330, 4332, 4334, |
| | | | | | | | 4336, 4338, 4340, 4342, 4344, 4346, 4348, 4350, 4352, 4354, |
| | | | | | | | 4356, 4358, 4360, 4362, 4364, 4366, 4368, 4370, 4372, 4374, |
| | | | | | | | 4376, 4378, 4380, 4382, 4384, 4386, 4388, 4390, 4392, 4394, |
| | | | | | | | 4396, 4398, 4400, 4402, 4404, 4406, 4408, 4410, 4412, 4414, |
| | | | | | | | 4416, 4418, 4420, 4422, 4424, 4426, 4428, 4430, 4432, 4434, |
| | | | | | | | 4436, 4438, 4440, 4442, 4444, 4446, 4448, 4450, 4452, 4454, |
| | | | | | | | 4456, 4458, 4460, 4462, 4464, 4466, 4468, 4470, 4472, 4474, |
| | | | | | | | 4476, 4478, 4480, 4482, 4484, 4486, 4488, 4490, 4492, 4494, |
| | | | | | | | 4496, 4498, 4500, 4502, 4504, 4506, 4508, 4510, 4512, 4514, |
| | | | | | | | 4516, 4518, 4520, 4522, 4524, 4526, 4528, 4530, 4532, 4534, |
| | | | | | | | 4536, 4538, 4540, 4542, 4544, 4546, 4548, 4550, 4552, 4554, |
| | | | | | | | 4556, 4558, 4560, 4562, 4564, 4566, 4568, 4570, 4572, 4574, |
| | | | | | | | 4576 |
| 1 | 14 | NUE_OEX3 | TTC1186 | T. thermophilus | 4630 | cytoplasmic | 4632, 4634, 4636, 4638, 4640, 4642, 4644, 4646, 4648, 4650, |
| | | | | | | | 4652, 4654, 4656, 4658, 4660, 4662, 4664, 4666, 4668, 4670, |
| | | | | | | | 4672, 4674, 4676, 4678, 4680, 4682, 4684, 4686, 4688, 4690, |
| | | | | | | | 4692, 4694, 4696, 4698, 4700, 4702, 4704, 4706, 4708, 4710, |
| | | | | | | | 4712, 4714, 4716, 4718, 4720, 4722, 4724, 4726, 4728, 4730, |
| | | | | | | | 4732, 4734, 4736, 4738, 4740, 4742, 4744, 4746, 4748, 4750, |
| | | | | | | | 4752, 4754, 4756, 4758, 4760, 4762, 4764, 4766, 4768, 4770, |
| | | | | | | | 4772, 4774, 4776, 4778, 4780, 4782, 4784, 4786, 4788, 4790, |
| | | | | | | | 4792, 4794, 4796, 4798, 4800, 4802, 4804, 4806, 4808, 4810, |
| | | | | | | | 4812, 4814, 4816, 4818, 4820, 4822, 4824, 4826, 4828, 4830, |
| | | | | | | | 4832, 4834, 4836, 4838, 4840, 4842, 4844, 4846, 4848, 4850, |
| | | | | | | | 4852, 4854, 4856, 4858, 4860, 4862, 4864, 4866, 4868, 4870, |
| | | | | | | | 4872, 4874, 4876, 4878, 4880, 4882, 4884, 4886, 4888, 4890, |
| | | | | | | | 4892, 4894, 4896, 4898, 4900, 4902, 4904, 4906, 4908, 4910, |
| | | | | | | | 4912, 4914, 4916, 4918, 4920, 4922, 4924, 4926, 4928, 4930, |
| | | | | | | | 4932, 4934, 4936, 4938, 4940, 4942, 4944, 4946, 4948, 4950, |
| | | | | | | | 4952, 4954, 4956, 4958, 4960, 4962, 4964, 4966, 4968, 4970, |
| | | | | | | | 4972, 4974, 4976, 4978, 4980, 4982, 4984, 4986, 4988, 4990, |
| | | | | | | | 4992, 4994, 4996, 4998, 5000, 5002, 5004, 5006, 5008, 5010, |
| | | | | | | | 5012, 5014, 5016, 5018, 5020, 5022, 5024, 5026, 5028, 5030, |
| | | | | | | | 5032, 5034 |
| 1 | 15 | NUE_OEX3 | YKL124W | S. cerevisiae | 5042 | cytoplasmic | 5044, 5046, 5048, 5050, 5052, 5054, 5056 |
| 1 | 16 | NUE_OEX3 | YNL093W | S. cerevisiae | 5069 | cytoplasmic | 5071, 5073, 5075, 5077, 5079, 5081, 5083, 5085, 5087, 5089, |
| | | | | | | | 5091, 5093, 5095, 5097, 5099, 5101, 5103, 5105, 5107, 5109, |
| | | | | | | | 5111, 5113, 5115, 5117, 5119, 5121, 5123, 5125, 5127, 5129, |
| | | | | | | | 5131, 5133, 5135, 5137, 5139, 5141, 5143, 5145, 5147, 5149, |
| | | | | | | | 5151, 5153, 5155, 5157, 5159, 5161, 5163, 5165, 5167, 5169, |
| | | | | | | | 5171, 5173, 5175, 5177, 5179, 5181, 5183, 5185, 5187, 5189, |
| | | | | | | | 5191, 5193, 5195, 5197, 5199, 5201, 5203, 5205, 5207, 5209, |
| | | | | | | | 5211, 5213, 5215, 5217, 5219, 5221, 5223, 5225, 5227, 5229, |
| | | | | | | | 5231, 5233, 5235, 5237, 5239, 5241, 5243, 5245, 5247 |
| 1 | 17 | NUE_OEX3 | ZM_7266_BQ538406_CORN_LOFI_344_730_B | Zea | 5492 | cytoplasmic | 5494, 5496, 5498, 5500, 5502, 5504, 5506, 5508, 5510, 5512, |
| | | | | mays | | | 5514, 5516, 5518, 5520, 5522, 5524, 5526, 5528, 5530, 5532, |
| | | | | | | | 5534, 5536, 5538, 5540, 5542, 5544, 5546, 5548, 5550, 5552, |
| | | | | | | | 5554, 5556, 5558, 5560, 5562, 5564, 5566, 5568, 5570, 5572, |
| | | | | | | | 5574, 5576, 5578, 5580, 5582, 5584, 5586, 5588, 5590, 5592, |
| | | | | | | | 5594, 5596, 5598, 5600, 5602, 5604, 5606, 5608, 5610, 5612, |
| | | | | | | | 5614, 5616, 5618, 5620, 5622, 5624, 5626, 5628, 5630, 5632, |
| | | | | | | | 5634, 5636, 5638, 5640, 5642, 5644, 5646, 5648, 5650, 5652, |
| | | | | | | | 5654, 5656, 5658, 5660, 5662, 5664, 5666, 5668, 5670, 5672, |
| | | | | | | | 5674, 5676, 5678, 5680, 5682, 5684, 5686, 5688, 5690, 5692, |
| | | | | | | | 5694, 5696, 5698, 5700, 5702, 5704, 5706 |
| 1 | 18 | NUE_OEX3 | At1G29250.1 | A. th. | 5838 | cytoplasmic | 5840, 5842, 5844, 5846, 5848, 5850, 5852, 5854, 5856, 5858, |
| | | | | | | | 5860, 5862, 5864, 5866, 5868, 5870, 5872, 5874, 5876, 5878, |
| | | | | | | | 5880, 5882, 5884, 5886, 5888, 5890, 5892, 5894, 5896, 5898, |
| | | | | | | | 5900, 5902, 5904, 5906, 5908, 5910, 5912, 5914, 5916, 5918, |
| | | | | | | | 5920, 5922, 5924, 5926, 5928, 5930, 5932, 5934, 5936, 5938, |
| | | | | | | | 5940 |
| 1 | 19 | NUE_OEX3 | AT1G55920.1 | A. th. | 5982 | cytoplasmic | 5984, 5986, 5988, 5990, 5992, 5994, 5996, 5998, 6000, 6002, |
| | | | | | | | 6004, 6006, 6008, 6010, 6012, 6014, 6016, 6018, 6020, 6022, |
| | | | | | | | 6024, 6026, 6028, 6030, 6032, 6034, 6036, 6038, 6040, 6042, |
| | | | | | | | 6044, 6046, 6048, 6050, 6052, 6054, 6056, 6058, 6060, 6062, |
| | | | | | | | 6064, 6066, 6068, 6070, 6072, 6074, 6076, 6078, 6080, 6082, |
| | | | | | | | 6084, 6086, 6088, 6090, 6092, 6094, 6096, 6098, 6100, 6102, |
| | | | | | | | 6104, 6106, 6108, 6110, 6112, 6114, 6116, 6118, 6120, 6122, |
| | | | | | | | 6124, 6126, 6128, 6130, 6132, 6134, 6136, 6138, 6140, 6142, |
| | | | | | | | 6144, 6146, 6148, 6150, 6152, 6154, 6156, 6158, 6160, 6162, |
| | | | | | | | 6164, 6166, 6168, 6170, 6172, 6174, 6176, 6178, 6180, 6182, |
| | | | | | | | 6184, 6186, 6188, 6190, 6192, 6194, 6196, 6198, 6200, 6202, |
| | | | | | | | 6204, 6206, 6208, 6210, 6212, 6214, 6216, 6218, 6220, 6222, |
| | | | | | | | 6224, 6226, 6228, 6230, 6232, 6234, 6236, 6238, 6240, 6242, |
| | | | | | | | 6244, 6246, 6248, 6250, 6252, 6254, 6256, 6258, 6260, 6262, |
| | | | | | | | 6264, 6266, 6268, 6270, 6272, 6274, 6276, 6278, 6280, 6282, |
| | | | | | | | 6284, 6286, 6288, 6290, 6292, 6294, 6296, 6298, 6300, 6302, |
| | | | | | | | 6304, 6306, 6308, 6310, 6312, 6314, 6316, 6318, 6320, 6322, |
| | | | | | | | 6324, 6326, 6328, 6330, 6332, 6334, 6336, 6338, 6340, 6342, |
| | | | | | | | 6344, 6346, 6348, 6350, 6352, 6354, 6356, 6358, 6360, 6362, |
| | | | | | | | 6364, 6366, 6368, 6370, 6372, 6374, 6376, 6378, 6380, 6382, |
| | | | | | | | 6384, 6386, 6388, 6390, 6392, 6394, 6396, 6398, 6400, 6402, |
| | | | | | | | 6404, 6406, 6408, 6410, 6412, 6414, 6416, 6418, 6420, 6422, |
| | | | | | | | 6424, 6426, 6428, 6430, 6432, 6434, 6436, 6438, 6440, 6442, |
| | | | | | | | 6444, 6446, 6448, 6450, 6452, 6454, 6456, 6458, 6460, 6462 |
| 1 | 20 | NUE_OEX3 | AT3G09480 | A. th. | 6494 | cytoplasmic | 6496, 6498, 6500, 6502, 6504, 6506, 6508, 6510, 6512, 6514, |
| | | | | | | | 6516, 6518, 6520, 6522, 6524, 6526, 6528, 6530, 6532, 6534, |
| | | | | | | | 6536, 6538, 6540, 6542, 6544, 6546, 6548, 6550, 6552, 6554, |
| | | | | | | | 6556, 6558, 6560, 6562, 6564, 6566, 6568, 6570, 6572, 6574, |
| | | | | | | | 6576, 6578, 6580, 6582, 6584, 6586, 6588, 6590, 6592, 6594, |
| | | | | | | | 6596, 6598, 6600, 6602, 6604, 6606, 6608, 6610, 6612, 6614, |
| | | | | | | | 6616, 6618, 6620, 6622, 6624, 6626, 6628, 6630, 6632, 6634, |
| | | | | | | | 6636, 6638, 6640, 6642, 6644, 6646, 6648, 6650, 6652, 6654, |
| | | | | | | | 6656, 6658, 6660, 6662, 6664, 6666, 6668, 6670, 6672, 6674, |
| | | | | | | | 6676, 6678, 6680, 6682, 6684, 6686, 6688, 6690, 6692, 6694, |
| | | | | | | | 6696, 6698, 6700, 6702, 6704, 6706, 6708, 6710, 6712, 6714, |
| | | | | | | | 6716, 6718, 6720, 6722, 6724, 6726, 6728, 6730, 6732, 6734, |
| | | | | | | | 6736, 6738, 6740, 6742, 6744, 6746, 6748, 6750, 6752, 6754, |
| | | | | | | | 6756, 6758, 6760, 6762, 6764, 6766, 6768, 6770, 6772, 6774, |
| | | | | | | | 6776, 6778, 6780, 6782, 6784, 6786, 6788, 6790, 6792, 6794, |
| | | | | | | | 6796, 6798, 6800, 6802, 6804, 6806, 6808, 6810, 6812, 6814, |
| | | | | | | | 6816, 6818, 6820, 6822, 6824, 6826, 6828, 6830, 6832, 6834, |
| | | | | | | | 6836, 6838, 6840, 6842, 6844, 6846, 6848, 6850, 6852, 6854, |
| | | | | | | | 6856, 6858, 6860, 6862, 6864, 6866, 6868, 6870, 6872, 6874, |
| | | | | | | | 6876, 6878, 6880, 6882, 6884, 6886, 6888, 6890, 6892, 6894, |
| | | | | | | | 6896, 6898, 6900, 6902, 6904, 6906, 6908, 6910, 6912, 6914, |
| | | | | | | | 6916, 6918, 6920, 6922, 6924, 6926, 6928, 6930, 6932, 6934, |
| | | | | | | | 6936, 6938, 6940, 6942, 6944, 6946, 6948, 6950, 6952, 6954, |
| | | | | | | | 6956, 6958, 6960, 6962, 6964, 6966, 6968, 6970, 6972, 6974, |
| | | | | | | | 6976, 6978, 6980, 6982, 6984, 6986, 6988, 6990, 6992, 6994, |
| | | | | | | | 6996, 6998, 7000, 7002, 7004, 7006, 7008, 7010, 7012, 7014, |
| | | | | | | | 7016, 7018, 7020, 7022, 7024, 7026, 7028, 7030, 7032, 7034, |
| | | | | | | | 7036, 7038, 7040, 7042, 7044, 7046, 7048, 7050, 7052, 7054, |
| | | | | | | | 7056, 7058, 7060, 7062, 7064, 7066, 7068, 7070, 7072, 7074, |
| | | | | | | | 7076, 7078, 7080, 7082, 7084, 7086, 7088, 7090, 7092, 7094, |
| | | | | | | | 7096, 7098, 7100, 7102, 7104, 7106, 7108, 7110, 7112, 7114, |
| | | | | | | | 7116, 7118, 7120, 7122, 7124, 7126, 7128, 7130, 7132, 7134, |
| | | | | | | | 7136, 7138, 7140, 7142, 7144, 7146, 7148, 7150, 7152, 7154, |
| | | | | | | | 7156, 7158, 7160, 7162, 7164, 7166, 7168, 7170, 7172, 7174, |
| | | | | | | | 7176, 7178, 7180, 7182, 7184, 7186, 7188, 7190, 7192, 7194, |
| | | | | | | | 7196, 7198, 7200, 7202, 7204, 7206, 7208, 7210, 7212, 7214 |
| 1 | 21 | NUE_OEX3 | AT4G01870 | A. th. | 7364 | cytoplasmic | 7366, 7368, 7370, 7372, 7374, 7376, 7378, 7380, 7382, 7384, |
| | | | | | | | 7386, 7388, 7390, 7392, 7394, 7396, 7398, 7400, 7402, 7404, |
| | | | | | | | 7406, 7408, 7410, 7412, 7414 |
| 1 | 22 | NUE_OEX3 | AT4G11890 | A. th. | 7434 | cytoplasmic | 7436, 7438, 7440, 7442, 7444, 7446, 7448, 7450, 7452, 7454, |
| | | | | | | | 7456, 7458, 7460, 7462, 7464, 7466, 7468, 7470, 7472, 7474 |
| 1 | 23 | NUE_OEX3 | AT5G07310 | A. th. | 7513 | cytoplasmic | 7515, 7517, 7519, 7521, 7523, 7525, 7527, 7529, 7531 |
| 1 | 24 | NUE_OEX3 | CDS5422 | P. trichocarpa | 7545 | cytoplasmic | 7547, 7549, 7551, 7553, 7555, 7557, 7559, 7561, 7563, 7565, |
| | | | | | | | 7567, 7569, 7571, 7573, 7575, 7577, 7579, 7581, 7583, 7585, |
| | | | | | | | 7587, 7589, 7591, 7593, 7595, 7597, 7599, 7601, 7603, 7605, |
| | | | | | | | 7607, 7609, 7611, 7613, 7615, 7617, 7619, 7621, 7623, 7625, |
| | | | | | | | 7627, 7629, 7631, 7633, 7635, 7637, 7639, 7641, 7643, 7645, |
| | | | | | | | 7647, 7649, 7651, 7653, 7655, 7657, 7659, 7661, 7663, 7665, |
| | | | | | | | 7667, 7669, 7671, 7673, 7675, 7677, 7679, 7681, 7683, 7685, |
| | | | | | | | 7687, 7689, 7691, 7693 |
| 1 | 25 | NUE_OEX3 | AT1G03905.1 | A. th. | 7721 | cytoplasmic | 7723, 7725, 7727, 7729, 7731, 7733, 7735, 7737, 7739, 7741, |
| | | | | | | | 7743, 7745, 7747, 7749, 7751, 7753, 7755, 7757, 7759, 7761, |
| | | | | | | | 7763, 7765, 7767, 7769, 7771, 7773, 7775, 7777, 7779, 7781, |
| | | | | | | | 7783, 7785, 7787, 7789, 7791, 7793, 7795, 7797, 7799, 7801, |
| | | | | | | | 7803, 7805, 7807, 7809, 7811, 7813, 7815, 7817, 7819, 7821, |
| | | | | | | | 7823, 7825, 7827, 7829, 7831, 7833, 7835 |
| 1 | 26 | NUE_OEX3 | AT4G22240.1 | A. th. | 8287 | cytoplasmic | 8289, 8291, 8293, 8295, 8297, 8299, 8301, 8303, 8305, 8307, |
| | | | | | | | 8309, 8311, 8313, 8315, 8317, 8319, 8321, 8323, 8325, 8327, |
| | | | | | | | 8329, 8331, 8333, 8335, 8337, 8339, 8341, 8343, 8345, 8347, |
| | | | | | | | 8349, 8351, 8353, 8355, 8357, 8359, 8361, 8363, 8365, 8367, |
| | | | | | | | 8369, 8371, 8373, 8375, 8377, 8379 |
| 1 | 27 | NUE_OEX3 | AT1G09350.1 | A. th. | 7864 | cytoplasmic | 7866, 7868, 7870, 7872, 7874, 7876, 7878, 7880, 7882, 7884, |
| | | | | | | | 7886, 7888, 7890, 7892, 7894, 7896, 7898, 7900, 7902, 7904, |
| | | | | | | | 7906, 7908, 7910, 7912, 7914, 7916, 7918, 7920, 7922, 7924, |
| | | | | | | | 7926, 7928, 7930, 7932, 7934, 7936, 7938, 7940, 7942, 7944, |
| | | | | | | | 7946, 7948, 7950, 7952, 7954, 7956, 7958, 7960, 7962, 7964, |
| | | | | | | | 7966, 7968, 7970, 7972, 7974, 7976, 7978, 7980, 7982, 7984, |
| | | | | | | | 7986, 7988, 7990, 7992, 7994, 7996, 7998, 8000, 8002, 8004, |
| | | | | | | | 8006, 8008, 8010, 8012, 8014, 8016, 8018, 8020, 8022, 8024, |
| | | | | | | | 8026 |
| 1 | 28 | NUE_OEX3 | AT1G30135.1 | A. th. | 8064 | cytoplasmic | 8066, 8068, 8070, 8072, 8074, 8076, 8078, 8080, 8082, 8084, |
| | | | | | | | 8086, 8088, 8090, 8092 |
| 1 | 29 | NUE_OEX3 | AT1G35680.1 | A. th. | 8104 | cytoplasmic | 8106, 8108, 8110, 8112, 8114, 8116, 8118, 8120, 8122, 8124, |
| | | | | | | | 8126, 8128, 8130, 8132, 8134 |
| 1 | 30 | NUE_OEX3 | AT2G42540.1 | A. th. | 8152 | cytoplasmic | 8154, 8156, 8158, 8160, 8162, 8164, 8166, 8168, 8170, 8172, |
| | | | | | | | 8174, 8176, 8178, 8180, 8182, 8184, 8186, 8188, 8190, 8192, |
| | | | | | | | 8194, 8196 |
| 1 | 31 | NUE_OEX3 | AT3G02990.1 | A. th. | 8206 | cytoplasmic | 8208, 8210, 8212, 8214, 8216, 8218, 8220, 8222, 8224, 8226, |
| | | | | | | | 8228, 8230, 8232, 8234, 8236, 8238, 8240, 8242, 8244, 8246, |
| | | | | | | | 8248, 8250, 8252, 8254, 8256, 8258, 8260, 8262, 8264, 8266 |
| 1 | 32 | NUE_OE | At5g37670.1 | A. th. | 8408 | cytoplasmic | 8410, 8412, 8414, 8416, 8418, 8420, 8422, 8424, 8426, 8428, |
| | | | | | | | 8430, 8432, 8434, 8436, 8438, 8440, 8442, 8444, 8446, 8448, |
| | | | | | | | 8450, 8452, 8454, 8456, 8458, 8460, 8462, 8464, 8466, 8468, |
| | | | | | | | 8470, 8472, 8474, 8476, 8478, 8480, 8482, 8484, 8486, 8488, |
| | | | | | | | 8490, 8492, 8494, 8496, 8498, 8500, 8502, 8504, 8506, 8508, |
| | | | | | | | 8510, 8512, 8514, 8516, 8518, 8520, 8522, 8524, 8526, 8528, |
| | | | | | | | 8530, 8532, 8534, 8536, 8538, 8540, 8542, 8544, 8546, 8548, |
| | | | | | | | 8550, 8552, 8554, 8556, 8558, 8560, 8562, 8564, 8566, 8568, |
| | | | | | | | 8570, 8572, 8574, 8576, 8578, 8580, 8582, 8584, 8586, 8588, |
| | | | | | | | 8590, 8592, 8594, 8596, 8598, 8600, 8602, 8604, 8606, 8608, |
| | | | | | | | 8610, 8612, 8614, 8616, 8618, 8620, 8622, 8624, 8626, 8628, |
| | | | | | | | 8630, 8632, 8634, 8636, 8638, 8640, 8642, 8644, 8646, 8648, |
| | | | | | | | 8650, 8652, 8654, 8656, 8658, 8660, 8662, 8664, 8666, 8668, |
| | | | | | | | 8670, 8672, 8674, 8676, 8678, 8680, 8682, 8684, 8686, 8688, |
| | | | | | | | 8690, 8692, 8694, 8696, 8698, 8700 |
| 1 | 33 | NUE_OEX3 | CDS5376 | P. trichocarpa | 8842 | cytoplasmic | 8844, 8846, 8848, 8850, 8852, 8854, 8856, 8858, 8860, 8862, |
| | | | | | | | 8864, 8866, 8868, 8870, 8872, 8874, 8876, 8878, 8880, 8882, |
| | | | | | | | 8884, 8886, 8888, 8890, 8892, 8894, 8896, 8898, 8900, 8902, |
| | | | | | | | 8904, 8906, 8908, 8910, 8912, 8914, 8916, 8918, 8920, 8922, |
| | | | | | | | 8924, 8926, 8928, 8930, 8932, 8934, 8936, 8938, 8940, 8942, |
| | | | | | | | 8944, 8946, 8948, 8950, 8952, 8954, 8956, 8958, 8960, 8962, |
| | | | | | | | 8964, 8966, 8968, 8970, 8972, 8974, 8976, 8978, 8980, 8982, |
| | | | | | | | 8984, 8986, 8988, 8990, 8992, 8994, 8996, 8998, 9000, 9002, |
| | | | | | | | 9004, 9006, 9008, 9010, 9012, 9014, 9016, 9018, 9020, 9022, |
| | | | | | | | 9024, 9026, 9028, 9030, 9032, 9034, 9036, 9038, 9040, 9042, |
| | | | | | | | 9044, 9046, 9048, 9050, 9052, 9054, 9056, 9058, 9060, 9062, |
| | | | | | | | 9064, 9066, 9068, 9070, 9072, 9074, 9076, 9078, 9080, 9082, |
| | | | | | | | 9084, 9086, 9088, 9090, 9092, 9094, 9096, 9098, 9100, 9102, |
| | | | | | | | 9104, 9106, 9108, 9110, 9112, 9114, 9116, 9118, 9120, 9122, |
| | | | | | | | 9124, 9126, 9128, 9130, 9132, 9134, 9136, 9138, 9140, 9142, |
| | | | | | | | 9144, 9146, 9148, 9150, 9152, 9154, 9156, 9158, 9160, 9162, |
| | | | | | | | 9164, 9166, 9168, 9170, 9172, 9174, 9176, 9178, 9180, 9182, |
| | | | | | | | 9184, 9186, 9188, 9190, 9192, 9194, 9196, 9198, 9200, 9202, |
| | | | | | | | 9204, 9206, 9208, 9210, 9212, 9214, 9216, 9218, 9220, 9222, |
| | | | | | | | 9224, 9226, 9228, 9230, 9232, 9234, 9236, 9238, 9240, 9242, |
| | | | | | | | 9244, 9246, 9248, 9250, 9252, 9254, 9256, 9258, 9260, 9262, |
| | | | | | | | 9264, 9266, 9268, 9270, 9272, 9274, 9276, 9278, 9280, 9282, |
| | | | | | | | 9284, 9286, 9288, 9290, 9292, 9294, 9296, 9298, 9300, 9302, |
| | | | | | | | 9304, 9306, 9308, 9310, 9312, 9314, 9316, 9318, 9320, 9322, |
| | | | | | | | 9324, 9326, 9328, 9330, 9332, 9334, 9336, 9338, 9340, 9342, |
| | | | | | | | 9344, 9346, 9348, 9350, 9352, 9354, 9356, 9358, 9360, 9362, |
| | | | | | | | 9364, 9366, 9368, 9370, 9372, 9374, 9376, 9378, 9380, 9382, |
| | | | | | | | 9384, 9386, 9388, 9390, 9392, 9394, 9396, 9398, 9400, 9402, |
| | | | | | | | 9404, 9406, 9408, 9410, 9412, 9414, 9416, 9418, 9420, 9422, |
| | | | | | | | 9424, 9426, 9428, 9430, 9432, 9434, 9436, 9438, 9440, 9442, |
| | | | | | | | 9444, 9446, 9448, 9450, 9452, 9454, 9456, 9458, 9460, 9462, |
| | | | | | | | 9464, 9466, 9468, 9470, 9472, 9474, 9476, 9478, 9480, 9482, |
| | | | | | | | 9484, 9486, 9488, 9490, 9492, 9494, 9496, 9498, 9500, 9502, |
| | | | | | | | 9504, 9506, 9508, 9510, 9512, 9514, 9516, 9518, 9520, 9522, |
| | | | | | | | 9524, 9526, 9528, 9530, 9532, 9534, 9536, 9538, 9540, 9542, |
| | | | | | | | 9544, 9546, 9548, 9550, 9552, 9554, 9556, 9558, 9560, 9562, |
| | | | | | | | 9564, 9566, 9568, 9570, 9572, 9574, 9576, 9578, 9580, 9582, |
| | | | | | | | 9584, 9586, 9588, 9590, 9592, 9594, 9596, 9598, 9600, 9602, |
| | | | | | | | 9604, 9606, 9608, 9610, 9612, 9614, 9616, 9618, 9620, 9622, |
| | | | | | | | 9624, 9626, 9628, 9630, 9632, 9634, 9636, 9638, 9640, 9642, |
| | | | | | | | 9644, 9646, 9648, 9650, 9652, 9654, 9656, 9658, 9660, 9662, |
| | | | | | | | 9664, 9666, 9668, 9670, 9672, 9674, 9676, 9678, 9680, 9682, |
| | | | | | | | 9684, 9686, 9688, 9690, 9692, 9694, 9696, 9698, 9700, 9702, |
| | | | | | | | 9704, 9706, 9708, 9710, 9712, 9714, 9716, 9718, 9720, 9722, |
| | | | | | | | 9724, 9726, 9728, 9730, 9732, 9734, 9736, 9738, 9740, 9742, |
| | | | | | | | 9744, 9746, 9748, 9750, 9752, 9754, 9756, 9758, 9760, 9762, |
| | | | | | | | 9764, 9766, 9768, 9770, 9772, 9774, 9776, 9778, 9780, 9782, |
| | | | | | | | 9784 |
| 1 | 34 | NUE_OEX3 | LOC_Os02g13560.1 | O. sativa | 9854 | cytoplasmic | 9856, 9858, 9860, 9862, 9864, 9866, 9868, 9870, 9872, 9874, |
| | | | | | | | 9876, 9878, 9880, 9882, 9884, 9886, 9888, 9890, 9892, 9894, |
| | | | | | | | 9896, 9898, 9900, 9902, 9904, 9906, 9908, 9910, 9912, 9914, |
| | | | | | | | 9916, 9918, 9920, 9922, 9924, 9926, 9928, 9930, 9932, 9934, |
| | | | | | | | 9936, 9938, 9940, 9942, 9944, 9946, 9948, 9950, 9952, 9954, |
| | | | | | | | 9956, 9958 |
| 1 | 35 | NUE_OEX3 | YCR024C | S. cerevisiae | 9981 | cytoplasmic | 9983, 9985, 9987, 9989, 9991, 9993, 9995, 9997, 9999, 10001, |
| | | | | | | | 10003, 10005, 10007, 10009, 10011, 10013, 10015, 10017, |
| | | | | | | | 10019, 10021, 10023, 10025, 10027, 10029, 10031, 10033, |
| | | | | | | | 10035, 10037, 10039, 10041, 10043, 10045, 10047, 10049, |
| | | | | | | | 10051, 10053, 10055, 10057, 10059, 10061, 10063, 10065, |
| | | | | | | | 10067, 10069, 10071, 10073, 10075, 10077, 10079, 10081, |
| | | | | | | | 10083, 10085, 10087, 10089, 10091, 10093, 10095, 10097, |
| | | | | | | | 10099, 10101, 10103, 10105, 10107, 10109, 10111, 10113, |
| | | | | | | | 10115, 10117, 10119, 10121, 10123, 10125, 10127, 10129, |
| | | | | | | | 10131, 10133, 10135, 10137, 10139, 10141, 10143, 10145, |
| | | | | | | | 10147, 10149, 10151, 10153, 10155, 10157, 10159, 10161, |
| | | | | | | | 10163, 10165, 10167, 10169, 10171, 10173, 10175, 10177, |
| | | | | | | | 10179, 10181, 10183, 10185, 10187, 10189, 10191, 10193, |
| | | | | | | | 10195, 10197, 10199, 10201, 10203, 10205, 10207, 10209, |
| | | | | | | | 10211, 10213, 10215, 10217, 10219, 10221, 10223, 10225, |
| | | | | | | | 10227, 10229, 10231, 10233, 10235, 10237, 10239, 10241, |
| | | | | | | | 10243, 10245, 10247, 10249, 10251, 10253, 10255, 10257, |
| | | | | | | | 10259, 10261, 10263, 10265, 10267, 10269, 10271, 10273, |
| | | | | | | | 10275, 10277, 10279, 10281, 10283, 10285, 10287, 10289, |
| | | | | | | | 10291, 10293, 10295, 10297, 10299, 10301, 10303, 10305, |
| | | | | | | | 10307, 10309, 10311, 10313, 10315, 10317, 10319, 10321, |
| | | | | | | | 10323, 10325, 10327, 10329, 10331, 10333, 10335, 10337, |
| | | | | | | | 10339, 10341, 10343, 10345, 10347, 10349, 10351, 10353, |
| | | | | | | | 10355, 10357, 10359, 10361, 10363, 10365, 10367, 10369, |
| | | | | | | | 10371, 10373, 10375, 10377, 10379, 10381, 10383, 10385, |
| | | | | | | | 10387, 10389, 10391, 10393, 10395, 10397, 10399, 10401, |
| | | | | | | | 10403, 10405, 10407, 10409, 10411, 10413, 10415, 10417, |
| | | | | | | | 10419, 10421, 10423, 10425, 10427, 10429, 10431, 10433, |
| | | | | | | | 10435, 10437, 10439, 10441, 10443, 10445, 10447, 10449, |
| | | | | | | | 10451, 10453, 10455, 10457, 10459, 10461, 10463, 10465, |
| | | | | | | | 10467, 10469, 10471, 10473, 10475, 10477, 10479, 10481, |
| | | | | | | | 10483, 10485, 10487, 10489, 10491, 10493, 10495, 10497, |
| | | | | | | | 10499, 10501, 10503, 10505, 10507, 10509, 10511, 10513, |
| | | | | | | | 10515, 10517, 10519, 10521, 10523, 10525, 10527, 10529, |
| | | | | | | | 10531, 10533, 10535, 10537, 10539, 10541, 10543, 10545, |
| | | | | | | | 10547, 10549, 10551, 10553, 10555, 10557, 10559, 10561, |
| | | | | | | | 10563, 10565, 10567, 10569, 10571, 10573, 10575, 10577, |
| | | | | | | | 10579, 10581, 10583, 10585, 10587, 10589, 10591, 10593, |
| | | | | | | | 10595, 10597, 10599, 10601, 10603, 10605, 10607, 10609, |
| | | | | | | | 10611, 10613, 10615, 10617, 10619, 10621, 10623, 10625, |
| | | | | | | | 10627, 10629, 10631, 10633, 10635, 10637, 10639, 10641, |
| | | | | | | | 10643, 10645, 10647, 10649, 10651, 10653, 10655, 10657, |
| | | | | | | | 10659, 10661, 10663, 10665, 10667, 10669, 10671, 10673, |
| | | | | | | | 10675, 10677, 10679, 10681, 10683, 10685, 10687, 10689, |
| | | | | | | | 10691, 10693, 10695, 10697, 10699, 10701, 10703, 10705, |
| | | | | | | | 10707, 10709, 10711, 10713, 10715, 10717, 10719, 10721, |
| | | | | | | | 10723, 10725, 10727, 10729, 10731, 10733, 10735, 10737, |
| | | | | | | | 10739, 10741 |
| 1 | 36 | NUE_OEX3 | AT1G05100_truncated | A. th. | 10798 | cytoplasmic | 10800, 10802, 10804, 10806, 10808, 10810, 10812, 10814, |
| | | | | | | | 10816, 10818, 10820, 10822 |
| 1 | 37 | NUE_OEX3 | AT1G09450 | A. th. | 10838 | cytoplasmic | 10840, 10842, 10844, 10846, 10848, 10850, 10852, 10854, |
| | | | | | | | 10856, 10858, 10860, 10862 |
| 1 | 38 | NUE_OEX3 | AT1G44760 | A. th. | 10880 | cytoplasmic | 10882, 10884, 10886, 10888, 10890, 10892, 10894, 10896, |
| | | | | | | | 10898, 10900, 10902, 10904, 10906, 10908, 10910, 10912, |
| | | | | | | | 10914, 10916, 10918, 10920, 10922, 10924, 10926, 10928, |
| | | | | | | | 10930, 10932, 10934, 10936, 10938, 10940, 10942, 10944, |
| | | | | | | | 10946, 10948 |
| 1 | 39 | NUE_OEX3 | AT1G54050.1 | A. th. | 10965 | cytoplasmic | 10967, 10969, 10971, 10973, 10975, 10977, 10979, 10981, |
| | | | | | | | 10983, 10985, 10987, 10989, 10991, 10993, 10995, 10997, |
| | | | | | | | 10999, 11001, 11003, 11005, 11007, 11009, 11011, 11013, |
| | | | | | | | 11015, 11017, 11019, 11021, 11023, 11025, 11027, 11029, |
| | | | | | | | 11031, 11033, 11035, 11037, 11039, 11041, 11043, 11045, |
| | | | | | | | 11047, 11049, 11051, 11053, 11055, 11057, 11059, 11061, |
| | | | | | | | 11063, 11065, 11067, 11069, 11071, 11073, 11075, 11077, |
| | | | | | | | 11079, 11081, 11083, 11085, 11087, 11089, 11091, 11093, |
| | | | | | | | 11095, 11097, 11099, 11101, 11103, 11105, 11107, 11109, |
| | | | | | | | 11111, 11113, 11115, 11117, 11119, 11121, 11123, 11125, |
| | | | | | | | 11127, 11129, 11131, 11133, 11135, 11137, 11139, 11141, |
| | | | | | | | 11143, 11145, 11147, 11149, 11151, 11153, 11155, 11157, |
| | | | | | | | 11159, 11161, 11163, 11165, 11167, 11169, 11171, 11173, |
| | | | | | | | 11175, 11177, 11179, 11181, 11183, 11185, 11187, 11189, |
| | | | | | | | 11191, 11193, 11195, 11197, 11199, 11201, 11203, 11205, |
| | | | | | | | 11207, 11209, 11211, 11213, 11215, 11217, 11219, 11221, |
| | | | | | | | 11223, 11225, 11227, 11229, 11231, 11233, 11235, 11237, |
| | | | | | | | 11239, 11241, 11243, 11245, 11247, 11249, 11251, 11253, |
| | | | | | | | 11255, 11257, 11259, 11261, 11263, 11265, 11267, 11269, |
| | | | | | | | 11271, 11273, 11275, 11277, 11279, 11281, 11283, 11285, |
| | | | | | | | 11287, 11289, 11291, 11293, 11295, 11297, 11299, 11301 |
| 1 | 40 | NUE_OEX3 | AT2G27040 | A. th. | 11418 | cytoplasmic | 11420, 11422, 11424, 11426, 11428, 11430, 11432, 11434, |
| | | | | | | | 11436, 11438, 11440, 11442, 11444, 11446, 11448, 11450, |
| | | | | | | | 11452, 11454, 11456, 11458, 11460, 11462, 11464, 11466, |
| | | | | | | | 11468, 11470, 11472, 11474, 11476, 11478, 11480, 11482, |
| | | | | | | | 11484, 11486, 11488, 11490, 11492, 11494, 11496, 11498, |
| | | | | | | | 11500, 11502, 11504, 11506, 11508, 11510, 11512, 11514, |
| | | | | | | | 11516, 11518, 11520, 11522, 11524, 11526, 11528, 11530, |
| | | | | | | | 11532, 11534, 11536, 11538, 11540, 11542, 11544, 11546, |
| | | | | | | | 11548, 11550, 11552, 11554, 11556, 11558, 11560, 11562, |
| | | | | | | | 11564, 11566, 11568, 11570, 11572, 11574, 11576, 11578, |
| | | | | | | | 11580, 11582, 11584, 11586, 11588, 11590, 11592, 11594, |
| | | | | | | | 11596, 11598, 11600, 11602, 11604, 11606, 11608, 11610, |
| | | | | | | | 11612, 11614, 11616, 11618, 11620, 11622, 11624, 11626, |
| | | | | | | | 11628, 11630, 11632, 11634, 11636, 11638, 11640, 11642, |
| | | | | | | | 11644, 11646, 11648, 11650, 11652, 11654, 11656, 11658, |
| | | | | | | | 11660, 11662, 11664, 11666, 11668, 11670, 11672, 11674, |
| | | | | | | | 11676, 11678, 11680, 11682, 11684, 11686, 11688, 11690, |
| | | | | | | | 11692, 11694, 11696, 11698, 11700, 11702, 11704, 11706, |
| | | | | | | | 11708, 11710, 11712, 11714, 11716, 11718, 11720, 11722, |
| | | | | | | | 11724, 11726, 11728, 11730 |
| 1 | 41 | NUE_OEX3 | AT2G29490 | A. th. | 11752 | cytoplasmic | 11754, 11756, 11758, 11760, 11762, 11764, 11766, 11768, |
| | | | | | | | 11770, 11772, 11774, 11776, 11778, 11780, 11782, 11784, |
| | | | | | | | 11786, 11788, 11790, 11792, 11794, 11796, 11798, 11800, |
| | | | | | | | 11802, 11804, 11806, 11808, 11810, 11812, 11814, 11816, |
| | | | | | | | 11818, 11820, 11822, 11824, 11826, 11828, 11830, 11832, |
| | | | | | | | 11834, 11836, 11838, 11840, 11842, 11844, 11846, 11848, |
| | | | | | | | 11850, 11852, 11854, 11856, 11858, 11860, 11862, 11864, |
| | | | | | | | 11866, 11868, 11870, 11872, 11874, 11876, 11878, 11880, |
| | | | | | | | 11882, 11884, 11886, 11888, 11890, 11892, 11894, 11896, |
| | | | | | | | 11898, 11900, 11902, 11904, 11906, 11908, 11910, 11912, |
| | | | | | | | 11914, 11916, 11918, 11920, 11922, 11924, 11926, 11928, |
| | | | | | | | 11930, 11932, 11934, 11936, 11938, 11940, 11942, 11944, |
| | | | | | | | 11946, 11948, 11950, 11952, 11954, 11956, 11958, 11960, |
| | | | | | | | 11962, 11964, 11966, 11968, 11970, 11972, 11974, 11976, |
| | | | | | | | 11978, 11980, 11982, 11984, 11986, 11988, 11990, 11992, |
| | | | | | | | 11994, 11996, 11998, 12000, 12002, 12004, 12006, 12008, |
| | | | | | | | 12010, 12012, 12014, 12016, 12018, 12020, 12022, 12024, |
| | | | | | | | 12026, 12028, 12030, 12032, 12034, 12036, 12038, 12040, |
| | | | | | | | 12042, 12044, 12046, 12048, 12050, 12052, 12054, 12056, |
| | | | | | | | 12058, 12060, 12062, 12064, 12066, 12068, 12070, 12072, |
| | | | | | | | 12074, 12076, 12078, 12080, 12082, 12084, 12086, 12088, |
| | | | | | | | 12090, 12092, 12094, 12096, 12098, 12100, 12102, 12104, |
| | | | | | | | 12106, 12108, 12110, 12112, 12114, 12116, 12118, 12120, |
| | | | | | | | 12122, 12124, 12126, 12128, 12130, 12132 |
| 1 | 42 | NUE_OEX3 | AT2G35300 | A. th. | 12196 | cytoplasmic | 12198, 12200, 12202, 12204, 12206, 12208, 12210, 12212, |
| | | | | | | | 12214, 12216, 12218, 12220, 12222, 12224, 12226, 12228, |
| | | | | | | | 12230, 12232, 12234, 12236, 12238, 12240, 12242, 12244, |
| | | | | | | | 12246, 12248, 12250, 12252, 12254, 12256, 12258, 12260, |
| | | | | | | | 12262, 12264, 12266, 12268, 12270, 12272, 12274, 12276, |
| | | | | | | | 12278, 12280, 12282, 12284, 12286, 12288, 12290, 12292, |
| | | | | | | | 12294, 12296, 12298, 12300, 12302 |
| 1 | 43 | NUE_OEX3 | AT2G35930 | A. th. | 12316 | cytoplasmic | 12318, 12320, 12322, 12324, 12326, 12328, 12330, 12332, |
| | | | | | | | 12334, 12336, 12338, 12340, 12342, 12344, 12346, 12348, |
| | | | | | | | 12350, 12352, 12354, 12356, 12358, 12360, 12362, 12364, |
| | | | | | | | 12366, 12368, 12370, 12372, 12374, 12376, 12378, 12380, |
| | | | | | | | 12382, 12384, 12386, 12388, 12390, 12392, 12394, 12396, |
| | | | | | | | 12398, 12400, 12402, 12404, 12406, 12408, 12410, 12412, |
| | | | | | | | 12414, 12416, 12418, 12420, 12422, 12424, 12426, 12428, |
| | | | | | | | 12430, 12432, 12434, 12436, 12438, 12440, 12442, 12444, |
| | | | | | | | 12446, 12448, 12450, 12452, 12454, 12456, 12458, 12460, |
| | | | | | | | 12462, 12464, 12466, 12468, 12470, 12472, 12474, 12476, |
| | | | | | | | 12478, 12480, 12482, 12484, 12486, 12488, 12490, 12492, |
| | | | | | | | 12494, 12496, 12498, 12500, 12502, 12504, 12506, 12508, |
| | | | | | | | 12510, 12512, 12514, 12516, 12518, 12520, 12522, 12524, |
| | | | | | | | 12526, 12528, 12530, 12532, 12534, 12536, 12538, 12540, |
| | | | | | | | 12542, 12544, 12546, 12548, 12550, 12552, 12554, 12556 |
| 1 | 44 | NUE_OEX3 | AT3G04620 | A. th. | 12573 | cytoplasmic | 12575, 12577, 12579, 12581, 12583, 12585, 12587, 12589, |
| | | | | | | | 12591, 12593, 12595, 12597, 12599, 12601, 12603, 12605, |
| | | | | | | | 12607, 12609, 12611, 12613, 12615, 12617, 12619, 12621, |
| | | | | | | | 12623, 12625, 12627, 12629, 12631, 12633, 12635, 12637, |
| | | | | | | | 12639, 12641, 12643 |
| 1 | 45 | NUE_OEX3 | AT3G20960 | A. th. | 12668 | cytoplasmic | 12670, 12672, 12674, 12676, 12678, 12680, 12682, 12684, |
| | | | | | | | 12686, 12688, 12690, 12692, 12694, 12696, 12698, 12700, |
| | | | | | | | 12702, 12704, 12706, 12708, 12710, 12712, 12714, 12716, |
| | | | | | | | 12718, 12720, 12722, 12724, 12726, 12728, 12730, 12732, |
| | | | | | | | 12734, 12736, 12738, 12740, 12742, 12744, 12746, 12748, |
| | | | | | | | 12750, 12752, 12754, 12756, 12758, 12760, 12762, 12764, |
| | | | | | | | 12766, 12768, 12770, 12772, 12774, 12776, 12778, 12780, |
| | | | | | | | 12782, 12784, 12786, 12788, 12790, 12792, 12794, 12796, |
| | | | | | | | 12798, 12800, 12802, 12804, 12806, 12808, 12810, 12812, |
| | | | | | | | 12814, 12816, 12818, 12820, 12822, 12824, 12826, 12828, |
| | | | | | | | 12830, 12832, 12834, 12836, 12838, 12840, 12842, 12844, |
| | | | | | | | 12846, 12848, 12850, 12852, 12854, 12856, 12858, 12860, |
| | | | | | | | 12862, 12864, 12866, 12868, 12870, 12872, 12874, 12876, |
| | | | | | | | 12878, 12880, 12882, 12884, 12886, 12888, 12890, 12892, |
| | | | | | | | 12894, 12896, 12898, 12900, 12902, 12904, 12906, 12908, |
| | | | | | | | 12910, 12912, 12914, 12916, 12918, 12920, 12922, 12924, |
| | | | | | | | 12926, 12928, 12930, 12932, 12934, 12936 |
| 1 | 46 | NUE_OEX3 | AT3G61580.1 | A. th. | 13131 | cytoplasmic | 13133, 13135, 13137, 13139, 13141, 13143, 13145, 13147, |
| | | | | | | | 13149, 13151, 13153, 13155, 13157, 13159, 13161, 13163, |
| | | | | | | | 13165, 13167, 13169, 13171, 13173, 13175, 13177, 13179, |
| | | | | | | | 13181, 13183, 13185, 13187, 13189, 13191, 13193, 13195, |
| | | | | | | | 13197, 13199, 13201, 13203, 13205, 13207, 13209, 13211, |
| | | | | | | | 13213, 13215, 13217, 13219, 13221 |
| 1 | 47 | NUE_OEX3 | AT5G13220 | A. th. | 13276 | cytoplasmic | 13278, 13280, 13282, 13284, 13286, 13288, 13290, 13292, |
| | | | | | | | 13294, 13296, 13298 |
| 1 | 48 | NUE_OEX3 | CDS5394 | P. trichocarpa | 13436 | cytoplasmic | 13438, 13440, 13442, 13444, 13446, 13448, 13450, 13452, |
| | | | | | | | 13454, 13456, 13458, 13460, 13462 |
| 1 | 49 | NUE_OEX3 | CDS5401_truncated | P. trichocarpa | 13477 | cytoplasmic | 13479, 13481, 13483, 13485, 13487, 13489, 13491 |
| 1 | 50 | NUE_OEX3 | ZM06LC319_CORN_LOFI_151_2385_A | Zea | 13551 | cytoplasmic | 13553, 13555, 13557, 13559, 13561, 13563, 13565, 13567, |
| | | | | mays | | | 13569, 13571, 13573, 13575, 13577, 13579, 13581, 13583, |
| | | | | | | | 13585, 13587, 13589, 13591, 13593, 13595, 13597, 13599, |
| | | | | | | | 13601, 13603, 13605, 13607, 13609, 13611, 13613, 13615, |
| | | | | | | | 13617, 13619, 13621, 13623, 13625, 13627, 13629, 13631, |
| | | | | | | | 13633, 13635, 13637, 13639, 13641, 13643, 13645, 13647, |
| | | | | | | | 13649, 13651, 13653, 13655, 13657, 13659, 13661, 13663, |
| | | | | | | | 13665, 13667, 13669, 13671, 13673, 13675, 13677, 13679, |
| | | | | | | | 13681, 13683, 13685, 13687, 13689, 13691, 13693, 13695, |
| | | | | | | | 13697, 13699, 13701, 13703, 13705, 13707, 13709, 13711, |
| | | | | | | | 13713, 13715, 13717, 13719, 13721, 13723, 13725, 13727, |
| | | | | | | | 13729, 13731, 13733, 13735, 13737, 13739, 13741, 13743, |
| | | | | | | | 13745, 13747, 13749, 13751, 13753, 13755, 13757, 13759, |
| | | | | | | | 13761, 13763, 13765, 13767, 13769, 13771, 13773, 13775, |
| | | | | | | | 13777, 13779, 13781, 13783, 13785, 13787, 13789, 13791, |
| | | | | | | | 13793, 13795, 13797, 13799, 13801, 13803, 13805, 13807, |
| | | | | | | | 13809, 13811, 13813, 13815, 13817, 13819, 13821, 13823, |
| | | | | | | | 13825, 13827, 13829, 13831, 13833, 13835, 13837, 13839, |
| | | | | | | | 13841, 13843, 13845, 13847, 13849, 13851, 13853, 13855, |
| | | | | | | | 13857, 13859, 13861, 13863, 13865, 13867, 13869, 13871, |
| | | | | | | | 13873, 13875, 13877, 13879, 13881, 13883, 13885, 13887, |
| | | | | | | | 13889, 13891, 13893, 13895 |
| 1 | 51 | NUE_OEX3 | AT4G15420.1 | A. th. | 13245 | cytoplasmic | 13247, 13249, 13251, 13253, 13255, 13257, 13259, 13261, |
| | | | | | | | 13263 |
| 1 | 52 | NUE_OEX3 | 60952769.R01.1 | Zea | 10753 | cytoplasmic | 10755, 10757, 10759, 10761, 10763, 10765, 10767, 10769, |
| | | | | mays. | | | 10771, 10773, 10775, 10777, 10779, 10781 |
| 1 | 53 | NUE_OEX3 | AT5G42380 | A. th. | 13309 | cytoplasmic | 13311, 13313, 13315, 13317, 13319, 13321, 13323, 13325, |
| | | | | | | | 13327, 13329, 13331, 13333, 13335, 13337, 13339, 13341, |
| | | | | | | | 13343, 13345, 13347, 13349, 13351, 13353, 13355, 13357, |
| | | | | | | | 13359, 13361, 13363, 13365, 13367, 13369, 13371, 13373, |
| | | | | | | | 13375 |
| 1 | 54 | NUE_OEX3 | 57972199.R01.1 | Zea | 10749 | cytoplasmic | — |
| | | | | mays | | | |
| 1 | 55 | NUE_OEX3 | OS02G44730 | O. sativa | 13501 | cytoplasmic | 13503, 13505, 13507, 13509, 13511, 13513, 13515, 13517, |
| | | | | | | | 13519, 13521, 13523, 13525, 13527, 13529, 13531, 13533, |
| | | | | | | | 13535, 13537, 13539 |
| 1 | 56 | NUE_OEX3 | AT3G24515 | A. th. | 13102 | cytoplasmic | 13104, 13106, 13108, 13110, 13112, 13114 |

TABLE IB
Nucleic acid sequence ID numbers

| | 1. | 2. | 3. | 4. | 5. | 6. | 7. |
|---|---|---|---|---|---|---|---|
| Application | Hit | Project | Locus | Organism | Lead SEQ ID | Target | SEQ IDs of Nucleic Acid Homologs |
| 1 | 1 | NUE_OEX3 | AT1G06620_modified | A. th. | 63 | cytoplasmic | 313, 315, 317, 319, 321, 323, 325, 327, 329, 331, 333, 335, 337, |
| | | | | | | | 339, 341, 343, 345, 347, 349, 351, 353, 355, 357, 359, 361, 363, |
| | | | | | | | 365, 367, 369, 371, 373, 375 |
| 1 | 2 | NUE_OEX3 | AT1G06680.1 | A. th. | 384 | cytoplasmic | 474, 476, 478, 480, 482, 484, 486, 488, 490, 492 |
| 1 | 3 | NUE_OEX3 | AT1G14130.1 | A. th. | 504 | cytoplasmic | 546, 548, 550, 552, 554, 556, 558, 560, 562, 564, 566, 568, 570, |
| | | | | | | | 572, 574, 576, 578, 580, 582, 584, 586, 588, 590, 592, 594, 596, |
| | | | | | | | 598, 600 |
| 1 | 4 | NUE_OEX3 | AT1G20810.1_modified | A. th. | 607 | cytoplasmic | 625, 627, 629, 631 |
| 1 | 5 | NUE_OEX3 | AT1G53885 | A. th. | 641 | cytoplasmic | 659, 661, 663, 665 |
| 1 | 6 | NUE_OEX3 | At2G38730.1 | A. th. | 672 | cytoplasmic | 1378, 1380, 1382, 1384, 1386, 1388, 1390, 1392, 1394, 1396, |
| | | | | | | | 1398, 1400, 1402, 1404, 1406, 1408, 1410, 1412, 1414, 1416, |
| | | | | | | | 1418, 1420, 1422, 1424, 1426, 1428, 1430, 1432, 1434, 1436, |
| | | | | | | | 1438, 1440, 1442, 1444, 1446, 1448, 1450, 1452, 1454, 1456, |
| | | | | | | | 1458, 1460, 1462, 1464, 1466, 1468, 1470, 1472, 1474, 1476, |
| | | | | | | | 1478, 1480, 1482, 1484, 1486, 1488, 1490, 1492, 1494, 1496, |
| | | | | | | | 1498, 1500, 1502, 1504, 1506, 1508, 1510, 1512, 1514, 1516, |
| | | | | | | | 1518, 1520, 1522, 1524, 1526, 1528, 1530, 1532, 1534, 1536, |
| | | | | | | | 1538, 1540, 1542 |
| 1 | 7 | NUE_OEX3 | AT3G01150.1_truncated | A. th. | 1551 | cytoplasmic | 1619, 1621 |
| 1 | 8 | NUE_OEX3 | AT5G47440_modified | A. th. | 1628 | cytoplasmic | 1690, 1692, 1694, 1696, 1698, 1700 |
| 1 | 9 | NUE_OEX3 | B1208 | E. coli | 1709 | plastidic | 2219 |
| 1 | 10 | NUE_OEX3 | B4214 | E. coli | 2226 | plastidic | 2446, 2448, 2450 |
| 1 | 11 | NUE_OEX3 | CDS5293_modified | P. trichocarpa | 2457 | cytoplasmic | 3409, 3411, 3413, 3415, 3417, 3419, 3421, 3423, 3425, 3427, |
| | | | | | | | 3429, 3431, 3433, 3435, 3437, 3439, 3441, 3443, 3445, 3447, |
| | | | | | | | 3449, 3451, 3453, 3455 |
| 1 | 12 | NUE_OEX3 | CDS5305 | P. trichocarpa | 3463 | cytoplasmic | 3757, 3759, 3761, 3763, 3765, 3767, 3769, 3771, 3773, 3775, |
| | | | | | | | 3777, 3779, 3781, 3783, 3785 |
| 1 | 13 | NUE_OEX3 | CDS5397 | P. trichocarpa | 3794 | cytoplasmic | 4578, 4580, 4582, 4584, 4586, 4588, 4590, 4592, 4594, 4596, |
| | | | | | | | 4598, 4600, 4602, 4604, 4606, 4608, 4610, 4612, 4614, 4616 |
| 1 | 14 | NUE_OEX3 | TTC1186 | T. thermophilus | 4630 | cytoplasmic | — |
| 1 | 15 | NUE_OEX3 | YKL124W | S. cerevisiae | 5042 | cytoplasmic | — |
| 1 | 16 | NUE_OEX3 | YNL093W | S. cerevisiae | 5069 | cytoplasmic | 5249, 5251, 5253, 5255, 5257, 5259, 5261, 5263, 5265, 5267, |
| | | | | | | | 5269, 5271, 5273, 5275, 5277, 5279, 5281, 5283, 5285, 5287, |
| | | | | | | | 5289, 5291, 5293, 5295, 5297, 5299, 5301, 5303, 5305, 5307, |
| | | | | | | | 5309, 5311, 5313, 5315, 5317, 5319, 5321, 5323, 5325, 5327, |
| | | | | | | | 5329, 5331, 5333, 5335, 5337, 5339, 5341, 5343, 5345, 5347, |
| | | | | | | | 5349, 5351, 5353, 5355, 5357, 5359, 5361, 5363, 5365, 5367, |
| | | | | | | | 5369, 5371, 5373, 5375, 5377, 5379, 5381, 5383, 5385, 5387, |
| | | | | | | | 5389, 5391, 5393, 5395, 5397, 5399, 5401, 5403, 5405, 5407, |
| | | | | | | | 5409, 5411, 5413, 5415, 5417, 5419, 5421, 5423, 5425, 5427, |
| | | | | | | | 5429, 5431, 5433, 5435, 5437, 5439, 5441, 5443, 5445, 5447, |
| | | | | | | | 5449, 5451, 5453, 5455, 5457, 5459, 5461, 5463, 5465, 5467, |
| | | | | | | | 5469, 5471, 5473, 5475, 5477, 5479, 5481, 5483, 5485 |
| 1 | 17 | NUE_OEX3 | ZM_7266_BQ538406_CORN_LOFI_344_730_B | Zea | 5492 | cytoplasmic | 5708, 5710, 5712, 5714, 5716, 5718, 5720, 5722, 5724, 5726, |
| | | | | mays | | | 5728, 5730, 5732, 5734, 5736, 5738, 5740, 5742, 5744, 5746, |
| | | | | | | | 5748, 5750, 5752, 5754, 5756, 5758, 5760, 5762, 5764, 5766, |
| | | | | | | | 5768, 5770, 5772, 5774, 5776, 5778, 5780, 5782, 5784, 5786, |
| | | | | | | | 5788, 5790, 5792, 5794, 5796, 5798, 5800, 5802, 5804, 5806, |
| | | | | | | | 5808, 5810, 5812, 5814, 5816, 5818, 5820, 5822, 5824, 5826, |
| | | | | | | | 5828, 5830, 5832 |
| 1 | 18 | NUE_OEX3 | At1G29250.1 | A. th. | 5838 | cytoplasmic | 5942, 5944, 5946, 5948, 5950, 5952, 5954, 5956, 5958, 5960, |
| | | | | | | | 5962, 5964, 5966, 5968, 5970, 5972, 5974 |
| 1 | 19 | NUE_OEX3 | AT1G55920.1 | A. th. | 5982 | cytoplasmic | 6464, 6466, 6468, 6470, 6472, 6474, 6476, 6478, 6480, 6482 |
| 1 | 20 | NUE_OEX3 | AT3G09480 | A. th. | 6494 | cytoplasmic | 7216, 7218, 7220, 7222, 7224, 7226, 7228, 7230, 7232, 7234, |
| | | | | | | | 7236, 7238, 7240, 7242, 7244, 7246, 7248, 7250, 7252, 7254, |
| | | | | | | | 7256, 7258, 7260, 7262, 7264, 7266, 7268, 7270, 7272, 7274, |
| | | | | | | | 7276, 7278, 7280, 7282, 7284, 7286, 7288, 7290, 7292, 7294, |
| | | | | | | | 7296, 7298, 7300, 7302, 7304, 7306, 7308, 7310, 7312, 7314, |
| | | | | | | | 7316, 7318, 7320, 7322, 7324, 7326, 7328, 7330, 7332, 7334, |
| | | | | | | | 7336, 7338, 7340, 7342, 7344, 7346, 7348, 7350, 7352, 7354, |
| | | | | | | | 7356 |
| 1 | 21 | NUE_OEX3 | AT4G01870 | A. th. | 7364 | cytoplasmic | 7416 |
| 1 | 22 | NUE_OEX3 | AT4G11890 | A. th. | 7434 | cytoplasmic | 7476, 7478, 7480, 7482, 7484, 7486, 7488, 7490, 7492, 7494, |
| | | | | | | | 7496, 7498, 7500, 7502, 7504 |
| 1 | 23 | NUE_OEX3 | AT5G07310 | A. th. | 7513 | cytoplasmic | 7533, 7535, 7537 |
| 1 | 24 | NUE_OEX3 | CDS5422 | P. trichocarpa | 7545 | cytoplasmic | 7695, 7697, 7699, 7701, 7703, 7705, 7707, 7709 |
| 1 | 25 | NUE_OEX3 | AT1G03905.1 | A. th. | 7721 | cytoplasmic | 7837, 7839, 7841, 7843, 7845, 7847, 7849, 7851, 7853, 7855 |
| 1 | 26 | NUE_OEX3 | AT4G22240.1 | A. th. | 8287 | cytoplasmic | 8381, 8383, 8385, 8387, 8389, 8391, 8393, 8395, 8397, 8399 |
| 1 | 27 | NUE_OEX3 | AT1G09350.1 | A. th. | 7864 | cytoplasmic | 8028, 8030, 8032, 8034, 8036, 8038, 8040, 8042, 8044, 8046, |
| | | | | | | | 8048, 8050, 8052 |
| 1 | 28 | NUE_OEX3 | AT1G30135.1 | A. th. | 8064 | cytoplasmic | 8094, 8096 |
| 1 | 29 | NUE_OEX3 | AT1G35680.1 | A. th. | 8104 | cytoplasmic | 8136, 8138, 8140, 8142, 8144, 8146 |
| 1 | 30 | NUE_OEX3 | AT2G42540.1 | A. th. | 8152 | cytoplasmic | 8198 |
| 1 | 31 | NUE_OEX3 | AT3G02990.1 | A. th. | 8206 | cytoplasmic | 8268, 8270, 8272, 8274, 8276 |
| 1 | 32 | NUE_OEX3 | At5g37670.1 | A. th. | 8408 | cytoplasmic | 8702, 8704, 8706, 8708, 8710, 8712, 8714, 8716, 8718, 8720, |
| | | | | | | | 8722, 8724, 8726, 8728, 8730, 8732, 8734, 8736, 8738, 8740, |
| | | | | | | | 8742, 8744, 8746, 8748, 8750, 8752, 8754, 8756, 8758, 8760, |
| | | | | | | | 8762, 8764, 8766, 8768, 8770, 8772, 8774, 8776, 8778, 8780, |
| | | | | | | | 8782, 8784, 8786, 8788, 8790, 8792, 8794, 8796, 8798, 8800, |
| | | | | | | | 8802, 8804, 8806, 8808, 8810, 8812, 8814, 8816, 8818, 8820, |
| | | | | | | | 8822, 8824, 8826, 8828, 8830, 8832, 8834, 8836 |
| 1 | 33 | NUE_OEX3 | CDS5376 | P. trichocarpa | 8842 | cytoplasmic | 9786, 9788, 9790, 9792, 9794, 9796, 9798, 9800, 9802, 9804, |
| | | | | | | | 9806, 9808, 9810, 9812, 9814, 9816, 9818, 9820, 9822, 9824, |
| | | | | | | | 9826, 9828, 9830, 9832, 9834, 9836, 9838, 9840 |
| 1 | 34 | NUE_OEX3 | LOC_Os02g13560.1 | O. sativa | 9854 | cytoplasmic | 9960, 9962 |
| 1 | 35 | NUE_OEX3 | YCR024C | S. cerevisiae | 9981 | cytoplasmic | 10743 |
| 1 | 36 | NUE_OEX3 | AT1G05100_truncated | A. th. | 10798 | cytoplasmic | 10824, 10826, 10828 |
| 1 | 37 | NUE_OEX3 | AT1G09450 | A. th. | 10838 | cytoplasmic | — |
| 1 | 38 | NUE_OEX3 | AT1G44760 | A. th. | 10880 | cytoplasmic | 10950, 10952, 10954, 10956 |
| 1 | 39 | NUE_OEX3 | AT1G54050.1 | A. th. | 10965 | cytoplasmic | 11303, 11305, 11307, 11309, 11311, 11313, 11315, 11317, |
| | | | | | | | 11319, 11321, 11323, 11325, 11327, 11329, 11331, 11333, |
| | | | | | | | 11335, 11337, 11339, 11341, 11343, 11345, 11347, 11349, |
| | | | | | | | 11351, 11353, 11355, 11357, 11359, 11361, 11363, 11365, |
| | | | | | | | 11367, 11369, 11371, 11373, 11375, 11377, 11379, 11381, |
| | | | | | | | 11383, 11385, 11387, 11389, 11391, 11393, 11395, 11397, |
| | | | | | | | 11399, 11401, 11403, 11405, 11407, 11409, 11411 |
| 1 | 40 | NUE_OEX3 | AT2G27040 | A. th. | 11418 | cytoplasmic | 11732, 11734, 11736, 11738 |
| 1 | 41 | NUE_OEX3 | AT2G29490 | A. th. | 11752 | cytoplasmic | 12134, 12136, 12138, 12140, 12142, 12144, 12146, 12148, |
| | | | | | | | 12150, 12152, 12154, 12156, 12158, 12160, 12162, 12164, |
| | | | | | | | 12166, 12168, 12170, 12172, 12174, 12176, 12178, 12180, |
| | | | | | | | 12182, 12184, 12186, 12188 |
| 1 | 42 | NUE_OEX3 | AT2G35300 | A. th. | 12196 | cytoplasmic | 12304, 12306, 12308, 12310 |
| 1 | 43 | NUE_OEX3 | AT2G35930 | A. th. | 12316 | cytoplasmic | 12558, 12560, 12562, 12564, 12566 |
| 1 | 44 | NUE_OEX3 | AT3G04620 | A. th. | 12573 | cytoplasmic | 12645, 12647, 12649, 12651, 12653, 12655, 12657, 12659, |
| | | | | | | | 12661 |
| 1 | 45 | NUE_OEX3 | AT3G20960 | A. th. | 12668 | cytoplasmic | 12938, 12940, 12942, 12944, 12946, 12948, 12950, 12952, |
| | | | | | | | 12954, 12956, 12958, 12960, 12962, 12964, 12966, 12968, |
| | | | | | | | 12970, 12972, 12974, 12976, 12978, 12980, 12982, 12984, |
| | | | | | | | 12986, 12988, 12990, 12992, 12994, 12996, 12998, 13000, |
| | | | | | | | 13002, 13004, 13006, 13008, 13010, 13012, 13014, 13016, |
| | | | | | | | 13018, 13020, 13022, 13024, 13026, 13028, 13030, 13032, |
| | | | | | | | 13034, 13036, 13038, 13040, 13042, 13044, 13046, 13048, |
| | | | | | | | 13050, 13052, 13054, 13056, 13058, 13060, 13062, 13064, |
| | | | | | | | 13066, 13068, 13070, 13072, 13074, 13076, 13078, 13080, |
| | | | | | | | 13082, 13084, 13086, 13088, 13090, 13092, 13094, 13096 |
| 1 | 46 | NUE_OEX3 | AT3G61580.1 | A. th. | 13131 | cytoplasmic | 13223, 13225, 13227, 13229 |
| 1 | 47 | NUE_OEX3 | AT5G13220 | A. th. | 13276 | cytoplasmic | 13300, 13302 |
| 1 | 48 | NUE_OEX3 | CDS5394 | P. trichocarpa | 13436 | cytoplasmic | 13464 |
| 1 | 49 | NUE_OEX3 | CDS5401_truncated | P. trichocarpa | 13477 | cytoplasmic | — |
| 1 | 50 | NUE_OEX3 | ZM06LC319_CORN_LOFI_151_2385_A | Zea | 13551 | cytoplasmic | 13897, 13899, 13901, 13903, 13905, 13907, 13909, 13911, |
| | | | | mays | | | 13913, 13915, 13917, 13919, 13921, 13923 |
| 1 | 51 | NUE_OEX3 | AT4G15420.1 | A. th. | 13245 | cytoplasmic | 13265, 13267 |
| 1 | 52 | NUE_OEX3 | 60952769.R01.1 | Zea | 10753 | cytoplasmic | 10783, 10785, 10787 |
| | | | | mays. | | | |
| 1 | 53 | NUE_OEX3 | AT5G42380 | A. th. | 13309 | cytoplasmic | 13377, 13379, 13381, 13383, 13385, 13387, 13389, 13391, |
| | | | | | | | 13393, 13395, 13397, 13399, 13401, 13403, 13405, 13407, |
| | | | | | | | 13409, 13411, 13413, 13415, 13417, 13419, 13421, 13423, |
| | | | | | | | 13425, 13427, 13429 |
| 1 | 54 | NUE_OEX3 | 57972199.R01.1 | Zea | 10749 | cytoplasmic | — |
| | | | | mays | | | |
| 1 | 55 | NUE_OEX3 | OS02G44730 | O. sativa | 13501 | cytoplasmic | 13541, 13543 |
| 1 | 56 | NUE_OEX3 | AT3G24515 | A. th. | 13102 | cytoplasmic | — |

TABLE IIA
Amino acid sequence ID numbers

| | 1. | 2. | 3. | 4. | 5. | 6. | 7. |
|---|---|---|---|---|---|---|---|
| Application | Hit | Project | Locus | Organism | Lead SEQ ID | Target | SEQ IDs of Polypeptide Homologs |
| 1 | 1 | NUE_OEX3 | AT1G06620_modified | A. th. | 64 | cytoplasmic | 66, 68, 70, 72, 74, 76, 78, 80, 82, 84, 86, 88, 90, 92, 94, 96, 98, |
| | | | | | | | 100, 102, 104, 106, 108, 110, 112, 114, 116, 118, 120, 122, 124, |
| | | | | | | | 126, 128, 130, 132, 134, 136, 138, 140, 142, 144, 146, 148, 150, |
| | | | | | | | 152, 154, 156, 158, 160, 162, 164, 166, 168, 170, 172, 174, 176, |
| | | | | | | | 178, 180, 182, 184, 186, 188, 190, 192, 194, 196, 198, 200, 202, |
| | | | | | | | 204, 206, 208, 210, 212, 214, 216, 218, 220, 222, 224, 226, 228, |
| | | | | | | | 230, 232, 234, 236, 238, 240, 242, 244, 246, 248, 250, 252, 254, |
| | | | | | | | 256, 258, 260, 262, 264, 266, 268, 270, 272, 274, 276, 278, 280, |
| | | | | | | | 282, 284, 286, 288, 290, 292, 294, 296, 298, 300, 302, 304, 306, |
| | | | | | | | 308, 310, 312 |
| 1 | 2 | NUE_OEX3 | AT1G06680.1 | A. th. | 385 | cytoplasmic | 387, 389, 391, 393, 395, 397, 399, 401, 403, 405, 407, 409, 411, |
| | | | | | | | 413, 415, 417, 419, 421, 423, 425, 427, 429, 431, 433, 435, 437, |
| | | | | | | | 439, 441, 443, 445, 447, 449, 451, 453, 455, 457, 459, 461, 463, |
| | | | | | | | 465, 467, 469, 471, 473 |
| 1 | 3 | NUE_OEX3 | AT1G14130.1 | A. th. | 505 | cytoplasmic | 507, 509, 511, 513, 515, 517, 519, 521, 523, 525, 527, 529, 531, |
| | | | | | | | 533, 535, 537, 539, 541, 543, 545 |
| 1 | 4 | NUE_OEX3 | AT1G20810.1_modified | A. th. | 608 | cytoplasmic | 610, 612, 614, 616, 618, 620, 622, 624 |
| 1 | 5 | NUE_OEX3 | AT1G53885 | A. th. | 642 | cytoplasmic | 644, 646, 648, 650, 652, 654, 656, 658 |
| 1 | 6 | NUE_OEX3 | At2G38730.1 | A. th. | 673 | cytoplasmic | 675, 677, 679, 681, 683, 685, 687, 689, 691, 693, 695, 697, 699, |
| | | | | | | | 701, 703, 705, 707, 709, 711, 713, 715, 717, 719, 721, 723, 725, |
| | | | | | | | 727, 729, 731, 733, 735, 737, 739, 741, 743, 745, 747, 749, 751, |
| | | | | | | | 753, 755, 757, 759, 761, 763, 765, 767, 769, 771, 773, 775, 777, |
| | | | | | | | 779, 781, 783, 785, 787, 789, 791, 793, 795, 797, 799, 801, 803, |
| | | | | | | | 805, 807, 809, 811, 813, 815, 817, 819, 821, 823, 825, 827, 829, |
| | | | | | | | 831, 833, 835, 837, 839, 841, 843, 845, 847, 849, 851, 853, 855, |
| | | | | | | | 857, 859, 861, 863, 865, 867, 869, 871, 873, 875, 877, 879, 881, |
| | | | | | | | 883, 885, 887, 889, 891, 893, 895, 897, 899, 901, 903, 905, 907, |
| | | | | | | | 909, 911, 913, 915, 917, 919, 921, 923, 925, 927, 929, 931, 933, |
| | | | | | | | 935, 937, 939, 941, 943, 945, 947, 949, 951, 953, 955, 957, 959, |
| | | | | | | | 961, 963, 965, 967, 969, 971, 973, 975, 977, 979, 981, 983, 985, |
| | | | | | | | 987, 989, 991, 993, 995, 997, 999, 1001, 1003, 1005, 1007, |
| | | | | | | | 1009, 1011, 1013, 1015, 1017, 1019, 1021, 1023, 1025, 1027, |
| | | | | | | | 1029, 1031, 1033, 1035, 1037, 1039, 1041, 1043, 1045, 1047, |
| | | | | | | | 1049, 1051, 1053, 1055, 1057, 1059, 1061, 1063, 1065, 1067, |
| | | | | | | | 1069, 1071, 1073, 1075, 1077, 1079, 1081, 1083, 1085, 1087, |
| | | | | | | | 1089, 1091, 1093, 1095, 1097, 1099, 1101, 1103, 1105, 1107, |
| | | | | | | | 1109, 1111, 1113, 1115, 1117, 1119, 1121, 1123, 1125, 1127, |
| | | | | | | | 1129, 1131, 1133, 1135, 1137, 1139, 1141, 1143, 1145, 1147, |
| | | | | | | | 1149, 1151, 1153, 1155, 1157, 1159, 1161, 1163, 1165, 1167, |
| | | | | | | | 1169, 1171, 1173, 1175, 1177, 1179, 1181, 1183, 1185, 1187, |
| | | | | | | | 1189, 1191, 1193, 1195, 1197, 1199, 1201, 1203, 1205, 1207, |
| | | | | | | | 1209, 1211, 1213, 1215, 1217, 1219, 1221, 1223, 1225, 1227, |
| | | | | | | | 1229, 1231, 1233, 1235, 1237, 1239, 1241, 1243, 1245, 1247, |
| | | | | | | | 1249, 1251, 1253, 1255, 1257, 1259, 1261, 1263, 1265, 1267, |
| | | | | | | | 1269, 1271, 1273, 1275, 1277, 1279, 1281, 1283, 1285, 1287, |
| | | | | | | | 1289, 1291, 1293, 1295, 1297, 1299, 1301, 1303, 1305, 1307, |
| | | | | | | | 1309, 1311, 1313, 1315, 1317, 1319, 1321, 1323, 1325, 1327, |
| | | | | | | | 1329, 1331, 1333, 1335, 1337, 1339, 1341, 1343, 1345, 1347, |
| | | | | | | | 1349, 1351, 1353, 1355, 1357, 1359, 1361, 1363, 1365, 1367, |
| | | | | | | | 1369, 1371, 1373, 1375, 1377 |
| 1 | 7 | NUE_OEX3 | AT3G01150.1_truncated | A. th. | 1552 | cytoplasmic | 1554, 1556, 1558, 1560, 1562, 1564, 1566, 1568, 1570, 1572, |
| | | | | | | | 1574, 1576, 1578, 1580, 1582, 1584, 1586, 1588, 1590, 1592, |
| | | | | | | | 1594, 1596, 1598, 1600, 1602, 1604, 1606, 1608, 1610, 1612, |
| | | | | | | | 1614, 1616, 1618 |
| 1 | 8 | NUE_OEX3 | AT5G47440_modified | A. th. | 1629 | cytoplasmic | 1631, 1633, 1635, 1637, 1639, 1641, 1643, 1645, 1647, 1649, |
| | | | | | | | 1651, 1653, 1655, 1657, 1659, 1661, 1663, 1665, 1667, 1669, |
| | | | | | | | 1671, 1673, 1675, 1677, 1679, 1681, 1683, 1685, 1687, 1689 |
| 1 | 9 | NUE_OEX3 | B1208 | E. coli | 1710 | plastidic | 1712, 1714, 1716, 1718, 1720, 1722, 1724, 1726, 1728, 1730, |
| | | | | | | | 1732, 1734, 1736, 1738, 1740, 1742, 1744, 1746, 1748, 1750, |
| | | | | | | | 1752, 1754, 1756, 1758, 1760, 1762, 1764, 1766, 1768, 1770, |
| | | | | | | | 1772, 1774, 1776, 1778, 1780, 1782, 1784, 1786, 1788, 1790, |
| | | | | | | | 1792, 1794, 1796, 1798, 1800, 1802, 1804, 1806, 1808, 1810, |
| | | | | | | | 1812, 1814, 1816, 1818, 1820, 1822, 1824, 1826, 1828, 1830, |
| | | | | | | | 1832, 1834, 1836, 1838, 1840, 1842, 1844, 1846, 1848, 1850, |
| | | | | | | | 1852, 1854, 1856, 1858, 1860, 1862, 1864, 1866, 1868, 1870, |
| | | | | | | | 1872, 1874, 1876, 1878, 1880, 1882, 1884, 1886, 1888, 1890, |
| | | | | | | | 1892, 1894, 1896, 1898, 1900, 1902, 1904, 1906, 1908, 1910, |
| | | | | | | | 1912, 1914, 1916, 1918, 1920, 1922, 1924, 1926, 1928, 1930, |
| | | | | | | | 1932, 1934, 1936, 1938, 1940, 1942, 1944, 1946, 1948, 1950, |
| | | | | | | | 1952, 1954, 1956, 1958, 1960, 1962, 1964, 1966, 1968, 1970, |
| | | | | | | | 1972, 1974, 1976, 1978, 1980, 1982, 1984, 1986, 1988, 1990, |
| | | | | | | | 1992, 1994, 1996, 1998, 2000, 2002, 2004, 2006, 2008, 2010, |
| | | | | | | | 2012, 2014, 2016, 2018, 2020, 2022, 2024, 2026, 2028, 2030, |
| | | | | | | | 2032, 2034, 2036, 2038, 2040, 2042, 2044, 2046, 2048, 2050, |
| | | | | | | | 2052, 2054, 2056, 2058, 2060, 2062, 2064, 2066, 2068, 2070, |
| | | | | | | | 2072, 2074, 2076, 2078, 2080, 2082, 2084, 2086, 2088, 2090, |
| | | | | | | | 2092, 2094, 2096, 2098, 2100, 2102, 2104, 2106, 2108, 2110, |
| | | | | | | | 2112, 2114, 2116, 2118, 2120, 2122, 2124, 2126, 2128, 2130, |
| | | | | | | | 2132, 2134, 2136, 2138, 2140, 2142, 2144, 2146, 2148, 2150, |
| | | | | | | | 2152, 2154, 2156, 2158, 2160, 2162, 2164, 2166, 2168, 2170, |
| | | | | | | | 2172, 2174, 2176, 2178, 2180, 2182, 2184, 2186, 2188, 2190, |
| | | | | | | | 2192, 2194, 2196, 2198, 2200, 2202, 2204, 2206, 2208, 2210, |
| | | | | | | | 2212, 2214, 2216, 2218 |
| 1 | 10 | NUE_OEX3 | B4214 | E. coli | 2227 | plastidic | 2229, 2231, 2233, 2235, 2237, 2239, 2241, 2243, 2245, 2247, |
| | | | | | | | 2249, 2251, 2253, 2255, 2257, 2259, 2261, 2263, 2265, 2267, |
| | | | | | | | 2269, 2271, 2273, 2275, 2277, 2279, 2281, 2283, 2285, 2287, |
| | | | | | | | 2289, 2291, 2293, 2295, 2297, 2299, 2301, 2303, 2305, 2307, |
| | | | | | | | 2309, 2311, 2313, 2315, 2317, 2319, 2321, 2323, 2325, 2327, |
| | | | | | | | 2329, 2331, 2333, 2335, 2337, 2339, 2341, 2343, 2345, 2347, |
| | | | | | | | 2349, 2351, 2353, 2355, 2357, 2359, 2361, 2363, 2365, 2367, |
| | | | | | | | 2369, 2371, 2373, 2375, 2377, 2379, 2381, 2383, 2385, 2387, |
| | | | | | | | 2389, 2391, 2393, 2395, 2397, 2399, 2401, 2403, 2405, 2407, |
| | | | | | | | 2409, 2411, 2413, 2415, 2417, 2419, 2421, 2423, 2425, 2427, |
| | | | | | | | 2429, 2431, 2433, 2435, 2437, 2439, 2441, 2443, 2445 |
| 1 | 11 | NUE_OEX3 | CDS5293_modified | P. trichocarpa | 2458 | cytoplasmic | 2460, 2462, 2464, 2466, 2468, 2470, 2472, 2474, 2476, 2478, |
| | | | | | | | 2480, 2482, 2484, 2486, 2488, 2490, 2492, 2494, 2496, 2498, |
| | | | | | | | 2500, 2502, 2504, 2506, 2508, 2510, 2512, 2514, 2516, 2518, |
| | | | | | | | 2520, 2522, 2524, 2526, 2528, 2530, 2532, 2534, 2536, 2538, |
| | | | | | | | 2540, 2542, 2544, 2546, 2548, 2550, 2552, 2554, 2556, 2558, |
| | | | | | | | 2560, 2562, 2564, 2566, 2568, 2570, 2572, 2574, 2576, 2578, |
| | | | | | | | 2580, 2582, 2584, 2586, 2588, 2590, 2592, 2594, 2596, 2598, |
| | | | | | | | 2600, 2602, 2604, 2606, 2608, 2610, 2612, 2614, 2616, 2618, |
| | | | | | | | 2620, 2622, 2624, 2626, 2628, 2630, 2632, 2634, 2636, 2638, |
| | | | | | | | 2640, 2642, 2644, 2646, 2648, 2650, 2652, 2654, 2656, 2658, |
| | | | | | | | 2660, 2662, 2664, 2666, 2668, 2670, 2672, 2674, 2676, 2678, |
| | | | | | | | 2680, 2682, 2684, 2686, 2688, 2690, 2692, 2694, 2696, 2698, |
| | | | | | | | 2700, 2702, 2704, 2706, 2708, 2710, 2712, 2714, 2716, 2718, |
| | | | | | | | 2720, 2722, 2724, 2726, 2728, 2730, 2732, 2734, 2736, 2738, |
| | | | | | | | 2740, 2742, 2744, 2746, 2748, 2750, 2752, 2754, 2756, 2758, |
| | | | | | | | 2760, 2762, 2764, 2766, 2768, 2770, 2772, 2774, 2776, 2778, |
| | | | | | | | 2780, 2782, 2784, 2786, 2788, 2790, 2792, 2794, 2796, 2798, |
| | | | | | | | 2800, 2802, 2804, 2806, 2808, 2810, 2812, 2814, 2816, 2818, |
| | | | | | | | 2820, 2822, 2824, 2826, 2828, 2830, 2832, 2834, 2836, 2838, |
| | | | | | | | 2840, 2842, 2844, 2846, 2848, 2850, 2852, 2854, 2856, 2858, |
| | | | | | | | 2860, 2862, 2864, 2866, 2868, 2870, 2872, 2874, 2876, 2878, |
| | | | | | | | 2880, 2882, 2884, 2886, 2888, 2890, 2892, 2894, 2896, 2898, |
| | | | | | | | 2900, 2902, 2904, 2906, 2908, 2910, 2912, 2914, 2916, 2918, |
| | | | | | | | 2920, 2922, 2924, 2926, 2928, 2930, 2932, 2934, 2936, 2938, |
| | | | | | | | 2940, 2942, 2944, 2946, 2948, 2950, 2952, 2954, 2956, 2958, |
| | | | | | | | 2960, 2962, 2964, 2966, 2968, 2970, 2972, 2974, 2976, 2978, |
| | | | | | | | 2980, 2982, 2984, 2986, 2988, 2990, 2992, 2994, 2996, 2998, |
| | | | | | | | 3000, 3002, 3004, 3006, 3008, 3010, 3012, 3014, 3016, 3018, |
| | | | | | | | 3020, 3022, 3024, 3026, 3028, 3030, 3032, 3034, 3036, 3038, |
| | | | | | | | 3040, 3042, 3044, 3046, 3048, 3050, 3052, 3054, 3056, 3058, |
| | | | | | | | 3060, 3062, 3064, 3066, 3068, 3070, 3072, 3074, 3076, 3078, |
| | | | | | | | 3080, 3082, 3084, 3086, 3088, 3090, 3092, 3094, 3096, 3098, |
| | | | | | | | 3100, 3102, 3104, 3106, 3108, 3110, 3112, 3114, 3116, 3118, |
| | | | | | | | 3120, 3122, 3124, 3126, 3128, 3130, 3132, 3134, 3136, 3138, |
| | | | | | | | 3140, 3142, 3144, 3146, 3148, 3150, 3152, 3154, 3156, 3158, |
| | | | | | | | 3160, 3162, 3164, 3166, 3168, 3170, 3172, 3174, 3176, 3178, |
| | | | | | | | 3180, 3182, 3184, 3186, 3188, 3190, 3192, 3194, 3196, 3198, |
| | | | | | | | 3200, 3202, 3204, 3206, 3208, 3210, 3212, 3214, 3216, 3218, |
| | | | | | | | 3220, 3222, 3224, 3226, 3228, 3230, 3232, 3234, 3236, 3238, |
| | | | | | | | 3240, 3242, 3244, 3246, 3248, 3250, 3252, 3254, 3256, 3258, |
| | | | | | | | 3260, 3262, 3264, 3266, 3268, 3270, 3272, 3274, 3276, 3278, |
| | | | | | | | 3280, 3282, 3284, 3286, 3288, 3290, 3292, 3294, 3296, 3298, |
| | | | | | | | 3300, 3302, 3304, 3306, 3308, 3310, 3312, 3314, 3316, 3318, |
| | | | | | | | 3320, 3322, 3324, 3326, 3328, 3330, 3332, 3334, 3336, 3338, |
| | | | | | | | 3340, 3342, 3344, 3346, 3348, 3350, 3352, 3354, 3356, 3358, |
| | | | | | | | 3360, 3362, 3364, 3366, 3368, 3370, 3372, 3374, 3376, 3378, |
| | | | | | | | 3380, 3382, 3384, 3386, 3388, 3390, 3392, 3394, 3396, 3398, |
| | | | | | | | 3400, 3402, 3404, 3406, 3408 |
| 1 | 12 | NUE_OEX3 | CDS5305 | P. trichocarpa | 3464 | cytoplasmic | 3466, 3468, 3470, 3472, 3474, 3476, 3478, 3480, 3482, 3484, |
| | | | | | | | 3486, 3488, 3490, 3492, 3494, 3496, 3498, 3500, 3502, 3504, |
| | | | | | | | 3506, 3508, 3510, 3512, 3514, 3516, 3518, 3520, 3522, 3524, |
| | | | | | | | 3526, 3528, 3530, 3532, 3534, 3536, 3538, 3540, 3542, 3544, |
| | | | | | | | 3546, 3548, 3550, 3552, 3554, 3556, 3558, 3560, 3562, 3564, |
| | | | | | | | 3566, 3568, 3570, 3572, 3574, 3576, 3578, 3580, 3582, 3584, |
| | | | | | | | 3586, 3588, 3590, 3592, 3594, 3596, 3598, 3600, 3602, 3604, |
| | | | | | | | 3606, 3608, 3610, 3612, 3614, 3616, 3618, 3620, 3622, 3624, |
| | | | | | | | 3626, 3628, 3630, 3632, 3634, 3636, 3638, 3640, 3642, 3644, |
| | | | | | | | 3646, 3648, 3650, 3652, 3654, 3656, 3658, 3660, 3662, 3664, |
| | | | | | | | 3666, 3668, 3670, 3672, 3674, 3676, 3678, 3680, 3682, 3684, |
| | | | | | | | 3686, 3688, 3690, 3692, 3694, 3696, 3698, 3700, 3702, 3704, |
| | | | | | | | 3706, 3708, 3710, 3712, 3714, 3716, 3718, 3720, 3722, 3724, |
| | | | | | | | 3726, 3728, 3730, 3732, 3734, 3736, 3738, 3740, 3742, 3744, |
| | | | | | | | 3746, 3748, 3750, 3752, 3754, 3756 |
| 1 | 13 | NUE_OEX3 | CDS5397 | P. trichocarpa | 3795 | cytoplasmic | 3797, 3799, 3801, 3803, 3805, 3807, 3809, 3811, 3813, 3815, |
| | | | | | | | 3817, 3819, 3821, 3823, 3825, 3827, 3829, 3831, 3833, 3835, |
| | | | | | | | 3837, 3839, 3841, 3843, 3845, 3847, 3849, 3851, 3853, 3855, |
| | | | | | | | 3857, 3859, 3861, 3863, 3865, 3867, 3869, 3871, 3873, 3875, |
| | | | | | | | 3877, 3879, 3881, 3883, 3885, 3887, 3889, 3891, 3893, 3895, |
| | | | | | | | 3897, 3899, 3901, 3903, 3905, 3907, 3909, 3911, 3913, 3915, |
| | | | | | | | 3917, 3919, 3921, 3923, 3925, 3927, 3929, 3931, 3933, 3935, |
| | | | | | | | 3937, 3939, 3941, 3943, 3945, 3947, 3949, 3951, 3953, 3955, |
| | | | | | | | 3957, 3959, 3961, 3963, 3965, 3967, 3969, 3971, 3973, 3975, |
| | | | | | | | 3977, 3979, 3981, 3983, 3985, 3987, 3989, 3991, 3993, 3995, |
| | | | | | | | 3997, 3999, 4001, 4003, 4005, 4007, 4009, 4011, 4013, 4015, |
| | | | | | | | 4017, 4019, 4021, 4023, 4025, 4027, 4029, 4031, 4033, 4035, |
| | | | | | | | 4037, 4039, 4041, 4043, 4045, 4047, 4049, 4051, 4053, 4055, |
| | | | | | | | 4057, 4059, 4061, 4063, 4065, 4067, 4069, 4071, 4073, 4075, |
| | | | | | | | 4077, 4079, 4081, 4083, 4085, 4087, 4089, 4091, 4093, 4095, |
| | | | | | | | 4097, 4099, 4101, 4103, 4105, 4107, 4109, 4111, 4113, 4115, |
| | | | | | | | 4117, 4119, 4121, 4123, 4125, 4127, 4129, 4131, 4133, 4135, |
| | | | | | | | 4137, 4139, 4141, 4143, 4145, 4147, 4149, 4151, 4153, 4155, |
| | | | | | | | 4157, 4159, 4161, 4163, 4165, 4167, 4169, 4171, 4173, 4175, |
| | | | | | | | 4177, 4179, 4181, 4183, 4185, 4187, 4189, 4191, 4193, 4195, |
| | | | | | | | 4197, 4199, 4201, 4203, 4205, 4207, 4209, 4211, 4213, 4215, |
| | | | | | | | 4217, 4219, 4221, 4223, 4225, 4227, 4229, 4231, 4233, 4235, |
| | | | | | | | 4237, 4239, 4241, 4243, 4245, 4247, 4249, 4251, 4253, 4255, |
| | | | | | | | 4257, 4259, 4261, 4263, 4265, 4267, 4269, 4271, 4273, 4275, |
| | | | | | | | 4277, 4279, 4281, 4283, 4285, 4287, 4289, 4291, 4293, 4295, |
| | | | | | | | 4297, 4299, 4301, 4303, 4305, 4307, 4309, 4311, 4313, 4315, |
| | | | | | | | 4317, 4319, 4321, 4323, 4325, 4327, 4329, 4331, 4333, 4335, |
| | | | | | | | 4337, 4339, 4341, 4343, 4345, 4347, 4349, 4351, 4353, 4355, |
| | | | | | | | 4357, 4359, 4361, 4363, 4365, 4367, 4369, 4371, 4373, 4375, |
| | | | | | | | 4377, 4379, 4381, 4383, 4385, 4387, 4389, 4391, 4393, 4395, |
| | | | | | | | 4397, 4399, 4401, 4403, 4405, 4407, 4409, 4411, 4413, 4415, |
| | | | | | | | 4417, 4419, 4421, 4423, 4425, 4427, 4429, 4431, 4433, 4435, |
| | | | | | | | 4437, 4439, 4441, 4443, 4445, 4447, 4449, 4451, 4453, 4455, |
| | | | | | | | 4457, 4459, 4461, 4463, 4465, 4467, 4469, 4471, 4473, 4475, |
| | | | | | | | 4477, 4479, 4481, 4483, 4485, 4487, 4489, 4491, 4493, 4495, |
| | | | | | | | 4497, 4499, 4501, 4503, 4505, 4507, 4509, 4511, 4513, 4515, |
| | | | | | | | 4517, 4519, 4521, 4523, 4525, 4527, 4529, 4531, 4533, 4535, |
| | | | | | | | 4537, 4539, 4541, 4543, 4545, 4547, 4549, 4551, 4553, 4555, |
| | | | | | | | 4557, 4559, 4561, 4563, 4565, 4567, 4569, 4571, 4573, 4575, |
| | | | | | | | 4577 |
| 1 | 14 | NUE_OEX3 | TTC1186 | T. thermophilus | 4631 | cytoplasmic | 4633, 4635, 4637, 4639, 4641, 4643, 4645, 4647, 4649, 4651, |
| | | | | | | | 4653, 4655, 4657, 4659, 4661, 4663, 4665, 4667, 4669, 4671, |
| | | | | | | | 4673, 4675, 4677, 4679, 4681, 4683, 4685, 4687, 4689, 4691, |
| | | | | | | | 4693, 4695, 4697, 4699, 4701, 4703, 4705, 4707, 4709, 4711, |
| | | | | | | | 4713, 4715, 4717, 4719, 4721, 4723, 4725, 4727, 4729, 4731, |
| | | | | | | | 4733, 4735, 4737, 4739, 4741, 4743, 4745, 4747, 4749, 4751, |
| | | | | | | | 4753, 4755, 4757, 4759, 4761, 4763, 4765, 4767, 4769, 4771, |
| | | | | | | | 4773, 4775, 4777, 4779, 4781, 4783, 4785, 4787, 4789, 4791, |
| | | | | | | | 4793, 4795, 4797, 4799, 4801, 4803, 4805, 4807, 4809, 4811, |
| | | | | | | | 4813, 4815, 4817, 4819, 4821, 4823, 4825, 4827, 4829, 4831, |
| | | | | | | | 4833, 4835, 4837, 4839, 4841, 4843, 4845, 4847, 4849, 4851, |
| | | | | | | | 4853, 4855, 4857, 4859, 4861, 4863, 4865, 4867, 4869, 4871, |
| | | | | | | | 4873, 4875, 4877, 4879, 4881, 4883, 4885, 4887, 4889, 4891, |
| | | | | | | | 4893, 4895, 4897, 4899, 4901, 4903, 4905, 4907, 4909, 4911, |
| | | | | | | | 4913, 4915, 4917, 4919, 4921, 4923, 4925, 4927, 4929, 4931, |
| | | | | | | | 4933, 4935, 4937, 4939, 4941, 4943, 4945, 4947, 4949, 4951, |
| | | | | | | | 4953, 4955, 4957, 4959, 4961, 4963, 4965, 4967, 4969, 4971, |
| | | | | | | | 4973, 4975, 4977, 4979, 4981, 4983, 4985, 4987, 4989, 4991, |
| | | | | | | | 4993, 4995, 4997, 4999, 5001, 5003, 5005, 5007, 5009, 5011, |
| | | | | | | | 5013, 5015, 5017, 5019, 5021, 5023, 5025, 5027, 5029, 5031, |
| | | | | | | | 5033, 5035 |
| 1 | 15 | NUE_OEX3 | YKL124W | S. cerevisiae | 5043 | cytoplasmic | 5045, 5047, 5049, 5051, 5053, 5055, 5057 |
| 1 | 16 | NUE_OEX3 | YNL093W | S. cerevisiae | 5070 | cytoplasmic | 5072, 5074, 5076, 5078, 5080, 5082, 5084, 5086, 5088, 5090, |
| | | | | | | | 5092, 5094, 5096, 5098, 5100, 5102, 5104, 5106, 5108, 5110, |
| | | | | | | | 5112, 5114, 5116, 5118, 5120, 5122, 5124, 5126, 5128, 5130, |
| | | | | | | | 5132, 5134, 5136, 5138, 5140, 5142, 5144, 5146, 5148, 5150, |
| | | | | | | | 5152, 5154, 5156, 5158, 5160, 5162, 5164, 5166, 5168, 5170, |
| | | | | | | | 5172, 5174, 5176, 5178, 5180, 5182, 5184, 5186, 5188, 5190, |
| | | | | | | | 5192, 5194, 5196, 5198, 5200, 5202, 5204, 5206, 5208, 5210, |
| | | | | | | | 5212, 5214, 5216, 5218, 5220, 5222, 5224, 5226, 5228, 5230, |
| | | | | | | | 5232, 5234, 5236, 5238, 5240, 5242, 5244, 5246, 5248 |
| 1 | 17 | NUE_OEX3 | ZM_7266_BQ538406_CORN_LOFI_344_730_B | Zea | 5493 | cytoplasmic | 5495, 5497, 5499, 5501, 5503, 5505, 5507, 5509, 5511, 5513, |
| | | | | mays | | | 5515, 5517, 5519, 5521, 5523, 5525, 5527, 5529, 5531, 5533, |
| | | | | | | | 5535, 5537, 5539, 5541, 5543, 5545, 5547, 5549, 5551, 5553, |
| | | | | | | | 5555, 5557, 5559, 5561, 5563, 5565, 5567, 5569, 5571, 5573, |
| | | | | | | | 5575, 5577, 5579, 5581, 5583, 5585, 5587, 5589, 5591, 5593, |
| | | | | | | | 5595, 5597, 5599, 5601, 5603, 5605, 5607, 5609, 5611, 5613, |
| | | | | | | | 5615, 5617, 5619, 5621, 5623, 5625, 5627, 5629, 5631, 5633, |
| | | | | | | | 5635, 5637, 5639, 5641, 5643, 5645, 5647, 5649, 5651, 5653, |
| | | | | | | | 5655, 5657, 5659, 5661, 5663, 5665, 5667, 5669, 5671, 5673, |
| | | | | | | | 5675, 5677, 5679, 5681, 5683, 5685, 5687, 5689, 5691, 5693, |
| | | | | | | | 5695, 5697, 5699, 5701, 5703, 5705, 5707 |
| 1 | 18 | NUE_OEX3 | At1G29250.1 | A. th. | 5839 | cytoplasmic | 5841, 5843, 5845, 5847, 5849, 5851, 5853, 5855, 5857, 5859, |
| | | | | | | | 5861, 5863, 5865, 5867, 5869, 5871, 5873, 5875, 5877, 5879, |
| | | | | | | | 5881, 5883, 5885, 5887, 5889, 5891, 5893, 5895, 5897, 5899, |
| | | | | | | | 5901, 5903, 5905, 5907, 5909, 5911, 5913, 5915, 5917, 5919, |
| | | | | | | | 5921, 5923, 5925, 5927, 5929, 5931, 5933, 5935, 5937, 5939, |
| | | | | | | | 5941 |
| 1 | 19 | NUE_OEX3 | AT1G55920.1 | A. th. | 5983 | cytoplasmic | 5985, 5987, 5989, 5991, 5993, 5995, 5997, 5999, 6001, 6003, |
| | | | | | | | 6005, 6007, 6009, 6011, 6013, 6015, 6017, 6019, 6021, 6023, |
| | | | | | | | 6025, 6027, 6029, 6031, 6033, 6035, 6037, 6039, 6041, 6043, |
| | | | | | | | 6045, 6047, 6049, 6051, 6053, 6055, 6057, 6059, 6061, 6063, |
| | | | | | | | 6065, 6067, 6069, 6071, 6073, 6075, 6077, 6079, 6081, 6083, |
| | | | | | | | 6085, 6087, 6089, 6091, 6093, 6095, 6097, 6099, 6101, 6103, |
| | | | | | | | 6105, 6107, 6109, 6111, 6113, 6115, 6117, 6119, 6121, 6123, |
| | | | | | | | 6125, 6127, 6129, 6131, 6133, 6135, 6137, 6139, 6141, 6143, |
| | | | | | | | 6145, 6147, 6149, 6151, 6153, 6155, 6157, 6159, 6161, 6163, |
| | | | | | | | 6165, 6167, 6169, 6171, 6173, 6175, 6177, 6179, 6181, 6183, |
| | | | | | | | 6185, 6187, 6189, 6191, 6193, 6195, 6197, 6199, 6201, 6203, |
| | | | | | | | 6205, 6207, 6209, 6211, 6213, 6215, 6217, 6219, 6221, 6223, |
| | | | | | | | 6225, 6227, 6229, 6231, 6233, 6235, 6237, 6239, 6241, 6243, |
| | | | | | | | 6245, 6247, 6249, 6251, 6253, 6255, 6257, 6259, 6261, 6263, |
| | | | | | | | 6265, 6267, 6269, 6271, 6273, 6275, 6277, 6279, 6281, 6283, |
| | | | | | | | 6285, 6287, 6289, 6291, 6293, 6295, 6297, 6299, 6301, 6303, |
| | | | | | | | 6305, 6307, 6309, 6311, 6313, 6315, 6317, 6319, 6321, 6323, |
| | | | | | | | 6325, 6327, 6329, 6331, 6333, 6335, 6337, 6339, 6341, 6343, |
| | | | | | | | 6345, 6347, 6349, 6351, 6353, 6355, 6357, 6359, 6361, 6363, |
| | | | | | | | 6365, 6367, 6369, 6371, 6373, 6375, 6377, 6379, 6381, 6383, |
| | | | | | | | 6385, 6387, 6389, 6391, 6393, 6395, 6397, 6399, 6401, 6403, |
| | | | | | | | 6405, 6407, 6409, 6411, 6413, 6415, 6417, 6419, 6421, 6423, |
| | | | | | | | 6425, 6427, 6429, 6431, 6433, 6435, 6437, 6439, 6441, 6443, |
| | | | | | | | 6445, 6447, 6449, 6451, 6453, 6455, 6457, 6459, 6461, 6463 |
| 1 | 20 | NUE_OEX3 | AT3G09480 | A. th. | 6495 | cytoplasmic | 6497, 6499, 6501, 6503, 6505, 6507, 6509, 6511, 6513, 6515, |
| | | | | | | | 6517, 6519, 6521, 6523, 6525, 6527, 6529, 6531, 6533, 6535, |
| | | | | | | | 6537, 6539, 6541, 6543, 6545, 6547, 6549, 6551, 6553, 6555, |
| | | | | | | | 6557, 6559, 6561, 6563, 6565, 6567, 6569, 6571, 6573, 6575, |
| | | | | | | | 6577, 6579, 6581, 6583, 6585, 6587, 6589, 6591, 6593, 6595, |
| | | | | | | | 6597, 6599, 6601, 6603, 6605, 6607, 6609, 6611, 6613, 6615, |
| | | | | | | | 6617, 6619, 6621, 6623, 6625, 6627, 6629, 6631, 6633, 6635, |
| | | | | | | | 6637, 6639, 6641, 6643, 6645, 6647, 6649, 6651, 6653, 6655, |
| | | | | | | | 6657, 6659, 6661, 6663, 6665, 6667, 6669, 6671, 6673, 6675, |
| | | | | | | | 6677, 6679, 6681, 6683, 6685, 6687, 6689, 6691, 6693, 6695, |
| | | | | | | | 6697, 6699, 6701, 6703, 6705, 6707, 6709, 6711, 6713, 6715, |
| | | | | | | | 6717, 6719, 6721, 6723, 6725, 6727, 6729, 6731, 6733, 6735, |
| | | | | | | | 6737, 6739, 6741, 6743, 6745, 6747, 6749, 6751, 6753, 6755, |
| | | | | | | | 6757, 6759, 6761, 6763, 6765, 6767, 6769, 6771, 6773, 6775, |
| | | | | | | | 6777, 6779, 6781, 6783, 6785, 6787, 6789, 6791, 6793, 6795, |
| | | | | | | | 6797, 6799, 6801, 6803, 6805, 6807, 6809, 6811, 6813, 6815, |
| | | | | | | | 6817, 6819, 6821, 6823, 6825, 6827, 6829, 6831, 6833, 6835, |
| | | | | | | | 6837, 6839, 6841, 6843, 6845, 6847, 6849, 6851, 6853, 6855, |
| | | | | | | | 6857, 6859, 6861, 6863, 6865, 6867, 6869, 6871, 6873, 6875, |
| | | | | | | | 6877, 6879, 6881, 6883, 6885, 6887, 6889, 6891, 6893, 6895, |
| | | | | | | | 6897, 6899, 6901, 6903, 6905, 6907, 6909, 6911, 6913, 6915, |
| | | | | | | | 6917, 6919, 6921, 6923, 6925, 6927, 6929, 6931, 6933, 6935, |
| | | | | | | | 6937, 6939, 6941, 6943, 6945, 6947, 6949, 6951, 6953, 6955, |
| | | | | | | | 6957, 6959, 6961, 6963, 6965, 6967, 6969, 6971, 6973, 6975, |
| | | | | | | | 6977, 6979, 6981, 6983, 6985, 6987, 6989, 6991, 6993, 6995, |
| | | | | | | | 6997, 6999, 7001, 7003, 7005, 7007, 7009, 7011, 7013, 7015, |
| | | | | | | | 7017, 7019, 7021, 7023, 7025, 7027, 7029, 7031, 7033, 7035, |
| | | | | | | | 7037, 7039, 7041, 7043, 7045, 7047, 7049, 7051, 7053, 7055, |
| | | | | | | | 7057, 7059, 7061, 7063, 7065, 7067, 7069, 7071, 7073, 7075, |
| | | | | | | | 7077, 7079, 7081, 7083, 7085, 7087, 7089, 7091, 7093, 7095, |
| | | | | | | | 7097, 7099, 7101, 7103, 7105, 7107, 7109, 7111, 7113, 7115, |
| | | | | | | | 7117, 7119, 7121, 7123, 7125, 7127, 7129, 7131, 7133, 7135, |
| | | | | | | | 7137, 7139, 7141, 7143, 7145, 7147, 7149, 7151, 7153, 7155, |
| | | | | | | | 7157, 7159, 7161, 7163, 7165, 7167, 7169, 7171, 7173, 7175, |
| | | | | | | | 7177, 7179, 7181, 7183, 7185, 7187, 7189, 7191, 7193, 7195, |
| | | | | | | | 7197, 7199, 7201, 7203, 7205, 7207, 7209, 7211, 7213, 7215 |
| 1 | 21 | NUE_OEX3 | AT4G01870 | A. th. | 7365 | cytoplasmic | 7367, 7369, 7371, 7373, 7375, 7377, 7379, 7381, 7383, 7385, |
| | | | | | | | 7387, 7389, 7391, 7393, 7395, 7397, 7399, 7401, 7403, 7405, |
| | | | | | | | 7407, 7409, 7411, 7413, 7415 |
| 1 | 22 | NUE_OEX3 | AT4G11890 | A. th. | 7435 | cytoplasmic | 7437, 7439, 7441, 7443, 7445, 7447, 7449, 7451, 7453, 7455, |
| | | | | | | | 7457, 7459, 7461, 7463, 7465, 7467, 7469, 7471, 7473, 7475 |
| 1 | 23 | NUE_OEX3 | AT5G07310 | A. th. | 7514 | cytoplasmic | 7516, 7518, 7520, 7522, 7524, 7526, 7528, 7530, 7532 |
| 1 | 24 | NUE_OEX3 | CDS5422 | P. trichocarpa | 7546 | cytoplasmic | 7548, 7550, 7552, 7554, 7556, 7558, 7560, 7562, 7564, 7566, |
| | | | | | | | 7568, 7570, 7572, 7574, 7576, 7578, 7580, 7582, 7584, 7586, |
| | | | | | | | 7588, 7590, 7592, 7594, 7596, 7598, 7600, 7602, 7604, 7606, |
| | | | | | | | 7608, 7610, 7612, 7614, 7616, 7618, 7620, 7622, 7624, 7626, |
| | | | | | | | 7628, 7630, 7632, 7634, 7636, 7638, 7640, 7642, 7644, 7646, |
| | | | | | | | 7648, 7650, 7652, 7654, 7656, 7658, 7660, 7662, 7664, 7666, |
| | | | | | | | 7668, 7670, 7672, 7674, 7676, 7678, 7680, 7682, 7684, 7686, |
| | | | | | | | 7688, 7690, 7692, 7694 |
| 1 | 25 | NUE_OEX3 | AT1G03905.1 | A. th. | 7722 | cytoplasmic | 7724, 7726, 7728, 7730, 7732, 7734, 7736, 7738, 7740, 7742, |
| | | | | | | | 7744, 7746, 7748, 7750, 7752, 7754, 7756, 7758, 7760, 7762, |
| | | | | | | | 7764, 7766, 7768, 7770, 7772, 7774, 7776, 7778, 7780, 7782, |
| | | | | | | | 7784, 7786, 7788, 7790, 7792, 7794, 7796, 7798, 7800, 7802, |
| | | | | | | | 7804, 7806, 7808, 7810, 7812, 7814, 7816, 7818, 7820, 7822, |
| | | | | | | | 7824, 7826, 7828, 7830, 7832, 7834, 7836 |
| 1 | 26 | NUE_OEX3 | AT4G22240.1 | A. th. | 8288 | cytoplasmic | 8290, 8292, 8294, 8296, 8298, 8300, 8302, 8304, 8306, 8308, |
| | | | | | | | 8310, 8312, 8314, 8316, 8318, 8320, 8322, 8324, 8326, 8328, |
| | | | | | | | 8330, 8332, 8334, 8336, 8338, 8340, 8342, 8344, 8346, 8348, |
| | | | | | | | 8350, 8352, 8354, 8356, 8358, 8360, 8362, 8364, 8366, 8368, |
| | | | | | | | 8370, 8372, 8374, 8376, 8378, 8380 |
| 1 | 27 | NUE_OEX3 | AT1G09350.1 | A. th. | 7865 | cytoplasmic | 7867, 7869, 7871, 7873, 7875, 7877, 7879, 7881, 7883, 7885, |
| | | | | | | | 7887, 7889, 7891, 7893, 7895, 7897, 7899, 7901, 7903, 7905, |
| | | | | | | | 7907, 7909, 7911, 7913, 7915, 7917, 7919, 7921, 7923, 7925, |
| | | | | | | | 7927, 7929, 7931, 7933, 7935, 7937, 7939, 7941, 7943, 7945, |
| | | | | | | | 7947, 7949, 7951, 7953, 7955, 7957, 7959, 7961, 7963, 7965, |
| | | | | | | | 7967, 7969, 7971, 7973, 7975, 7977, 7979, 7981, 7983, 7985, |
| | | | | | | | 7987, 7989, 7991, 7993, 7995, 7997, 7999, 8001, 8003, 8005, |
| | | | | | | | 8007, 8009, 8011, 8013, 8015, 8017, 8019, 8021, 8023, 8025, |
| | | | | | | | 8027 |
| 1 | 28 | NUE_OEX3 | AT1G30135.1 | A. th. | 8065 | cytoplasmic | 8067, 8069, 8071, 8073, 8075, 8077, 8079, 8081, 8083, 8085, |
| | | | | | | | 8087, 8089, 8091, 8093 |
| 1 | 29 | NUE_OEX3 | AT1G35680.1 | A. th. | 8105 | cytoplasmic | 8107, 8109, 8111, 8113, 8115, 8117, 8119, 8121, 8123, 8125, |
| | | | | | | | 8127, 8129, 8131, 8133, 8135 |
| 1 | 30 | NUE_OEX3 | AT2G42540.1 | A. th. | 8153 | cytoplasmic | 8155, 8157, 8159, 8161, 8163, 8165, 8167, 8169, 8171, 8173, |
| | | | | | | | 8175, 8177, 8179, 8181, 8183, 8185, 8187, 8189, 8191, 8193, |
| | | | | | | | 8195, 8197 |
| 1 | 31 | NUE_OEX3 | AT3G02990.1 | A. th. | 8207 | cytoplasmic | 8209, 8211, 8213, 8215, 8217, 8219, 8221, 8223, 8225, 8227, |
| | | | | | | | 8229, 8231, 8233, 8235, 8237, 8239, 8241, 8243, 8245, 8247, |
| | | | | | | | 8249, 8251, 8253, 8255, 8257, 8259, 8261, 8263, 8265, 8267 |
| 1 | 32 | NUE_OEX3 | At5g37670.1 | A. th. | 8409 | cytoplasmic | 8411, 8413, 8415, 8417, 8419, 8421, 8423, 8425, 8427, 8429, |
| | | | | | | | 8431, 8433, 8435, 8437, 8439, 8441, 8443, 8445, 8447, 8449, |
| | | | | | | | 8451, 8453, 8455, 8457, 8459, 8461, 8463, 8465, 8467, 8469, |
| | | | | | | | 8471, 8473, 8475, 8477, 8479, 8481, 8483, 8485, 8487, 8489, |
| | | | | | | | 8491, 8493, 8495, 8497, 8499, 8501, 8503, 8505, 8507, 8509, |
| | | | | | | | 8511, 8513, 8515, 8517, 8519, 8521, 8523, 8525, 8527, 8529, |
| | | | | | | | 8531, 8533, 8535, 8537, 8539, 8541, 8543, 8545, 8547, 8549, |
| | | | | | | | 8551, 8553, 8555, 8557, 8559, 8561, 8563, 8565, 8567, 8569, |
| | | | | | | | 8571, 8573, 8575, 8577, 8579, 8581, 8583, 8585, 8587, 8589, |
| | | | | | | | 8591, 8593, 8595, 8597, 8599, 8601, 8603, 8605, 8607, 8609, |
| | | | | | | | 8611, 8613, 8615, 8617, 8619, 8621, 8623, 8625, 8627, 8629, |
| | | | | | | | 8631, 8633, 8635, 8637, 8639, 8641, 8643, 8645, 8647, 8649, |
| | | | | | | | 8651, 8653, 8655, 8657, 8659, 8661, 8663, 8665, 8667, 8669, |
| | | | | | | | 8671, 8673, 8675, 8677, 8679, 8681, 8683, 8685, 8687, 8689, |
| | | | | | | | 8691, 8693, 8695, 8697, 8699, 8701 |
| 1 | 33 | NUE_OEX3 | CDS5376 | P. trichocarpa | 8843 | cytoplasmic | 8845, 8847, 8849, 8851, 8853, 8855, 8857, 8859, 8861, 8863, |
| | | | | | | | 8865, 8867, 8869, 8871, 8873, 8875, 8877, 8879, 8881, 8883, |
| | | | | | | | 8885, 8887, 8889, 8891, 8893, 8895, 8897, 8899, 8901, 8903, |
| | | | | | | | 8905, 8907, 8909, 8911, 8913, 8915, 8917, 8919, 8921, 8923, |
| | | | | | | | 8925, 8927, 8929, 8931, 8933, 8935, 8937, 8939, 8941, 8943, |
| | | | | | | | 8945, 8947, 8949, 8951, 8953, 8955, 8957, 8959, 8961, 8963, |
| | | | | | | | 8965, 8967, 8969, 8971, 8973, 8975, 8977, 8979, 8981, 8983, |
| | | | | | | | 8985, 8987, 8989, 8991, 8993, 8995, 8997, 8999, 9001, 9003, |
| | | | | | | | 9005, 9007, 9009, 9011, 9013, 9015, 9017, 9019, 9021, 9023, |
| | | | | | | | 9025, 9027, 9029, 9031, 9033, 9035, 9037, 9039, 9041, 9043, |
| | | | | | | | 9045, 9047, 9049, 9051, 9053, 9055, 9057, 9059, 9061, 9063, |
| | | | | | | | 9065, 9067, 9069, 9071, 9073, 9075, 9077, 9079, 9081, 9083, |
| | | | | | | | 9085, 9087, 9089, 9091, 9093, 9095, 9097, 9099, 9101, 9103, |
| | | | | | | | 9105, 9107, 9109, 9111, 9113, 9115, 9117, 9119, 9121, 9123, |
| | | | | | | | 9125, 9127, 9129, 9131, 9133, 9135, 9137, 9139, 9141, 9143, |
| | | | | | | | 9145, 9147, 9149, 9151, 9153, 9155, 9157, 9159, 9161, 9163, |
| | | | | | | | 9165, 9167, 9169, 9171, 9173, 9175, 9177, 9179, 9181, 9183, |
| | | | | | | | 9185, 9187, 9189, 9191, 9193, 9195, 9197, 9199, 9201, 9203, |
| | | | | | | | 9205, 9207, 9209, 9211, 9213, 9215, 9217, 9219, 9221, 9223, |
| | | | | | | | 9225, 9227, 9229, 9231, 9233, 9235, 9237, 9239, 9241, 9243, |
| | | | | | | | 9245, 9247, 9249, 9251, 9253, 9255, 9257, 9259, 9261, 9263, |
| | | | | | | | 9265, 9267, 9269, 9271, 9273, 9275, 9277, 9279, 9281, 9283, |
| | | | | | | | 9285, 9287, 9289, 9291, 9293, 9295, 9297, 9299, 9301, 9303, |
| | | | | | | | 9305, 9307, 9309, 9311, 9313, 9315, 9317, 9319, 9321, 9323, |
| | | | | | | | 9325, 9327, 9329, 9331, 9333, 9335, 9337, 9339, 9341, 9343, |
| | | | | | | | 9345, 9347, 9349, 9351, 9353, 9355, 9357, 9359, 9361, 9363, |
| | | | | | | | 9365, 9367, 9369, 9371, 9373, 9375, 9377, 9379, 9381, 9383, |
| | | | | | | | 9385, 9387, 9389, 9391, 9393, 9395, 9397, 9399, 9401, 9403, |
| | | | | | | | 9405, 9407, 9409, 9411, 9413, 9415, 9417, 9419, 9421, 9423, |
| | | | | | | | 9425, 9427, 9429, 9431, 9433, 9435, 9437, 9439, 9441, 9443, |
| | | | | | | | 9445, 9447, 9449, 9451, 9453, 9455, 9457, 9459, 9461, 9463, |
| | | | | | | | 9465, 9467, 9469, 9471, 9473, 9475, 9477, 9479, 9481, 9483, |
| | | | | | | | 9485, 9487, 9489, 9491, 9493, 9495, 9497, 9499, 9501, 9503, |
| | | | | | | | 9505, 9507, 9509, 9511, 9513, 9515, 9517, 9519, 9521, 9523, |
| | | | | | | | 9525, 9527, 9529, 9531, 9533, 9535, 9537, 9539, 9541, 9543, |
| | | | | | | | 9545, 9547, 9549, 9551, 9553, 9555, 9557, 9559, 9561, 9563, |
| | | | | | | | 9565, 9567, 9569, 9571, 9573, 9575, 9577, 9579, 9581, 9583, |
| | | | | | | | 9585, 9587, 9589, 9591, 9593, 9595, 9597, 9599, 9601, 9603, |
| | | | | | | | 9605, 9607, 9609, 9611, 9613, 9615, 9617, 9619, 9621, 9623, |
| | | | | | | | 9625, 9627, 9629, 9631, 9633, 9635, 9637, 9639, 9641, 9643, |
| | | | | | | | 9645, 9647, 9649, 9651, 9653, 9655, 9657, 9659, 9661, 9663, |
| | | | | | | | 9665, 9667, 9669, 9671, 9673, 9675, 9677, 9679, 9681, 9683, |
| | | | | | | | 9685, 9687, 9689, 9691, 9693, 9695, 9697, 9699, 9701, 9703, |
| | | | | | | | 9705, 9707, 9709, 9711, 9713, 9715, 9717, 9719, 9721, 9723, |
| | | | | | | | 9725, 9727, 9729, 9731, 9733, 9735, 9737, 9739, 9741, 9743, |
| | | | | | | | 9745, 9747, 9749, 9751, 9753, 9755, 9757, 9759, 9761, 9763, |
| | | | | | | | 9765, 9767, 9769, 9771, 9773, 9775, 9777, 9779, 9781, 9783, |
| | | | | | | | 9785 |
| 1 | 34 | NUE_OEX3 | LOC_Os02g13560.1 | O. sativa | 9855 | cytoplasmic | 9857, 9859, 9861, 9863, 9865, 9867, 9869, 9871, 9873, 9875, |
| | | | | | | | 9877, 9879, 9881, 9883, 9885, 9887, 9889, 9891, 9893, 9895, |
| | | | | | | | 9897, 9899, 9901, 9903, 9905, 9907, 9909, 9911, 9913, 9915, |
| | | | | | | | 9917, 9919, 9921, 9923, 9925, 9927, 9929, 9931, 9933, 9935, |
| | | | | | | | 9937, 9939, 9941, 9943, 9945, 9947, 9949, 9951, 9953, 9955, |
| | | | | | | | 9957, 9959 |
| 1 | 35 | NUE_OEX3 | YCR024C | S. cerevisiae | 9982 | cytoplasmic | 9984, 9986, 9988, 9990, 9992, 9994, 9996, 9998, 10000, 10002, |
| | | | | | | | 10004, 10006, 10008, 10010, 10012, 10014, 10016, 10018, |
| | | | | | | | 10020, 10022, 10024, 10026, 10028, 10030, 10032, 10034, |
| | | | | | | | 10036, 10038, 10040, 10042, 10044, 10046, 10048, 10050, |
| | | | | | | | 10052, 10054, 10056, 10058, 10060, 10062, 10064, 10066, |
| | | | | | | | 10068, 10070, 10072, 10074, 10076, 10078, 10080, 10082, |
| | | | | | | | 10084, 10086, 10088, 10090, 10092, 10094, 10096, 10098, |
| | | | | | | | 10100, 10102, 10104, 10106, 10108, 10110, 10112, 10114, |
| | | | | | | | 10116, 10118, 10120, 10122, 10124, 10126, 10128, 10130, |
| | | | | | | | 10132, 10134, 10136, 10138, 10140, 10142, 10144, 10146, |
| | | | | | | | 10148, 10150, 10152, 10154, 10156, 10158, 10160, 10162, |
| | | | | | | | 10164, 10166, 10168, 10170, 10172, 10174, 10176, 10178, |
| | | | | | | | 10180, 10182, 10184, 10186, 10188, 10190, 10192, 10194, |
| | | | | | | | 10196, 10198, 10200, 10202, 10204, 10206, 10208, 10210, |
| | | | | | | | 10212, 10214, 10216, 10218, 10220, 10222, 10224, 10226, |
| | | | | | | | 10228, 10230, 10232, 10234, 10236, 10238, 10240, 10242, |
| | | | | | | | 10244, 10246, 10248, 10250, 10252, 10254, 10256, 10258, |
| | | | | | | | 10260, 10262, 10264, 10266, 10268, 10270, 10272, 10274, |
| | | | | | | | 10276, 10278, 10280, 10282, 10284, 10286, 10288, 10290, |
| | | | | | | | 10292, 10294, 10296, 10298, 10300, 10302, 10304, 10306, |
| | | | | | | | 10308, 10310, 10312, 10314, 10316, 10318, 10320, 10322, |
| | | | | | | | 10324, 10326, 10328, 10330, 10332, 10334, 10336, 10338, |
| | | | | | | | 10340, 10342, 10344, 10346, 10348, 10350, 10352, 10354, |
| | | | | | | | 10356, 10358, 10360, 10362, 10364, 10366, 10368, 10370, |
| | | | | | | | 10372, 10374, 10376, 10378, 10380, 10382, 10384, 10386, |
| | | | | | | | 10388, 10390, 10392, 10394, 10396, 10398, 10400, 10402, |
| | | | | | | | 10404, 10406, 10408, 10410, 10412, 10414, 10416, 10418, |
| | | | | | | | 10420, 10422, 10424, 10426, 10428, 10430, 10432, 10434, |
| | | | | | | | 10436, 10438, 10440, 10442, 10444, 10446, 10448, 10450, |
| | | | | | | | 10452, 10454, 10456, 10458, 10460, 10462, 10464, 10466, |
| | | | | | | | 10468, 10470, 10472, 10474, 10476, 10478, 10480, 10482, |
| | | | | | | | 10484, 10486, 10488, 10490, 10492, 10494, 10496, 10498, |
| | | | | | | | 10500, 10502, 10504, 10506, 10508, 10510, 10512, 10514, |
| | | | | | | | 10516, 10518, 10520, 10522, 10524, 10526, 10528, 10530, |
| | | | | | | | 10532, 10534, 10536, 10538, 10540, 10542, 10544, 10546, |
| | | | | | | | 10548, 10550, 10552, 10554, 10556, 10558, 10560, 10562, |
| | | | | | | | 10564, 10566, 10568, 10570, 10572, 10574, 10576, 10578, |
| | | | | | | | 10580, 10582, 10584, 10586, 10588, 10590, 10592, 10594, |
| | | | | | | | 10596, 10598, 10600, 10602, 10604, 10606, 10608, 10610, |
| | | | | | | | 10612, 10614, 10616, 10618, 10620, 10622, 10624, 10626, |
| | | | | | | | 10628, 10630, 10632, 10634, 10636, 10638, 10640, 10642, |
| | | | | | | | 10644, 10646, 10648, 10650, 10652, 10654, 10656, 10658, |
| | | | | | | | 10660, 10662, 10664, 10666, 10668, 10670, 10672, 10674, |
| | | | | | | | 10676, 10678, 10680, 10682, 10684, 10686, 10688, 10690, |
| | | | | | | | 10692, 10694, 10696, 10698, 10700, 10702, 10704, 10706, |
| | | | | | | | 10708, 10710, 10712, 10714, 10716, 10718, 10720, 10722, |
| | | | | | | | 10724, 10726, 10728, 10730, 10732, 10734, 10736, 10738, |
| | | | | | | | 10740, 10742 |
| 1 | 36 | NUE_OEX3 | AT1G05100_truncated | A. th. | 10799 | cytoplasmic | 10801, 10803, 10805, 10807, 10809, 10811, 10813, 10815, |
| | | | | | | | 10817, 10819, 10821, 10823 |
| 1 | 37 | NUE_OEX3 | AT1G09450 | A. th. | 10839 | cytoplasmic | 10841, 10843, 10845, 10847, 10849, 10851, 10853, 10855, |
| | | | | | | | 10857, 10859, 10861, 10863 |
| 1 | 38 | NUE_OEX3 | AT1G44760 | A. th. | 10881 | cytoplasmic | 10883, 10885, 10887, 10889, 10891, 10893, 10895, 10897, |
| | | | | | | | 10899, 10901, 10903, 10905, 10907, 10909, 10911, 10913, |
| | | | | | | | 10915, 10917, 10919, 10921, 10923, 10925, 10927, 10929, |
| | | | | | | | 10931, 10933, 10935, 10937, 10939, 10941, 10943, 10945, |
| | | | | | | | 10947, 10949 |
| 1 | 39 | NUE_OEX3 | AT1G54050.1 | A. th. | 10966 | cytoplasmic | 10968, 10970, 10972, 10974, 10976, 10978, 10980, 10982, |
| | | | | | | | 10984, 10986, 10988, 10990, 10992, 10994, 10996, 10998, |
| | | | | | | | 11000, 11002, 11004, 11006, 11008, 11010, 11012, 11014, |
| | | | | | | | 11016, 11018, 11020, 11022, 11024, 11026, 11028, 11030, |
| | | | | | | | 11032, 11034, 11036, 11038, 11040, 11042, 11044, 11046, |
| | | | | | | | 11048, 11050, 11052, 11054, 11056, 11058, 11060, 11062, |
| | | | | | | | 11064, 11066, 11068, 11070, 11072, 11074, 11076, 11078, |
| | | | | | | | 11080, 11082, 11084, 11086, 11088, 11090, 11092, 11094, |
| | | | | | | | 11096, 11098, 11100, 11102, 11104, 11106, 11108, 11110, |
| | | | | | | | 11112, 11114, 11116, 11118, 11120, 11122, 11124, 11126, |
| | | | | | | | 11128, 11130, 11132, 11134, 11136, 11138, 11140, 11142, |
| | | | | | | | 11144, 11146, 11148, 11150, 11152, 11154, 11156, 11158, |
| | | | | | | | 11160, 11162, 11164, 11166, 11168, 11170, 11172, 11174, |
| | | | | | | | 11176, 11178, 11180, 11182, 11184, 11186, 11188, 11190, |
| | | | | | | | 11192, 11194, 11196, 11198, 11200, 11202, 11204, 11206, |
| | | | | | | | 11208, 11210, 11212, 11214, 11216, 11218, 11220, 11222, |
| | | | | | | | 11224, 11226, 11228, 11230, 11232, 11234, 11236, 11238, |
| | | | | | | | 11240, 11242, 11244, 11246, 11248, 11250, 11252, 11254, |
| | | | | | | | 11256, 11258, 11260, 11262, 11264, 11266, 11268, 11270, |
| | | | | | | | 11272, 11274, 11276, 11278, 11280, 11282, 11284, 11286, |
| | | | | | | | 11288, 11290, 11292, 11294, 11296, 11298, 11300, 11302 |
| 1 | 40 | NUE_OEX3 | AT2G27040 | A. th. | 11419 | cytoplasmic | 11421, 11423, 11425, 11427, 11429, 11431, 11433, 11435, |
| | | | | | | | 11437, 11439, 11441, 11443, 11445, 11447, 11449, 11451, |
| | | | | | | | 11453, 11455, 11457, 11459, 11461, 11463, 11465, 11467, |
| | | | | | | | 11469, 11471, 11473, 11475, 11477, 11479, 11481, 11483, |
| | | | | | | | 11485, 11487, 11489, 11491, 11493, 11495, 11497, 11499, |
| | | | | | | | 11501, 11503, 11505, 11507, 11509, 11511, 11513, 11515, |
| | | | | | | | 11517, 11519, 11521, 11523, 11525, 11527, 11529, 11531, |
| | | | | | | | 11533, 11535, 11537, 11539, 11541, 11543, 11545, 11547, |
| | | | | | | | 11549, 11551, 11553, 11555, 11557, 11559, 11561, 11563, |
| | | | | | | | 11565, 11567, 11569, 11571, 11573, 11575, 11577, 11579, |
| | | | | | | | 11581, 11583, 11585, 11587, 11589, 11591, 11593, 11595, |
| | | | | | | | 11597, 11599, 11601, 11603, 11605, 11607, 11609, 11611, |
| | | | | | | | 11613, 11615, 11617, 11619, 11621, 11623, 11625, 11627, |
| | | | | | | | 11629, 11631, 11633, 11635, 11637, 11639, 11641, 11643, |
| | | | | | | | 11645, 11647, 11649, 11651, 11653, 11655, 11657, 11659, |
| | | | | | | | 11661, 11663, 11665, 11667, 11669, 11671, 11673, 11675, |
| | | | | | | | 11677, 11679, 11681, 11683, 11685, 11687, 11689, 11691, |
| | | | | | | | 11693, 11695, 11697, 11699, 11701, 11703, 11705, 11707, |
| | | | | | | | 11709, 11711, 11713, 11715, 11717, 11719, 11721, 11723, |
| | | | | | | | 11725, 11727, 11729, 11731 |
| 1 | 41 | NUE_OEX3 | AT2G29490 | A. th. | 11753 | cytoplasmic | 11755, 11757, 11759, 11761, 11763, 11765, 11767, 11769, |
| | | | | | | | 11771, 11773, 11775, 11777, 11779, 11781, 11783, 11785, |
| | | | | | | | 11787, 11789, 11791, 11793, 11795, 11797, 11799, 11801, |
| | | | | | | | 11803, 11805, 11807, 11809, 11811, 11813, 11815, 11817, |
| | | | | | | | 11819, 11821, 11823, 11825, 11827, 11829, 11831, 11833, |
| | | | | | | | 11835, 11837, 11839, 11841, 11843, 11845, 11847, 11849, |
| | | | | | | | 11851, 11853, 11855, 11857, 11859, 11861, 11863, 11865, |
| | | | | | | | 11867, 11869, 11871, 11873, 11875, 11877, 11879, 11881, |
| | | | | | | | 11883, 11885, 11887, 11889, 11891, 11893, 11895, 11897, |
| | | | | | | | 11899, 11901, 11903, 11905, 11907, 11909, 11911, 11913, |
| | | | | | | | 11915, 11917, 11919, 11921, 11923, 11925, 11927, 11929, |
| | | | | | | | 11931, 11933, 11935, 11937, 11939, 11941, 11943, 11945, |
| | | | | | | | 11947, 11949, 11951, 11953, 11955, 11957, 11959, 11961, |
| | | | | | | | 11963, 11965, 11967, 11969, 11971, 11973, 11975, 11977, |
| | | | | | | | 11979, 11981, 11983, 11985, 11987, 11989, 11991, 11993, |
| | | | | | | | 11995, 11997, 11999, 12001, 12003, 12005, 12007, 12009, |
| | | | | | | | 12011, 12013, 12015, 12017, 12019, 12021, 12023, 12025, |
| | | | | | | | 12027, 12029, 12031, 12033, 12035, 12037, 12039, 12041, |
| | | | | | | | 12043, 12045, 12047, 12049, 12051, 12053, 12055, 12057, |
| | | | | | | | 12059, 12061, 12063, 12065, 12067, 12069, 12071, 12073, |
| | | | | | | | 12075, 12077, 12079, 12081, 12083, 12085, 12087, 12089, |
| | | | | | | | 12091, 12093, 12095, 12097, 12099, 12101, 12103, 12105, |
| | | | | | | | 12107, 12109, 12111, 12113, 12115, 12117, 12119, 12121, |
| | | | | | | | 12123, 12125, 12127, 12129, 12131, 12133 |
| 1 | 42 | NUE_OEX3 | AT2G35300 | A. th. | 12197 | cytoplasmic | 12199, 12201, 12203, 12205, 12207, 12209, 12211, 12213, |
| | | | | | | | 12215, 12217, 12219, 12221, 12223, 12225, 12227, 12229, |
| | | | | | | | 12231, 12233, 12235, 12237, 12239, 12241, 12243, 12245, |
| | | | | | | | 12247, 12249, 12251, 12253, 12255, 12257, 12259, 12261, |
| | | | | | | | 12263, 12265, 12267, 12269, 12271, 12273, 12275, 12277, |
| | | | | | | | 12279, 12281, 12283, 12285, 12287, 12289, 12291, 12293, |
| | | | | | | | 12295, 12297, 12299, 12301, 12303 |
| 1 | 43 | NUE_OEX3 | AT2G35930 | A. th. | 12317 | cytoplasmic | 12319, 12321, 12323, 12325, 12327, 12329, 12331, 12333, |
| | | | | | | | 12335, 12337, 12339, 12341, 12343, 12345, 12347, 12349, |
| | | | | | | | 12351, 12353, 12355, 12357, 12359, 12361, 12363, 12365, |
| | | | | | | | 12367, 12369, 12371, 12373, 12375, 12377, 12379, 12381, |
| | | | | | | | 12383, 12385, 12387, 12389, 12391, 12393, 12395, 12397, |
| | | | | | | | 12399, 12401, 12403, 12405, 12407, 12409, 12411, 12413, |
| | | | | | | | 12415, 12417, 12419, 12421, 12423, 12425, 12427, 12429, |
| | | | | | | | 12431, 12433, 12435, 12437, 12439, 12441, 12443, 12445, |
| | | | | | | | 12447, 12449, 12451, 12453, 12455, 12457, 12459, 12461, |
| | | | | | | | 12463, 12465, 12467, 12469, 12471, 12473, 12475, 12477, |
| | | | | | | | 12479, 12481, 12483, 12485, 12487, 12489, 12491, 12493, |
| | | | | | | | 12495, 12497, 12499, 12501, 12503, 12505, 12507, 12509, |
| | | | | | | | 12511, 12513, 12515, 12517, 12519, 12521, 12523, 12525, |
| | | | | | | | 12527, 12529, 12531, 12533, 12535, 12537, 12539, 12541, |
| | | | | | | | 12543, 12545, 12547, 12549, 12551, 12553, 12555, 12557 |
| 1 | 44 | NUE_OEX3 | AT3G04620 | A. th. | 12574 | cytoplasmic | 12576, 12578, 12580, 12582, 12584, 12586, 12588, 12590, |
| | | | | | | | 12592, 12594, 12596, 12598, 12600, 12602, 12604, 12606, |
| | | | | | | | 12608, 12610, 12612, 12614, 12616, 12618, 12620, 12622, |
| | | | | | | | 12624, 12626, 12628, 12630, 12632, 12634, 12636, 12638, |
| | | | | | | | 12640, 12642, 12644 |
| 1 | 45 | NUE_OEX3 | AT3G20960 | A. th. | 12669 | cytoplasmic | 12671, 12673, 12675, 12677, 12679, 12681, 12683, 12685, |
| | | | | | | | 12687, 12689, 12691, 12693, 12695, 12697, 12699, 12701, |
| | | | | | | | 12703, 12705, 12707, 12709, 12711, 12713, 12715, 12717, |
| | | | | | | | 12719, 12721, 12723, 12725, 12727, 12729, 12731, 12733, |
| | | | | | | | 12735, 12737, 12739, 12741, 12743, 12745, 12747, 12749, |
| | | | | | | | 12751, 12753, 12755, 12757, 12759, 12761, 12763, 12765, |
| | | | | | | | 12767, 12769, 12771, 12773, 12775, 12777, 12779, 12781, |
| | | | | | | | 12783, 12785, 12787, 12789, 12791, 12793, 12795, 12797, |
| | | | | | | | 12799, 12801, 12803, 12805, 12807, 12809, 12811, 12813, |
| | | | | | | | 12815, 12817, 12819, 12821, 12823, 12825, 12827, 12829, |
| | | | | | | | 12831, 12833, 12835, 12837, 12839, 12841, 12843, 12845, |
| | | | | | | | 12847, 12849, 12851, 12853, 12855, 12857, 12859, 12861, |
| | | | | | | | 12863, 12865, 12867, 12869, 12871, 12873, 12875, 12877, |
| | | | | | | | 12879, 12881, 12883, 12885, 12887, 12889, 12891, 12893, |
| | | | | | | | 12895, 12897, 12899, 12901, 12903, 12905, 12907, 12909, |
| | | | | | | | 12911, 12913, 12915, 12917, 12919, 12921, 12923, 12925, |
| | | | | | | | 12927, 12929, 12931, 12933, 12935, 12937 |
| 1 | 46 | NUE_OEX3 | AT3G61580.1 | A. th. | 13132 | cytoplasmic | 13134, 13136, 13138, 13140, 13142, 13144, 13146, 13148, |
| | | | | | | | 13150, 13152, 13154, 13156, 13158, 13160, 13162, 13164, |
| | | | | | | | 13166, 13168, 13170, 13172, 13174, 13176, 13178, 13180, |
| | | | | | | | 13182, 13184, 13186, 13188, 13190, 13192, 13194, 13196, |
| | | | | | | | 13198, 13200, 13202, 13204, 13206, 13208, 13210, 13212, |
| | | | | | | | 13214, 13216, 13218, 13220, 13222 |
| 1 | 47 | NUE_OEX3 | AT5G13220 | A. th. | 13277 | cytoplasmic | 13279, 13281, 13283, 13285, 13287, 13289, 13291, 13293, |
| | | | | | | | 13295, 13297, 13299 |
| 1 | 48 | NUE_OEX3 | CDS5394 | P. trichocarpa | 13437 | cytoplasmic | 13439, 13441, 13443, 13445, 13447, 13449, 13451, 13453, |
| | | | | | | | 13455, 13457, 13459, 13461, 13463 |
| 1 | 49 | NUE_OEX3 | CDS5401_truncated | P. trichocarpa | 13478 | cytoplasmic | 13480, 13482, 13484, 13486, 13488, 13490, 13492 |
| 1 | 50 | NUE_OEX3 | ZM06LC319_CORN_LOFI_151_2385_A | Zea | 13552 | cytoplasmic | 13554, 13556, 13558, 13560, 13562, 13564, 13566, 13568, |
| | | | | mays | | | 13570, 13572, 13574, 13576, 13578, 13580, 13582, 13584, |
| | | | | | | | 13586, 13588, 13590, 13592, 13594, 13596, 13598, 13600, |
| | | | | | | | 13602, 13604, 13606, 13608, 13610, 13612, 13614, 13616, |
| | | | | | | | 13618, 13620, 13622, 13624, 13626, 13628, 13630, 13632, |
| | | | | | | | 13634, 13636, 13638, 13640, 13642, 13644, 13646, 13648, |
| | | | | | | | 13650, 13652, 13654, 13656, 13658, 13660, 13662, 13664, |
| | | | | | | | 13666, 13668, 13670, 13672, 13674, 13676, 13678, 13680, |
| | | | | | | | 13682, 13684, 13686, 13688, 13690, 13692, 13694, 13696, |
| | | | | | | | 13698, 13700, 13702, 13704, 13706, 13708, 13710, 13712, |
| | | | | | | | 13714, 13716, 13718, 13720, 13722, 13724, 13726, 13728, |
| | | | | | | | 13730, 13732, 13734, 13736, 13738, 13740, 13742, 13744, |
| | | | | | | | 13746, 13748, 13750, 13752, 13754, 13756, 13758, 13760, |
| | | | | | | | 13762, 13764, 13766, 13768, 13770, 13772, 13774, 13776, |
| | | | | | | | 13778, 13780, 13782, 13784, 13786, 13788, 13790, 13792, |
| | | | | | | | 13794, 13796, 13798, 13800, 13802, 13804, 13806, 13808, |
| | | | | | | | 13810, 13812, 13814, 13816, 13818, 13820, 13822, 13824, |
| | | | | | | | 13826, 13828, 13830, 13832, 13834, 13836, 13838, 13840, |
| | | | | | | | 13842, 13844, 13846, 13848, 13850, 13852, 13854, 13856, |
| | | | | | | | 13858, 13860, 13862, 13864, 13866, 13868, 13870, 13872, |
| | | | | | | | 13874, 13876, 13878, 13880, 13882, 13884, 13886, 13888, |
| | | | | | | | 13890, 13892, 13894, 13896 |
| 1 | 51 | NUE_OEX3 | AT4G15420.1 | A. th. | 13246 | cytoplasmic | 13248, 13250, 13252, 13254, 13256, 13258, 13260, 13262, |
| | | | | | | | 13264 |
| 1 | 52 | NUE_OEX3 | 60952769.R01.1 | Zea | 10754 | cytoplasmic | 10756, 10758, 10760, 10762, 10764, 10766, 10768, 10770, |
| | | | | mays. | | | 10772, 10774, 10776, 10778, 10780, 10782 |
| 1 | 53 | NUE_OEX3 | AT5G42380 | A. th. | 13310 | cytoplasmic | 13312, 13314, 13316, 13318, 13320, 13322, 13324, 13326, |
| | | | | | | | 13328, 13330, 13332, 13334, 13336, 13338, 13340, 13342, |
| | | | | | | | 13344, 13346, 13348, 13350, 13352, 13354, 13356, 13358, |
| | | | | | | | 13360, 13362, 13364, 13366, 13368, 13370, 13372, 13374, |
| | | | | | | | 13376 |
| 1 | 54 | NUE_OEX3 | 57972199.R01.1 | Zea | 10750 | cytoplasmic | — |
| | | | | mays | | | |
| 1 | 55 | NUE_OEX3 | OS02G44730 | O. sativa | 13502 | cytoplasmic | 13504, 13506, 13508, 13510, 13512, 13514, 13516, 13518, |
| | | | | | | | 13520, 13522, 13524, 13526, 13528, 13530, 13532, 13534, |
| | | | | | | | 13536, 13538, 13540 |
| 1 | 56 | NUE_OEX3 | AT3G24515 | A. th. | 13103 | cytoplasmic | 13105, 13107, 13109, 13111, 13113, 13115 |

TABLE IIB
Amino acid sequence ID numbers

| | | | | | 5. | | |
|---|---|---|---|---|---|---|---|
| | 1. | 2. | 3. | 4. | Lead | 6. | 7. |
| Application | Hit | Project | Locus | Organism | SEQ ID | Target | SEQ IDs of Polypeptide Homologs |
| 1 | 1 | NUE_OEX3 | AT1G06620_modified | A. th. | 64 | cytoplasmic | 314, 316, 318, 320, 322, 324, 326, 328, 330, 332, 334, 336, 338, |
| | | | | | | | 340, 342, 344, 346, 348, 350, 352, 354, 356, 358, 360, 362, 364, |
| | | | | | | | 366, 368, 370, 372, 374, 376 |
| 1 | 2 | NUE_OEX3 | AT1G06680.1 | A. th. | 385 | cytoplasmic | 475, 477, 479, 481, 483, 485, 487, 489, 491, 493 |
| 1 | 3 | NUE_OEX3 | AT1G14130.1 | A. th. | 505 | cytoplasmic | 547, 549, 551, 553, 555, 557, 559, 561, 563, 565, 567, 569, 571, |
| | | | | | | | 573, 575, 577, 579, 581, 583, 585, 587, 589, 591, 593, 595, 597, |
| | | | | | | | 599, 601 |
| 1 | 4 | NUE_OEX3 | AT1G20810.1_modified | A. th. | 608 | cytoplasmic | 626, 628, 630, 632 |
| 1 | 5 | NUE_OEX3 | AT1G53885 | A. th. | 642 | cytoplasmic | 660, 662, 664, 666 |
| 1 | 6 | NUE_OEX3 | At2G38730.1 | A. th. | 673 | cytoplasmic | 1379, 1381, 1383, 1385, 1387, 1389, 1391, 1393, 1395, 1397, |
| | | | | | | | 1399, 1401, 1403, 1405, 1407, 1409, 1411, 1413, 1415, 1417, |
| | | | | | | | 1419, 1421, 1423, 1425, 1427, 1429, 1431, 1433, 1435, 1437, |
| | | | | | | | 1439, 1441, 1443, 1445, 1447, 1449, 1451, 1453, 1455, 1457, |
| | | | | | | | 1459, 1461, 1463, 1465, 1467, 1469, 1471, 1473, 1475, 1477, |
| | | | | | | | 1479, 1481, 1483, 1485, 1487, 1489, 1491, 1493, 1495, 1497, |
| | | | | | | | 1499, 1501, 1503, 1505, 1507, 1509, 1511, 1513, 1515, 1517, |
| | | | | | | | 1519, 1521, 1523, 1525, 1527, 1529, 1531, 1533, 1535, 1537, |
| | | | | | | | 1539, 1541, 1543 |
| 1 | 7 | NUE_OEX3 | AT3G01150.1_truncated | A. th. | 1552 | cytoplasmic | 1620, 1622 |
| 1 | 8 | NUE_OEX3 | AT5G47440_modified | A. th. | 1629 | cytoplasmic | 1691, 1693, 1695, 1697, 1699, 1701 |
| 1 | 9 | NUE_OEX3 | B1208 | E. coli | 1710 | plastidic | 2220 |
| 1 | 10 | NUE_OEX3 | B4214 | E. coli | 2227 | plastidic | 2447, 2449, 2451 |
| 1 | 11 | NUE_OEX3 | CDS5293_modified | P. trichocarpa | 2458 | cytoplasmic | 3410, 3412, 3414, 3416, 3418, 3420, 3422, 3424, 3426, 3428, |
| | | | | | | | 3430, 3432, 3434, 3436, 3438, 3440, 3442, 3444, 3446, 3448, |
| | | | | | | | 3450, 3452, 3454, 3456 |
| 1 | 12 | NUE_OEX3 | CDS5305 | P. trichocarpa | 3464 | cytoplasmic | 3758, 3760, 3762, 3764, 3766, 3768, 3770, 3772, 3774, 3776, |
| | | | | | | | 3778, 3780, 3782, 3784, 3786 |
| 1 | 13 | NUE_OEX3 | CDS5397 | P. trichocarpa | 3795 | cytoplasmic | 4579, 4581, 4583, 4585, 4587, 4589, 4591, 4593, 4595, 4597, |
| | | | | | | | 4599, 4601, 4603, 4605, 4607, 4609, 4611, 4613, 4615, 4617 |
| 1 | 14 | NUE_OEX3 | TTC1186 | T. thermophilus | 4631 | cytoplasmic | — |
| 1 | 15 | NUE_OEX3 | YKL124W | S. cerevisiae | 5043 | cytoplasmic | — |
| 1 | 16 | NUE_OEX3 | YNL093W | S. cerevisiae | 5070 | cytoplasmic | 5250, 5252, 5254, 5256, 5258, 5260, 5262, 5264, 5266, 5268, |
| | | | | | | | 5270, 5272, 5274, 5276, 5278, 5280, 5282, 5284, 5286, 5288, |
| | | | | | | | 5290, 5292, 5294, 5296, 5298, 5300, 5302, 5304, 5306, 5308, |
| | | | | | | | 5310, 5312, 5314, 5316, 5318, 5320, 5322, 5324, 5326, 5328, |
| | | | | | | | 5330, 5332, 5334, 5336, 5338, 5340, 5342, 5344, 5346, 5348, |
| | | | | | | | 5350, 5352, 5354, 5356, 5358, 5360, 5362, 5364, 5366, 5368, |
| | | | | | | | 5370, 5372, 5374, 5376, 5378, 5380, 5382, 5384, 5386, 5388, |
| | | | | | | | 5390, 5392, 5394, 5396, 5398, 5400, 5402, 5404, 5406, 5408, |
| | | | | | | | 5410, 5412, 5414, 5416, 5418, 5420, 5422, 5424, 5426, 5428, |
| | | | | | | | 5430, 5432, 5434, 5436, 5438, 5440, 5442, 5444, 5446, 5448, |
| | | | | | | | 5450, 5452, 5454, 5456, 5458, 5460, 5462, 5464, 5466, 5468, |
| | | | | | | | 5470, 5472, 5474, 5476, 5478, 5480, 5482, 5484, 5486 |
| 1 | 17 | NUE_OEX3 | ZM_7266_BQ538406_CORN_LOFI_344_730_B | Zea | 5493 | cytoplasmic | 5709, 5711, 5713, 5715, 5717, 5719, 5721, 5723, 5725, 5727, |
| | | | | mays | | | 5729, 5731, 5733, 5735, 5737, 5739, 5741, 5743, 5745, 5747, |
| | | | | | | | 5749, 5751, 5753, 5755, 5757, 5759, 5761, 5763, 5765, 5767, |
| | | | | | | | 5769, 5771, 5773, 5775, 5777, 5779, 5781, 5783, 5785, 5787, |
| | | | | | | | 5789, 5791, 5793, 5795, 5797, 5799, 5801, 5803, 5805, 5807, |
| | | | | | | | 5809, 5811, 5813, 5815, 5817, 5819, 5821, 5823, 5825, 5827, |
| | | | | | | | 5829, 5831, 5833 |
| 1 | 18 | NUE_OEX3 | At1G29250.1 | A. th. | 5839 | cytoplasmic | 5943, 5945, 5947, 5949, 5951, 5953, 5955, 5957, 5959, 5961, |
| | | | | | | | 5963, 5965, 5967, 5969, 5971, 5973, 5975 |
| 1 | 19 | NUE_OEX3 | AT1G55920.1 | A. th. | 5983 | cytoplasmic | 6465, 6467, 6469, 6471, 6473, 6475, 6477, 6479, 6481, 6483 |
| 1 | 20 | NUE_OEX3 | AT3G09480 | A. th. | 6495 | cytoplasmic | 7217, 7219, 7221, 7223, 7225, 7227, 7229, 7231, 7233, 7235, |
| | | | | | | | 7237, 7239, 7241, 7243, 7245, 7247, 7249, 7251, 7253, 7255, |
| | | | | | | | 7257, 7259, 7261, 7263, 7265, 7267, 7269, 7271, 7273, 7275, |
| | | | | | | | 7277, 7279, 7281, 7283, 7285, 7287, 7289, 7291, 7293, 7295, |
| | | | | | | | 7297, 7299, 7301, 7303, 7305, 7307, 7309, 7311, 7313, 7315, |
| | | | | | | | 7317, 7319, 7321, 7323, 7325, 7327, 7329, 7331, 7333, 7335, |
| | | | | | | | 7337, 7339, 7341, 7343, 7345, 7347, 7349, 7351, 7353, 7355, |
| | | | | | | | 7357 |
| 1 | 21 | NUE_OEX3 | AT4G01870 | A. th. | 7365 | cytoplasmic | 7417 |
| 1 | 22 | NUE_OEX3 | AT4G11890 | A. th. | 7435 | cytoplasmic | 7477, 7479, 7481, 7483, 7485, 7487, 7489, 7491, 7493, 7495, |
| | | | | | | | 7497, 7499, 7501, 7503, 7505 |
| 1 | 23 | NUE_OEX3 | AT5G07310 | A. th. | 7514 | cytoplasmic | 7534, 7536, 7538 |
| 1 | 24 | NUE_OEX3 | CDS5422 | P. trichocarpa | 7546 | cytoplasmic | 7696, 7698, 7700, 7702, 7704, 7706, 7708, 7710 |
| 1 | 25 | NUE_OEX3 | AT1G03905.1 | A. th. | 7722 | cytoplasmic | 7838, 7840, 7842, 7844, 7846, 7848, 7850, 7852, 7854, 7856 |
| 1 | 26 | NUE_OEX3 | AT4G22240.1 | A. th. | 8288 | cytoplasmic | 8382, 8384, 8386, 8388, 8390, 8392, 8394, 8396, 8398, 8400 |
| 1 | 27 | NUE_OEX3 | AT1G09350.1 | A. th. | 7865 | cytoplasmic | 8029, 8031, 8033, 8035, 8037, 8039, 8041, 8043, 8045, 8047, |
| | | | | | | | 8049, 8051, 8053 |
| 1 | 28 | NUE_OEX3 | AT1G30135.1 | A. th. | 8065 | cytoplasmic | 8095, 8097 |
| 1 | 29 | NUE_OEX3 | AT1G35680.1 | A. th. | 8105 | cytoplasmic | 8137, 8139, 8141, 8143, 8145, 8147 |
| 1 | 30 | NUE_OEX3 | AT2G42540.1 | A. th. | 8153 | cytoplasmic | 8199 |
| 1 | 31 | NUE_OEX3 | AT3G02990.1 | A. th. | 8207 | cytoplasmic | 8269, 8271, 8273, 8275, 8277 |
| 1 | 32 | NUE_OEX3 | At5g37670.1 | A. th. | 8409 | cytoplasmic | 8703, 8705, 8707, 8709, 8711, 8713, 8715, 8717, 8719, 8721, |
| | | | | | | | 8723, 8725, 8727, 8729, 8731, 8733, 8735, 8737, 8739, 8741, |
| | | | | | | | 8743, 8745, 8747, 8749, 8751, 8753, 8755, 8757, 8759, 8761, |
| | | | | | | | 8763, 8765, 8767, 8769, 8771, 8773, 8775, 8777, 8779, 8781, |
| | | | | | | | 8783, 8785, 8787, 8789, 8791, 8793, 8795, 8797, 8799, 8801, |
| | | | | | | | 8803, 8805, 8807, 8809, 8811, 8813, 8815, 8817, 8819, 8821, |
| | | | | | | | 8823, 8825, 8827, 8829, 8831, 8833, 8835, 8837 |
| 1 | 33 | NUE_OEX3 | CDS5376 | P. trichocarpa | 8843 | cytoplasmic | 9787, 9789, 9791, 9793, 9795, 9797, 9799, 9801, 9803, 9805, |
| | | | | | | | 9807, 9809, 9811, 9813, 9815, 9817, 9819, 9821, 9823, 9825, |
| | | | | | | | 9827, 9829, 9831, 9833, 9835, 9837, 9839, 9841 |
| 1 | 34 | NUE_OEX3 | LOC_Os02g13560.1 | O. sativa | 9855 | cytoplasmic | 9961, 9963 |
| 1 | 35 | NUE_OEX3 | YCR024C | S. cerevisiae | 9982 | cytoplasmic | 10744 |
| 1 | 36 | NUE_OEX3 | AT1G05100_truncated | A. th. | 10799 | cytoplasmic | 10825, 10827, 10829 |
| 1 | 37 | NUE_OEX3 | AT1G09450 | A. th. | 10839 | cytoplasmic | — |
| 1 | 38 | NUE_OEX3 | AT1G44760 | A. th. | 10881 | cytoplasmic | 10951, 10953, 10955, 10957 |
| 1 | 39 | NUE_OEX3 | AT1G54050.1 | A. th. | 10966 | cytoplasmic | 11304, 11306, 11308, 11310, 11312, 11314, 11316, 11318, |
| | | | | | | | 11320, 11322, 11324, 11326, 11328, 11330, 11332, 11334, |
| | | | | | | | 11336, 11338, 11340, 11342, 11344, 11346, 11348, 11350, |
| | | | | | | | 11352, 11354, 11356, 11358, 11360, 11362, 11364, 11366, |
| | | | | | | | 11368, 11370, 11372, 11374, 11376, 11378, 11380, 11382, |
| | | | | | | | 11384, 11386, 11388, 11390, 11392, 11394, 11396, 11398, |
| | | | | | | | 11400, 11402, 11404, 11406, 11408, 11410, 11412 |
| 1 | 40 | NUE_OEX3 | AT2G27040 | A. th. | 11419 | cytoplasmic | 11733, 11735, 11737, 11739 |
| 1 | 41 | NUE_OEX3 | AT2G29490 | A. th. | 11753 | cytoplasmic | 12135, 12137, 12139, 12141, 12143, 12145, 12147, 12149, |
| | | | | | | | 12151, 12153, 12155, 12157, 12159, 12161, 12163, 12165, |
| | | | | | | | 12167, 12169, 12171, 12173, 12175, 12177, 12179, 12181, |
| | | | | | | | 12183, 12185, 12187, 12189 |
| 1 | 42 | NUE_OEX3 | AT2G35300 | A. th. | 12197 | cytoplasmic | 12305, 12307, 12309, 12311 |
| 1 | 43 | NUE_OEX3 | AT2G35930 | A. th. | 12317 | cytoplasmic | 12559, 12561, 12563, 12565, 12567 |
| 1 | 44 | NUE_OEX3 | AT3G04620 | A. th. | 12574 | cytoplasmic | 12646, 12648, 12650, 12652, 12654, 12656, 12658, 12660, |
| | | | | | | | 12662 |
| 1 | 45 | NUE_OEX3 | AT3G20960 | A. th. | 12669 | cytoplasmic | 12939, 12941, 12943, 12945, 12947, 12949, 12951, 12953, |
| | | | | | | | 12955, 12957, 12959, 12961, 12963, 12965, 12967, 12969, |
| | | | | | | | 12971, 12973, 12975, 12977, 12979, 12981, 12983, 12985, |
| | | | | | | | 12987, 12989, 12991, 12993, 12995, 12997, 12999, 13001, |
| | | | | | | | 13003, 13005, 13007, 13009, 13011, 13013, 13015, 13017, |
| | | | | | | | 13019, 13021, 13023, 13025, 13027, 13029, 13031, 13033, |
| | | | | | | | 13035, 13037, 13039, 13041, 13043, 13045, 13047, 13049, |
| | | | | | | | 13051, 13053, 13055, 13057, 13059, 13061, 13063, 13065, |
| | | | | | | | 13067, 13069, 13071, 13073, 13075, 13077, 13079, 13081, |
| | | | | | | | 13083, 13085, 13087, 13089, 13091, 13093, 13095, 13097 |
| 1 | 46 | NUE_OEX3 | AT3G61580.1 | A. th. | 13132 | cytoplasmic | 13224, 13226, 13228, 13230 |
| 1 | 47 | NUE_OEX3 | AT5G13220 | A. th. | 13277 | cytoplasmic | 13301, 13303 |
| 1 | 48 | NUE_OEX3 | CDS5394 | P. trichocarpa | 13437 | cytoplasmic | 13465 |
| 1 | 49 | NUE_OEX3 | CDS5401_truncated | P. trichocarpa | 13478 | cytoplasmic | — |
| 1 | 50 | NUE_OEX3 | ZM06LC319_CORN_LOFI_151_2385_A | Zea | 13552 | cytoplasmic | 13898, 13900, 13902, 13904, 13906, 13908, 13910, 13912, |
| | | | | mays | | | 13914, 13916, 13918, 13920, 13922, 13924 |
| 1 | 51 | NUE_OEX3 | AT4G15420.1 | A. th. | 13246 | cytoplasmic | 13266, 13268 |
| 1 | 52 | NUE_OEX3 | 60952769.R01.1 | Zea | 10754 | cytoplasmic | 10784, 10786, 10788 |
| | | | | mays. | | | |
| 1 | 53 | NUE_OEX3 | AT5G42380 | A. th. | 13310 | cytoplasmic | 13378, 13380, 13382, 13384, 13386, 13388, 13390, 13392, |
| | | | | | | | 13394, 13396, 13398, 13400, 13402, 13404, 13406, 13408, |
| | | | | | | | 13410, 13412, 13414, 13416, 13418, 13420, 13422, 13424, |
| | | | | | | | 13426, 13428, 13430 |
| 1 | 54 | NUE_OEX3 | 57972199.R01.1 | Zea | 10750 | cytoplasmic | — |
| | | | | mays | | | |
| 1 | 55 | NUE_OEX3 | OS02G44730 | O. sativa | 13502 | cytoplasmic | 13542, 13544 |
| 1 | 56 | NUE_OEX3 | AT3G24515 | A. th. | 13103 | cytoplasmic | — |

TABLE III
Primer nucleic acid sequence ID numbers

| | | | | | 5. | | 7. |
|---|---|---|---|---|---|---|---|
| | 1. | 2. | 3. | 4. | Lead | 6. | SEQ IDs of |
| Application | Hit | Project | Locus | Organism | SEQ ID | Target | Primers |
| 1 | 1 | NUE_OEX3 | AT1G06620_modified | A. th. | 63 | cytoplasmic | 377, 378 |
| 1 | 2 | NUE_OEX3 | AT1G06680.1 | A. th. | 384 | cytoplasmic | 494, 495 |
| 1 | 3 | NUE_OEX3 | AT1G14130.1 | A. th. | 504 | cytoplasmic | 602, 603 |
| 1 | 4 | NUE_OEX3 | AT1G20810.1_modified | A. th. | 607 | cytoplasmic | 633, 634 |
| 1 | 5 | NUE_OEX3 | AT1G53885 | A. th. | 641 | cytoplasmic | 667, 668 |
| 1 | 6 | NUE_OEX3 | At2G38730.1 | A. th. | 672 | cytoplasmic | 1544, 1545 |
| 1 | 7 | NUE_OEX3 | AT3G01150.1_truncated | A. th. | 1551 | cytoplasmic | 1623, 1624 |
| 1 | 8 | NUE_OEX3 | AT5G47440_modified | A. th. | 1628 | cytoplasmic | 1702, 1703 |
| 1 | 9 | NUE_OEX3 | B1208 | E. coli | 1709 | plastidic | 2221, 2222 |
| 1 | 10 | NUE_OEX3 | B4214 | E. coli | 2226 | plastidic | 2452, 2453 |
| 1 | 11 | NUE_OEX3 | CDS5293_modified | P. trichocarpa | 2457 | cytoplasmic | 3457, 3458 |
| 1 | 12 | NUE_OEX3 | CDS5305 | P. trichocarpa | 3463 | cytoplasmic | 3787, 3788 |
| 1 | 13 | NUE_OEX3 | CDS5397 | P. trichocarpa | 3794 | cytoplasmic | 4618, 4619 |
| 1 | 14 | NUE_OEX3 | TTC1186 | T. thermophilus | 4630 | cytoplasmic | 5036, 5037 |
| 1 | 15 | NUE_OEX3 | YKL124W | S. cerevisiae | 5042 | cytoplasmic | 5058, 5059 |
| 1 | 16 | NUE_OEX3 | YNL093W | S. cerevisiae | 5069 | cytoplasmic | 5487, 5488 |
| 1 | 17 | NUE_OEX3 | ZM_7266_BQ538406_CORN_LOFI_344_730_B | Zea | 5492 | cytoplasmic | 5834, 5835 |
| | | | | mays | | | |
| 1 | 18 | NUE_OEX3 | At1G29250.1 | A. th. | 5838 | cytoplasmic | 5976, 5977 |
| 1 | 19 | NUE_OEX3 | AT1G55920.1 | A. th. | 5982 | cytoplasmic | 6484, 6485 |
| 1 | 20 | NUE_OEX3 | AT3G09480 | A. th. | 6494 | cytoplasmic | 7358, 7359 |
| 1 | 21 | NUE_OEX3 | AT4G01870 | A. th. | 7364 | cytoplasmic | 7418, 7419 |
| 1 | 22 | NUE_OEX3 | AT4G11890 | A. th. | 7434 | cytoplasmic | 7506, 7507 |
| 1 | 23 | NUE_OEX3 | AT5G07310 | A. th. | 7513 | cytoplasmic | 7539, 7540 |
| 1 | 24 | NUE_OEX3 | CDS5422 | P. trichocarpa | 7545 | cytoplasmic | 7711, 7712 |
| 1 | 25 | NUE_OEX3 | AT1G03905.1 | A. th. | 7721 | cytoplasmic | 7857, 7858 |
| 1 | 26 | NUE_OEX3 | AT4G22240.1 | A. th. | 8287 | cytoplasmic | 8401, 8402 |
| 1 | 27 | NUE_OEX3 | AT1G09350.1 | A. th. | 7864 | cytoplasmic | 8054, 8055 |
| 1 | 28 | NUE_OEX3 | AT1G30135.1 | A. th. | 8064 | cytoplasmic | 8098, 8099 |
| 1 | 29 | NUE_OEX3 | AT1G35680.1 | A. th. | 8104 | cytoplasmic | 8148, 8149 |
| 1 | 30 | NUE_OEX3 | AT2G42540.1 | A. th. | 8152 | cytoplasmic | 8200, 8201 |
| 1 | 31 | NUE_OEX3 | AT3G02990.1 | A. th. | 8206 | cytoplasmic | 8278, 8279 |
| 1 | 32 | NUE_OEX3 | At5g37670.1 | A. th. | 8408 | cytoplasmic | 8838, 8839 |
| 1 | 33 | NUE_OEX3 | CDS5376 | P. trichocarpa | 8842 | cytoplasmic | 9842, 9843 |
| 1 | 34 | NUE_OEX3 | LOC_Os02g13560.1 | O. sativa | 9854 | cytoplasmic | 9964, 9965 |
| 1 | 35 | NUE_OEX3 | YCR024C | S. cerevisiae | 9981 | cytoplasmic | 10745, 10746 |
| 1 | 36 | NUE_OEX3 | AT1G05100_truncated | A. th. | 10798 | cytoplasmic | 10830, 10831 |
| 1 | 37 | NUE_OEX3 | AT1G094500 | A. th. | 10838 | cytoplasmic | 10864, 10865 |
| 1 | 38 | NUE_OEX3 | AT1G44760 | A. th. | 10880 | cytoplasmic | 10958, 10959 |
| 1 | 39 | NUE_OEX3 | AT1G54050.1 | A. th. | 10965 | cytoplasmic | 11413, 11414 |
| 1 | 40 | NUE_OEX3 | AT2G27040 | A. th. | 11418 | cytoplasmic | 11740, 11741 |
| 1 | 41 | NUE_OEX3 | AT2G29490 | A. th. | 11752 | cytoplasmic | 12190, 12191 |
| 1 | 42 | NUE_OEX3 | AT2G35300 | A. th. | 12196 | cytoplasmic | 12312, 12313 |
| 1 | 43 | NUE_OEX3 | AT2G35930 | A. th. | 12316 | cytoplasmic | 12568, 12569 |
| 1 | 44 | NUE_OEX3 | AT3G04620 | A. th. | 12573 | cytoplasmic | 12663, 12664 |
| 1 | 45 | NUE_OEX3 | AT3G20960 | A. th. | 12668 | cytoplasmic | 13098, 13099 |
| 1 | 46 | NUE_OEX3 | AT3G61580.1 | A. th. | 13131 | cytoplasmic | 13231, 13232 |
| 1 | 47 | NUE_OEX3 | AT5G13220 | A. th. | 13276 | cytoplasmic | 13304, 13305 |
| 1 | 48 | NUE_OEX3 | CDS5394 | P. trichocarpa | 13436 | cytoplasmic | 13466, 13467 |
| 1 | 49 | NUE_OEX3 | CDS5401_truncated | P. trichocarpa | 13477 | cytoplasmic | 13493, 13494 |
| 1 | 50 | NUE_OEX3 | ZM06LC319_CORN_LOFI_151_2385_A | Zea | 13551 | cytoplasmic | 13925, 13926 |
| | | | | mays | | | |
| 1 | 51 | NUE_OEX3 | AT4G15420.1 | A. th. | 13245 | cytoplasmic | 13269, 13270 |
| 1 | 52 | NUE_OEX3 | 60952769.R01.1 | Zea | 10753 | cytoplasmic | 10789, 10790 |
| | | | | mays. | | | |
| 1 | 53 | NUE_OEX3 | AT5G42380 | A. th. | 13309 | cytoplasmic | 13431, 13432 |
| 1 | 54 | NUE_OEX3 | 57972199.R01.1 | Zea | 10749 | cytoplasmic | 10751, 10752 |
| | | | | mays | | | |
| 1 | 55 | NUE_OEX3 | OS02G44730 | O. sativa | 13501 | cytoplasmic | 13545, 13546 |
| 1 | 56 | NUE_OEX3 | AT3G24515 | A. th. | 13102 | cytoplasmic | 13116, 13117 |

TABLE IV
Consensus amino acid sequence ID numbers

| | | | | | 5. | | |
|---|---|---|---|---|---|---|---|
| | 1. | 2. | 3. | 4. | Lead | 6. | 7. |
| Application | Hit | Project | Locus | Organism | SEQ ID | Target | SEQ IDs of Consensus/Pattern Sequences |
| 1 | 1 | NUE_OEX3 | AT1G06620_modified | A. th. | 64 | cytoplasmic | 379, 380, 381, 382, 383 |
| 1 | 2 | NUE_OEX3 | AT1G06680.1 | A. th. | 385 | cytoplasmic | 496, 497, 498, 499, 500, 501, 502, 503 |
| 1 | 3 | NUE_OEX3 | AT1G14130.1 | A. th. | 505 | cytoplasmic | 604, 605, 606 |
| 1 | 4 | NUE_OEX3 | AT1G20810.1_modified | A. th. | 608 | cytoplasmic | 635, 636, 637, 638, 639, 640 |
| 1 | 5 | NUE_OEX3 | AT1G53885 | A. th. | 642 | cytoplasmic | 669, 670, 671 |
| 1 | 6 | NUE_OEX3 | At2G38730.1 | A. th. | 673 | cytoplasmic | 1546, 1547, 1548, 1549, 1550 |
| 1 | 7 | NUE_OEX3 | AT3G01150.1_truncated | A. th. | 1552 | cytoplasmic | 1625, 1626, 1627 |
| 1 | 8 | NUE_OEX3 | AT5G47440_modified | A. th. | 1629 | cytoplasmic | 1704, 1705, 1706, 1707, 1708 |
| 1 | 9 | NUE_OEX3 | B1208 | E. coli | 1710 | plastidic | 2223, 2224, 2225 |
| 1 | 10 | NUE_OEX3 | B4214 | E. coli | 2227 | plastidic | 2454, 2455, 2456 |
| 1 | 11 | NUE_OEX3 | CDS5293_modified | P. trichocarpa | 2458 | cytoplasmic | 3459, 3460, 3461, 3462 |
| 1 | 12 | NUE_OEX3 | CDS5305 | P. trichocarpa | 3464 | cytoplasmic | 3789, 3790, 3791, 3792, 3793 |
| 1 | 13 | NUE_OEX3 | CDS5397 | P. trichocarpa | 3795 | cytoplasmic | 4620, 4621, 4622, 4623, 4624, 4625, 4626, 4627, 4628, 4629 |
| 1 | 14 | NUE_OEX3 | TTC1186 | T. thermophilus | 4631 | cytoplasmic | 5038, 5039, 5040, 5041 |
| 1 | 15 | NUE_OEX3 | YKL124W | S. cerevisiae | 5043 | cytoplasmic | 5060, 5061, 5062, 5063, 5064, 5065, 5066, 5067, 5068 |
| 1 | 16 | NUE_OEX3 | YNL093W | S. cerevisiae | 5070 | cytoplasmic | 5489, 5490, 5491 |
| 1 | 17 | NUE_OEX3 | ZM_7266_BQ538406_CORN_LOFI_344_730_B | Zea | 5493 | cytoplasmic | 5836, 5837 |
| | | | | mays | | | |
| 1 | 18 | NUE_OEX3 | At1G29250.1 | A. th. | 5839 | cytoplasmic | 5978, 5979, 5980, 5981 |
| 1 | 19 | NUE_OEX3 | AT1G55920.1 | A. th. | 5983 | cytoplasmic | 6486, 6487, 6488, 6489, 6490, 6491, 6492, 6493 |
| 1 | 20 | NUE_OEX3 | AT3G09480 | A. th. | 6495 | cytoplasmic | 7360, 7361, 7362, 7363 |
| 1 | 21 | NUE_OEX3 | AT4G01870 | A. th. | 7365 | cytoplasmic | 7420, 7421, 7422, 7423, 7424, 7425, 7426, 7427, 7428, 7429, |
| | | | | | | | 7430, 7431, 7432, 7433 |
| 1 | 22 | NUE_OEX3 | AT4G11890 | A. th. | 7435 | cytoplasmic | 7508, 7509, 7510, 7511, 7512 |
| 1 | 23 | NUE_OEX3 | AT5G07310 | A. th. | 7514 | cytoplasmic | 7541, 7542, 7543, 7544 |
| 1 | 24 | NUE_OEX3 | CDS5422 | P. trichocarpa | 7546 | cytoplasmic | 7713, 7714, 7715, 7716, 7717, 7718, 7719, 7720 |
| 1 | 25 | NUE_OEX3 | AT1G03905.1 | A. th. | 7722 | cytoplasmic | 7859, 7860, 7861, 7862, 7863 |
| 1 | 26 | NUE_OEX3 | AT4G22240.1 | A. th. | 8288 | cytoplasmic | 8403, 8404, 8405, 8406, 8407 |
| 1 | 27 | NUE_OEX3 | AT1G09350.1 | A. th. | 7865 | cytoplasmic | 8056, 8057, 8058, 8059, 8060, 8061, 8062, 8063 |
| 1 | 28 | NUE_OEX3 | AT1G30135.1 | A. th. | 8065 | cytoplasmic | 8100, 8101, 8102, 8103 |
| 1 | 29 | NUE_OEX3 | AT1G35680.1 | A. th. | 8105 | cytoplasmic | 8150, 8151 |
| 1 | 30 | NUE_OEX3 | AT2G42540.1 | A. th. | 8153 | cytoplasmic | 8202, 8203, 8204, 8205 |
| 1 | 31 | NUE_OEX3 | AT3G02990.1 | A. th. | 8207 | cytoplasmic | 8280, 8281, 8282, 8283, 8284, 8285, 8286 |
| 1 | 32 | NUE_OEX3 | At5g37670.1 | A. th. | 8409 | cytoplasmic | 8840, 8841 |
| 1 | 33 | NUE_OEX3 | CDS5376 | P. trichocarpa | 8843 | cytoplasmic | 9844, 9845, 9846, 9847, 9848, 9849, 9850, 9851, 9852, 9853 |
| 1 | 34 | NUE_OEX3 | LOC_Os02g13560.1 | O. sativa | 9855 | cytoplasmic | 9966, 9967, 9968, 9969, 9970, 9971, 9972, 9973, 9974, 9975, |
| | | | | | | | 9976, 9977, 9978, 9979, 9980 |
| 1 | 35 | NUE_OEX3 | YCR024C | S. cerevisiae | 9982 | cytoplasmic | 10747, 10748 |
| 1 | 36 | NUE_OEX3 | AT1G05100_truncated | A. th. | 10799 | cytoplasmic | 10832, 10833, 10834, 10835, 10836, 10837 |
| 1 | 37 | NUE_OEX3 | AT1G09450 | A. th. | 10839 | cytoplasmic | 10866, 10867, 10868, 10869, 10870, 10871, 10872, 10873, |
| | | | | | | | 10874, 10875, 10876, 10877, 10878, 10879 |
| 1 | 38 | NUE_OEX3 | AT1G44760 | A. th. | 10881 | cytoplasmic | 10960, 10961, 10962, 10963, 10964 |
| 1 | 39 | NUE_OEX3 | AT1G54050.1 | A. th. | 10966 | cytoplasmic | 11415, 11416, 11417 |
| 1 | 40 | NUE_OEX3 | AT2G27040 | A. th. | 11419 | cytoplasmic | 11742, 11743, 11744, 11745, 11746, 11747, 11748, 11749, |
| | | | | | | | 11750, 11751 |
| 1 | 41 | NUE_OEX3 | AT2G29490 | A. th. | 11753 | cytoplasmic | 12192, 12193, 12194, 12195 |
| 1 | 42 | NUE_OEX3 | AT2G35300 | A. th. | 12197 | cytoplasmic | 12314, 12315 |
| 1 | 43 | NUE_OEX3 | AT2G35930 | A. th. | 12317 | cytoplasmic | 12570, 12571, 12572 |
| 1 | 44 | NUE_OEX3 | AT3G04620 | A. th. | 12574 | cytoplasmic | 12665, 12666, 12667 |
| 1 | 45 | NUE_OEX3 | AT3G20960 | A. th. | 12669 | cytoplasmic | 13100, 13101 |
| 1 | 46 | NUE_OEX3 | AT3G61580.1 | A. th. | 13132 | cytoplasmic | 13233, 13234, 13235, 13236, 13237, 13238, 13239, 13240, |
| | | | | | | | 13241, 13242, 13243, 13244 |
| 1 | 47 | NUE_OEX3 | AT5G13220 | A. th. | 13277 | cytoplasmic | 13306, 13307, 13308 |
| 1 | 48 | NUE_OEX3 | CDS5394 | P. trichocarpa | 13437 | cytoplasmic | 13468, 13469, 13470, 13471, 13472, 13473, 13474, 13475, |
| | | | | | | | 13476 |
| 1 | 49 | NUE_OEX3 | CDS5401_truncated | P. trichocarpa | 13478 | cytoplasmic | 13495, 13496, 13497, 13498, 13499, 13500 |
| 1 | 50 | NUE_OEX3 | ZM06LC319_CORN_LOFI_151_2385_A | Zea | 13552 | cytoplasmic | 13927, 13928, 13929, 13930, 13931, 13932 |
| | | | | mays | | | |
| 1 | 51 | NUE_OEX3 | AT4G15420.1 | A. th. | 13246 | cytoplasmic | 13271, 13272, 13273, 13274, 13275 |
| 1 | 52 | NUE_OEX3 | 60952769.R01.1 | Zea | 10754 | cytoplasmic | 10791, 10792, 10793, 10794, 10795, 10796, 10797 |
| | | | | mays. | | | |
| 1 | 53 | NUE_OEX3 | AT5G42380 | A. th. | 13310 | cytoplasmic | 13433, 13434, 13435 |
| 1 | 54 | NUE_OEX3 | 57972199.R01.1 | Zea | 10750 | cytoplasmic | — |
| | | | | mays | | | |
| 1 | 55 | NUE_OEX3 | OS02G44730 | O. sativa | 13502 | cytoplasmic | 13547, 13548, 13549, 13550 |
| 1 | 56 | NUE_OEX3 | AT3G24515 | A. th. | 13103 | cytoplasmic | 13118, 13119, 13120, 13121, 13122, 13123, 13124, 13125, |
| | | | | | | | 13126, 13127, 13128, 13129, 13130 |

1. A method for producing a plant with increased yield as compared to a corresponding wild type plant whereby the method comprises at least the following step: increasing or generating in a plant or a part thereof one or more activities of a polypeptide selected from the group consisting of 2-oxoglutarate-dependent dioxygenase, 3-ketoacylCoA thiolase, 3′-phosphoadenosine 5′-phosphate phosphatase, 4-diphosphocytidyl-2-C-methyl-D-erythritol kinase, 50S chloroplast ribosomal protein L21, 57972199.R01.1-protein, 60952769.R01.1-protein, 60S ribosomal protein, ABC transporter family protein, AP2 domain-containing transcription factor, argonaute protein, AT1G29250.1-protein, AT1G53885-protein, AT2G35300-protein, AT3G04620-protein, AT4G01870-protein, AT5G42380-protein, AT5G47440-protein, CDS5394-protein, CDS5401_TRUNCATEDprotein, cold response protein, cullin, Cytochrome P450, delta-8 sphingolipid desaturase, galactinol synthase, glutathione-S-transferase, GTPase, haspin-related protein, heat shock protein, heat shock transcription factor, histone H2B, jasmonate-zim-domain protein, mitochondrial asparaginyl-tRNA synthetase, Oligosaccharyltransferase, OS02G44730-protein, Oxygen-evolving enhancer protein, peptidyl-prolyl cis-trans isomerase, peptidyl-prolyl cis-trans isomerase family protein, plastid lipid-associated protein, Polypyrimidine tract binding protein, PRLI-interacting factor, protein kinase, protein kinase family protein, rubisco subunit binding-protein beta subunit, serine acetyltransferase, serine hydroxymethyltransferase, small heat shock protein, S-ribosylhomocysteinase, sugar transporter, Thioredoxin H-type, ubiquitin-conjugating enzyme, ubiquitin-protein ligase, universal stress protein family protein, and Vacuolar protein.

2. A method for producing a plant with increased yield as compared to a corresponding wild type plant whereby the method comprises at least one of the steps selected from the group consisting of:
increasing or generating the activity of a polypeptide comprising a polypeptide, a consensus sequence or at least one polypeptide motif as depicted in column 5 or 7 of table II or of table IV, respectively;
(ii) increasing or generating the activity of an expression product encoded by a nucleic acid molecule comprising a polynucleotide as depicted in column 5 or 7 of table I, and
(iii) increasing or generating the activity of a functional equivalent of (i) or (ii).

3. The method of claim 1, comprising
(i) increasing or generating expression of at least one nucleic acid molecule;
(ii) increasing or generating expression of an expression product encoded by at least one nucleic acid molecule; and/or
(iii) increasing or generating one or more activities of an expression product encoded by at least one nucleic acid molecule;
whereby the at least one nucleic acid molecule comprises a nucleic acid molecule selected from the group consisting of:
(a) a nucleic acid molecule encoding the polypeptide shown in column 5 or 7 of table II;
(b) a nucleic acid molecule shown in column 5 or 7 of table I;
(c) a nucleic acid molecule, which, as a result of the degeneracy of the genetic code, can be derived from a polypeptide sequence depicted in column 5 or 7 of table II and confers an increased yield as compared to a corresponding non-transformed wild type plant cell, a transgenic plant or a part thereof;
(d) a nucleic acid molecule having around 70% or more identity with the nucleic acid molecule sequence of a polynucleotide comprising the nucleic acid molecule shown in column 5 or 7 of table I and confers an increased yield as compared to a corresponding non-transformed wild type plant cell, a transgenic plant or a part thereof;
(e) a nucleic acid molecule encoding a polypeptide having around 70% or more identity with the amino acid sequence of the polypeptide encoded by the nucleic acid molecule of (a) to (c) and having the activity represented by a nucleic acid molecule comprising a polynucleotide as depicted in column 5 of table I and confers an increased yield as compared to a corresponding non-transformed wild type plant cell, a transgenic plant or a part thereof;
(f) a nucleic acid molecule which hybridizes with a nucleic acid molecule of (a) to (c) under stringent hybridization conditions and confers an increased yield as compared to a corresponding non-transformed wild type plant cell, a transgenic plant or a part thereof;
(g) a nucleic acid molecule encoding a polypeptide which can be isolated with the aid of monoclonal or polyclonal antibodies made against a polypeptide encoded by one of the nucleic acid molecules of (a) to (e) and having the activity represented by the nucleic acid molecule comprising a polynucleotide as depicted in column 5 of table I;
(h) a nucleic acid molecule encoding a polypeptide comprising the consensus sequence or one or more polypeptide motifs as shown in column 7 of table IV and preferably having the activity represented by a nucleic acid molecule comprising a polynucleotide as depicted in column 5 of table II or IV;
(i) a nucleic acid molecule encoding a polypeptide having the activity represented by a protein as depicted in column 5 of table II and conferring increased yield as compared to a corresponding non-transformed wild type plant cell, a transgenic plant or a part thereof;
(j) a nucleic acid molecule which comprises a polynucleotide, which is obtained by amplifying a cDNA library or a genomic library using the primers in column 7 of table III and preferably having the activity represented by a nucleic acid molecule comprising a polynucleotide as depicted in column 5 of table II or IV; and
k) a nucleic acid molecule which is obtainable by screening a suitable nucleic acid library under stringent hybridization conditions with a probe comprising a complementary sequence of a nucleic acid molecule of (a) or (b) or with a fragment thereof, having around 50 nt or more of a nucleic acid molecule complementary to a nucleic acid molecule sequence characterized in (a) to (e) and encoding a polypeptide having the activity represented by a protein comprising a polypeptide as depicted in column 5 of table II.

4. A method for producing a transgenic plant with increased yield as compared to a corresponding non-transformed wild type plant, comprising transforming a plant cell or a plant cell nucleus or a plant tissue with a nucleic acid molecule comprising a nucleic acid molecule selected from the group consisting of:
(a) a nucleic acid molecule encoding the polypeptide shown in column 5 or 7 of table II;
(b) a nucleic acid molecule shown in column 5 or 7 of table I;
(c) a nucleic acid molecule, which, as a result of the degeneracy of the genetic code, can be derived from a polypeptide sequence depicted in column 5 or 7 of table II and confers an increased yield as compared to a corresponding non-transformed wild type plant cell, a transgenic plant or a part thereof;
(d) a nucleic acid molecule having at least around 70% identity with the nucleic acid molecule sequence of a polynucleotide comprising the nucleic acid molecule shown in column 5 or 7 of table I and confers an increased yield as compared to a corresponding non-transformed wild type plant cell, a transgenic plant or a part thereof;
(e) a nucleic acid molecule encoding a polypeptide having at least around 70% identity with the amino acid sequence of the polypeptide encoded by the nucleic acid molecule of (a) to (c) and having the activity represented by a nucleic acid molecule comprising a polynucleotide as depicted in column 5 of table I and confers an increased yield as compared to a corresponding non-transformed wild type plant cell, a transgenic plant or a part thereof;
(f) a nucleic acid molecule which hybridizes with a nucleic acid molecule of (a) to (c) under stringent hybridization conditions and confers an increased yield as compared to a corresponding non-transformed wild type plant cell, a transgenic plant or a part thereof;
(g) a nucleic acid molecule encoding a polypeptide which can be isolated with the aid of monoclonal or polyclonal antibodies made against a polypeptide encoded by one of the nucleic acid molecules of (a) to (e) and having the activity represented by the nucleic acid molecule comprising a polynucleotide as depicted in column 5 of table I;
(h) a nucleic acid molecule encoding a polypeptide comprising the consensus sequence or one or more polypeptide motifs as shown in column 7 of table IV and preferably having the activity represented by a nucleic acid molecule comprising a polynucleotide as depicted in column 5 of table II or IV;
(i) a nucleic acid molecule encoding a polypeptide having the activity represented by a protein as depicted in column 5 of table II and conferring increased yield as compared to a corresponding non-transformed wild type plant cell, a transgenic plant or a part thereof;
(j) a nucleic acid molecule which comprises a polynucleotide, which is obtained by amplifying a cDNA library or a genomic library using the primers in column 7 of table III and preferably having the activity represented by a nucleic acid molecule comprising a polynucleotide as depicted in column 5 of table II or IV; and
k) a nucleic acid molecule which is obtainable by screening a suitable nucleic acid library under stringent hybridization conditions with a probe comprising a complementary sequence of a nucleic acid molecule of (a) or (b) or with a fragment thereof, having at least around 400 nt of a nucleic acid molecule complementary to a nucleic acid molecule sequence characterized in (a) to (e) and encoding a polypeptide having the activity represented by a protein comprising a polypeptide as depicted in column 5 of table II,
and regenerating a transgenic plant from that transformed plant cell nucleus, plant cell or plant tissue with increased yield.

5. The method of claim 2, wherein the one or more activities increased or generated is of a polypeptide selected form the group consisting of 2-oxoglutarate-dependent dioxygenase, 3-ketoacyl-CoA thiolase, 3′-phosphoadenosine 5′-phosphate phosphatase, 4-diphosphocytidyl-2-C-methyl-D-erythritol kinase, 50S chloroplast ribosomal protein L21, 57972199.R01.1-protein, 60952769.R01.1-protein, 60S ribosomal protein, ABC transporter family protein, AP2 domain-containing transcription factor, argonaute protein, AT1G29250.1-protein, AT1G53885-protein, AT2G35300-protein, AT3G04620-protein, AT4G01870-protein, AT5G42380-protein, AT5G47440-protein, CDS5394-protein, CDS5401_TRUNCATEDprotein, cold response protein, cullin, Cytochrome P450, delta-8 sphingolipid desaturase, galactinol synthase, glutathione-S-transferase, GTPase, haspin-related protein, heat shock protein, heat shock transcription factor, histone H2B, jasmonate-zim-domain protein, mitochondrial asparaginyl-tRNA synthetase, Oligosaccharyltransferase, OS02G44730-protein, Oxygen-evolving enhancer protein, peptidyl-prolyl cis-trans isomerase, peptidyl-prolyl cis-trans isomerase family protein, plastid lipid-associated protein, Polypyrimidine tract binding protein, PRLI-interacting factor, protein kinase, protein kinase family protein, rubisco subunit binding-protein beta subunit, serine acetyltransferase, serine hydroxymethyltransferase, small heat shock protein, S-ribosylhomocysteinase, sugar transporter, Thioredoxin H-type, ubiquitin-conjugating enzyme, ubiquitin-protein ligase, universal stress protein family protein, and Vacuolar protein.

6. The method of claim 1, resulting in increased yield compared to a corresponding wild type plant under standard growth conditions, low temperature, drought or abiotic stress conditions.

7. An isolated nucleic acid molecule comprising a nucleic acid molecule selected from the group consisting of:
(a) a nucleic acid molecule encoding the polypeptide shown in column 5 or 7 of table II B;
(b) a nucleic acid molecule shown in column 5 or 7 of table I B;
(c) a nucleic acid molecule, which, as a result of the degeneracy of the genetic code, can be derived from a polypeptide sequence depicted in column 5 or 7 of table II and confers increased yield as compared to a corresponding non-transformed wild type plant cell, a transgenic plant or a part thereof;
(d) a nucleic acid molecule having at least about 70% identity with the nucleic acid molecule sequence of a polynucleotide comprising the nucleic acid molecule shown in column 5 or 7 of table I and conferring increased yield as compared to a corresponding non-transformed wild type plant cell, a transgenic plant or a part thereof;
(e) a nucleic acid molecule encoding a polypeptide having at least about 70% identity with the amino acid sequence of the polypeptide encoded by the nucleic acid molecule of (a) to (c) and having the activity represented by a nucleic acid molecule comprising a polynucleotide as depicted in column 5 of table I and confers increased yield as compared to a corresponding non-transformed wild type plant cell, a transgenic plant or a part thereof;
(f) a nucleic acid molecule which hybridizes with a nucleic acid molecule of (a) to (c) under stringent hybridization conditions and confers increased yield as compared to a corresponding non-transformed wild type plant cell, a transgenic plant or a part thereof;
(g) a nucleic acid molecule encoding a polypeptide which can be isolated with the aid of monoclonal or polyclonal antibodies made against a polypeptide encoded by one of the nucleic acid molecules of (a) to (e) and having the activity represented by the nucleic acid molecule comprising a polynucleotide as depicted in column 5 of table I;
(h) a nucleic acid molecule encoding a polypeptide comprising the consensus sequence or one or more polypeptide motifs as shown in column 7 of table IV and preferably having the activity represented by a nucleic acid molecule comprising a polynucleotide as depicted in column 5 of table II or IV;
(i) a nucleic acid molecule encoding a polypeptide having the activity represented by a protein as depicted in column 5 of table II and confers an increased yield as compared to a corresponding non-transformed wild type plant cell, a transgenic plant or a part thereof;
(j) nucleic acid molecule which comprises a polynucleotide, which is obtained by amplifying a cDNA library or a genomic library using the primers in column 7 of table III and preferably having the activity represented by a nucleic acid molecule comprising a polynucleotide as depicted in column 5 of table II or IV; and
(k) a nucleic acid molecule which is obtainable by screening a suitable nucleic acid library under stringent hybridization conditions with a probe comprising a complementary sequence of a nucleic acid molecule of (a) or (b) or with a fragment thereof, having at least 400 nt, of a nucleic acid molecule complementary to a nucleic acid molecule sequence characterized in (a) to (e) and encoding a polypeptide having the activity represented by a protein comprising a polypeptide as depicted in column 5 of table II.

8. The nucleic acid molecule of claim 7, whereby the nucleic acid molecule according to (a) to (k) is at least in one or more nucleotides different from the sequence depicted in column 5 or 7 of table I A and preferably encodes a protein which differs at least in one or more amino acids from the protein sequences depicted in column 5 or 7 of table II A.

9. A nucleic acid construct which confers expression of the nucleic acid molecule of claim 7, comprising one or more regulatory elements.

10. A vector comprising the nucleic acid molecule of claim 7, or a nucleic acid construct conferring expression of said nucleic acid molecule, wherein said nucleic acid construct comprises one or more regulatory elements.

11. A process for producing a polypeptide, wherein the polypeptide is expressed in a host nucleus or host cell comprising the nucleic acid molecule of claim 7.

12. A polypeptide produced by the process as of claim 11 or as depicted in table II B, whereby the polypeptide distinguishes over the sequence as shown in table II A by one or more amino acids.

13. An antibody, which binds specifically to the polypeptide of claim 12.

14. A plant cell nucleus, plant cell, plant tissue, propagation material, seed, pollen, progeny, harvested material or a plant comprising the nucleic acid molecule of claim 7.

15. A plant cell nucleus, plant cell, plant tissue, propagation material, seed, pollen, progeny, or a plant part, resulting in a plant with increased yield after regeneration; or a plant with increased yield, or a part thereof; wherein said increased yield is compared to a corresponding wild type plant and is produced by the method of claim 1.

16. The plant cell nucleus, plant cell, plant or part thereof of claim 15, derived from a monocotyledonous plant or a dicotyledonous plant.

17. (canceled)

18. The plant cell nucleus, plant cell, plant or part thereof of claim 15, wherein the plant is selected from the group consisting of corn (maize), wheat, rye, oat, triticale, rice, barley, soybean, peanut, cotton, oil seed rape, including canola and winter oil seed rape, manihot, pepper, sunflower, sugar cane, sugar beet, flax, borage, safflower, linseed, primrose, rapeseed, turnip rape, tagetes, solanaceous plants comprising potato, tobacco, eggplant, tomato; Vicia species, pea, alfalfa, coffee, cacao, tea, Salix species, oil palm, coconut, perennial grass, forage crops and Arabidopsis thaliana.

19. (canceled)

20. A transgenic plant comprising one or more of the plant cell nuclei, plant cells, plant tissue, propagation material, progeny, seed or pollen of claim 14.

21. A transgenic plant, transgenic plant cell nucleus, or transgenic plant cell produced by the method of claim 4, or a plant comprising one or more of said transgenic plant cell nuclei or transgenic plant cells, or progeny, seed or pollen derived from or produced by said transgenic plant, wherein said transgenic plant, transgenic plant cell nucleus, transgenic plant cell, plant comprising one or more of said transgenic plant cell nuclei or transgenic plant cells, progeny, seed or pollen is genetically homozygous for a transgene conferring increased yield as compared to a corresponding non-transformed wild type plant.

22. A process for the identification of a compound conferring increased yield in a plant, plant cell, or part thereof as compared to a corresponding non-transformed wild type plant cell, comprising the steps:
(a) culturing a plant cell, a transgenic plant or a part thereof expressing the polypeptide of claim 12 and a readout system capable of interacting with the polypeptide under suitable conditions which permit the interaction of the polypeptide with said readout system in the presence of a compound or a sample comprising a plurality of compounds and capable of providing a detectable signal in response to the binding of a compound to said polypeptide under conditions which permit the expression of said readout system and of the polypeptide; and
(b) identifying if the compound is an effective agonist by detecting the presence or absence or increase of a signal produced by said readout system.

23. A method for the production of an agricultural composition comprising identifying a compound according to the method of claim 22, and formulating said compound in a form acceptable for an application in agriculture.

24. A composition comprising the nucleic acid molecule of claim 7, a nucleic acid construct comprising one or more regulatory elements and conferring expression of said nucleic acid molecule, a vector comprising said nucleic acid molecule or said nucleic acid construct, a polypeptide encoded by said nucleic acid molecule, a compound identified by said polypeptide, and/or an antibody which binds specifically to said polypeptide; and optionally an agriculturally acceptable carrier.

25. The polypeptide of claim 12 or the nucleic acid molecule which is selected from yeast or E. coli.

26. (canceled)

27. A method for identification or selection of a plant with increased yield as compared to a corresponding non-transformed wild type plant, comprising utilizing the nucleic acid molecule of claim 7 as a marker.

28. (canceled)

29. A method for the identification of a plant with an increased yield comprising screening a population of one or more plant cell nuclei, plant cells, plant tissues or plants or parts thereof for an activity of a polypeptide selected from the group consisting of 2-oxoglutarate-dependent dioxygenase, 3-ketoacyl-CoA thiolase, 3′-phosphoadenosine 5′-phosphate phosphatase, 4-diphosphocytidyl-2-C-methyl-Derythritol kinase, 50S chloroplast ribosomal protein L21, 57972199.R01.1-protein, 60952769.R01.1-protein, 60S ribosomal protein, ABC transporter family protein, AP2 domain-containing transcription factor, argonaute protein, AT1G29250.1-protein, AT1G53885-protein, AT2G35300-protein, AT3G04620-protein, AT4G01870-protein, AT5G42380-protein, AT5G47440-protein, CDS5394-protein, CDS5401_TRUNCATEDprotein, cold response protein, cullin, Cytochrome P450, delta-8 sphingolipid desaturase, galactinol synthase, glutathione-S-transferase, GTPase, haspin-related protein, heat shock protein, heat shock transcription factor, histone H2B, jasmonate-zim-domain protein, mitochondrial asparaginyl-tRNA synthetase, Oligosaccharyltransferase, OS02G44730-protein, Oxygen-evolving enhancer protein, peptidyl-prolyl cis-trans isomerase, peptidyl-prolyl cis-trans isomerase family protein, plastid lipid-associated protein, Polypyrimidine tract binding protein, PRLI-interacting factor, protein kinase, protein kinase family protein, rubisco subunit binding-protein beta subunit, serine acetyltransferase, serine hydroxymethyltransferase, small heat shock protein, S-ribosylhomocysteinase, sugar transporter, Thioredoxin H-type, ubiquitin-conjugating enzyme, ubiquitin-protein ligase, universal stress protein family protein, and Vacuolar protein, comparing the level of activity with the activity level in a reference; identifying one or more plant cell nuclei, plant cells, plant tissues or plants or parts thereof with the activity increased compared to the reference, optionally producing a plant from the identified plant cell nuclei, cell or tissue.

30. A method for the identification of a plant with an increased yield comprising screening a population of one or more plant cell nuclei, plant cells, plant tissues or plants or parts thereof for the expression level of an nucleic acid coding for an polypeptide conferring an activity from a polypeptide selected from the group consisting of 2-oxoglutarate-dependent dioxygenase, 3-ketoacyl-CoA thiolase, 3′-phosphoadenosine 5′-phosphate phosphatase, 4-diphosphocytidyl-2-C-methyl-D-erythritol kinase, 50S chloroplast ribosomal protein L21, 57972199.R01.1-protein, 60952769.R01.1-protein, 60S ribosomal protein, ABC transporter family protein, AP2 domain-containing transcription factor, argonaute protein, AT1029250.1-protein, AT1G53885-protein, AT2035300-protein, AT3004620-protein, AT4G01870-protein, AT5042380-protein, AT5047440-protein, CDS5394-protein, CDS5401_TRUNCATED-protein, cold response protein, cullin, Cytochrome P450, delta-8 sphingolipid desaturase, galactinol synthase, glutathione-S-transferase, GTPase, haspin-related protein, heat shock protein, heat shock transcription factor, histone H2B, jasmonate-zim-domain protein, mitochondrial asparaginyl-tRNA synthetase, Oligosaccharyltransferase, OS02G44730-protein, Oxygen-evolving enhancer protein, peptidyl-prolyl cis-trans isomerase, peptidyl-prolyl cis-trans isomerase family protein, plastid lipid-associated protein, Polypyrimidine tract binding protein, PRLI-interacting factor, protein kinase, protein kinase family protein, rubisco subunit binding-protein beta subunit, serine acetyltransferase, serine hydroxymethyltransferase, small heat shock protein, S-ribosylhomocysteinase, sugar transporter, Thioredoxin H-type, ubiquitin-conjugating enzyme, ubiquitin-protein ligase, universal stress protein family protein, and Vacuolar protein, comparing the level of expression with a reference; identifying one or more plant cell nuclei, plant cells, plant tissues or plants or parts thereof with the expression level increased compared to the reference, optionally producing a plant from the identified plant cell nuclei, cell or tissue.

31. The plant of claim 14, wherein said plant shows an improved yield-related trait.

32. The plant of claim 14, wherein said plant shows an improved nutrient use efficiency and/or abiotic stress tolerance.

33. The plant of claim 14, wherein said plant shows an improved increased low temperature tolerance.

34. The plant of claim 14, wherein the plant shows an increase of harvestable yield.

35. The plant of claim 14, wherein the plant shows an improved yield calculated on a per plant basis or in relation to a specific arable area.

36. A method for increasing yield of a population of plants, comprising checking the growth temperature(s) in the area for planting, comparing the temperatures with the optimal growth temperature of a plant species or a variety considered for planting, planting and growing the plant of claim 14 if the growth temperature is not optimal for the planting and growing of the plant species or the variety considered for planting.

37. The method of claim 1, comprising harvesting the plant or a part of the plant produced or planted and producing fuel with or from the harvested plant or part thereof.

38. The method of claim 1, wherein the plant is a plant useful for starch production, comprising harvesting plant part useful for starch isolation and isolating starch from this plant part.

39. A nucleic acid molecule encoding a polypeptide comprising the Pfam domain PF01789.9 for the production of a plant with increased yield or a polypeptide encoded by said nucleic acid molecule.

40. The nucleic acid molecule of claim 39, wherein the nucleic acid molecule encodes a polypeptide which is 75% or more identical to the polypeptide of SEQ ID NO.: 385 and comprises the Pfam domain PF01789.9, and wherein the nucleic acid molecule confers an increased yield in a plant expressing said nucleic acid molecule.

The application's sequence listing, which the Patent Office published only in electronic form, follows.

SEQUENCE LISTING (13934 sequences)

SEQ ID NO: 1 - DNA, 19 bp, Artificial sequence
  adapter sequence added to gene specific primers for cloning purposes
ggaattccagctgaccacc

SEQ ID NO: 2 - DNA, 20 bp, Artificial sequence
  adapter sequence added to gene specific primers for cloning purposes
gatccccgggaattgccatg

SEQ ID NO: 3 - DNA, 10 bp, Artificial sequence
  adapter sequence added to gene specific primers for cloning purposes
ttgctcttcc

SEQ ID NO: 4 - DNA, 10 bp, Artificial sequence
  adapter sequence added to gene specific primers for cloning purposes
ttgctcttcg

SEQ ID NO: 5 - DNA, 34 bp, Artificial sequence
  Amplification of the targeting sequence of the gene FNR from Spinacia oleracea to generate the S.cerevisiae plastidic targeting vector VC-MME354-1
atagaattcgcataaacttatcttcatagttgcc

SEQ ID NO: 6 - DNA, 27 bp, Artificial sequence
  Amplification of the targeting sequence of the gene FNR from Spinacia oleracea to generate the S.cerevisiae plastidic targeting vector VC-MME354-1
atagaattcagaggcgatctgggccct

SEQ ID NO: 7 - DNA, 36 bp, Artificial sequence
  Amplification of the targeting sequence of the gene FNR from Spinacia oleracea to generate the E.coli plastidic targeting vector VC-MME432-1
atagtttaaacgcataaacttatcttcatagttgcc

SEQ ID NO: 8 - DNA, 34 bp, Artificial sequence
  Amplification of the targeting sequence of the gene FNR from Spinacia oleracea to generate the E.coli plastidic targeting vector VC-MME432-1
ataccatggaagagcaagaggcgatctgggccct

SEQ ID NO: 9 - DNA, 9041 bp, Artificial sequence
  pMTX0270p
gctttgggcggatccggacaatcagtaaattgaacggagaatattattcataaaaatacgatagtaacgggtgatatattcattagaatgaaccgaaaccggcggtaaggatctgagctacacatgctcaggttttttacaacgtgcacaacagaattgaaagcaaatatcatgcgatcataggcgtctcgcatatctcattaaagcagggcatgccggtcgagtcaaatctcggtgacgggcaggaccggacggggcggtaccggcaggctgaagtccagctgccagaaacccacgtcatgccagttcccgtgcttgaagccggccgcccgcagcatgccgcggggggcatatccgagcgcctcgtgcatgcgcacgctcgggtcgttgggcagcccgatgacagcgaccacgctcttgaagccctgtgcctccagggacttcagcaggtgggtgtagagcgtggagcccagtcccgtccgctggtggcggggggagacgtacacggtcgactcggccgtccagtcgtaggcgttgcgtgccttccaggggcccgcgtaggcgatgccggcgacctcgccgtccacctcggcgacgagccagggatagcgctcccgcagacggacgaggtcgtccgtccactcctgcggttcctgcggctcggtacggaagttgaccgtgcttgtctcgatgtagtggttgacgatggtgcagaccgccggcatgtccgcctcggtggcacggcggatgtcggccgggcgtcgttctgggctcatggtagactcgacggatccacgtgtggaagatatgaatttttttgagaaactagataagattaatgaatatcggtgttttggttttttcttgtggccgtctttgtttatattgagatttttcaaatcagtgcgcaagacgtgacgtaagtatccgagtcagtttttatttttctactaatttggtcgaatctagattcgacggtatcgataagctcgcggatccctgaaagcgacgttggatgttaacatctacaaattgccttttcttatcgaccatgtacgtaagcgcttacgtttttggtggacccttgaggaaactggtagctgttgtgggcctgtggtctcaagatggatcattaatttccaccttcacctacgatggggggcatcgcaccggtgagtaatattgtacggctaagagcgaatttggcctgtaggatccctgaaagcgacgttggatgttaacatctacaaattgccttttcttatcgaccatgtacgtaagcgcttacgtttttggtggacccttgaggaaactggtagctgttgtgggcctgtggtctcaagatggatcattaatttccaccttcacctacgatggggggcatcgcaccggtgagtaatattgtacggctaagagcgaatttggcctgtaggatccctgaaagcgacgttggatgttaacatctacaaattgccttttcttatcgaccatgtacgtaagcgcttacgtttttggtggacccttgaggaaactggtagctgttgtgggcctgtggtctcaagatggatcattaatttccaccttcacctacgatggggggcatcgcaccggtgagtaatattgtacggctaagagcgaatttggcctgtaggatccgcgagctggtcaatcccattgcttttgaagcagctcaacattgatctctttctcgatcgagggagatttttcaaatcagtgcgcaagacgtgacgtaagtatccgagtcagtttttatttttctactaatttggtcgtttatttcggcgtgtaggacatggcaaccgggcctgaatttcgcgggtattctgtttctattccaactttttcttgatccgcagccattaacgacttttgaatagatacgctgacacgccaagcctcgctagtcaaaagtgtaccaaacaacgctttacagcaagaacggaatgcgcgtgacgctcgcggtgacgccatttcgccttttcagaaatggataaatagccttgcttcctattatatcttcccaaattaccaatacattacactagcatctgaatttcataaccaatctcgatacaccaaatcgaagatctcccgggttgctcttccatggcaatgattaattaacgaagagcaagagctcgaatttccccgatcgttcaaacatttggcaataaagtttcttaagattgaatcctgttgccggtcttgcgatgattatcatataatttctgttgaattacgttaagcatgtaataattaacatgtaatgcatgacgttatttatgagatgggtttttatgattagagtcccgcaattatacatttaatacgcgatagaaaacaaaatatagcgcgcaaactaggataaattatcgcgcgcggtgtcatctatgttactagatcgggaattggcatgcaagcttggcactggccgtcgttttacaacgtcgtgactgggaaaaccctggcgttacccaacttaatcgccttgcagcacatccccctttcgccagctggcgtaatagcgaagaggcccgcaccgatcgcccttcccaacagttgcgcagcctgaatggcgaatgctagagcagcttgagcttggatcagattgtcgtttcccgccttcagtttaaactatcagtgtttgacaggatatattggcgggtaaacctaagagaaaagagcgtttattagaataatcggatatttaaaagggcgtgaaaaggtttatccgttcgtccatttgtatgtgcatgccaaccacagggttcccctcgggatcaaagtactttgatccaacccctccgctgctatagtgcagtcggcttctgacgttcagtgcagccgtcttctgaaaacgacatgtcgcacaagtcctaagttacgcgacaggctgccgccctgcccttttcctggcgttttcttgtcgcgtgttttagtcgcataaagtagaatacttgcgactagaaccggagacattacgccatgaacaagagcgccgccgctggcctgctgggctatgcccgcgtcagcaccgacgaccaggacttgaccaaccaacgggccgaactgcacgcggccggctgcaccaagctgttttccgagaagatcaccggcaccaggcgcgaccgcccggagctggccaggatgcttgaccacctacgccctggcgacgttgtgacagtgaccaggctagaccgcctggcccgcagcacccgcgacctactggacattgccgagcgcatccaggaggccggcgcgggcctgcgtagcctggcagagccgtgggccgacaccaccacgccggccggccgcatggtgttgaccgtgttcgccggcattgccgagttcgagcgttccctaatcatcgaccgcacccggagcgggcgcgaggccgccaaggcccgaggcgtgaagtttggcccccgccctaccctcaccccggcacagatcgcgcacgcccgcgagctgatcgaccaggaaggccgcaccgtgaaagaggcggctgcactgcttggcgtgcatcgctcgaccctgtaccgcgcacttgagcgcagcgaggaagtgacgcccaccgaggccaggcggcgcggtgccttccgtgaggacgcattgaccgaggccgacgccctggcggccgccgagaatgaacgccaagaggaacaagcatgaaaccgcaccaggacggccaggacgaaccgtttttcattaccgaagagatcgaggcggagatgatcgcggccgggtacgtgttcgagccgcccgcgcacgtctcaaccgtgcggctgcatgaaatcctggccggtttgtctgatgccaagctggcggcctggccggccagcttggccgctgaagaaaccgagcgccgccgtctaaaaaggtgatgtgtatttgagtaaaacagcttgcgtcatgcggtcgctgcgtatatgatgcgatgagtaaataaacaaatacgcaaggggaacgcatgaaggttatcgctgtacttaaccagaaaggcgggtcaggcaagacgaccatcgcaacccatctagcccgcgccctgcaactcgccggggccgatgttctgttagtcgattccgatccccagggcagtgcccgcgattgggcggccgtgcgggaagatcaaccgctaaccgttgtcggcatcgaccgcccgacgattgaccgcgacgtgaaggccatcggccggcgcgacttcgtagtgatcgacggagcgccccaggcggcggacttggctgtgtccgcgatcaaggcagccgacttcgtgctgattccggtgcagccaagcccttacgacatatgggccaccgccgacctggtggagctggttaagcagcgcattgaggtcacggatggaaggctacaagcggcctttgtcgtgtcgcgggcgatcaaaggcacgcgcatcggcggtgaggttgccgaggcgctggccgggtacgagctgcccattcttgagtcccgtatcacgcagcgcgtgagctacccaggcactgccgccgccggcacaaccgttcttgaatcagaacccgagggcgacgctgcccgcgaggtccaggcgctggccgctgaaattaaatcaaaactcatttgagttaatgaggtaaagagaaaatgagcaaaagcacaaacacgctaagtgccggccgtccgagcgcacgcagcagcaaggctgcaacgttggccagcctggcagacacgccagccatgaagcgggtcaactttcagttgccggcggaggatcacaccaagctgaagatgtacgcggtacgccaaggcaagaccattaccgagctgctatctgaatacatcgcgcagctaccagagtaaatgagcaaatgaataaatgagtagatgaattttagcggctaaaggaggcggcatggaaaatcaagaacaaccaggcaccgacgccgtggaatgccccatgtgtggaggaacgggcggttggccaggcgtaagcggctgggttgcctgccggccctgcaatggcactggaacccccaagcccgaggaatcggcgtgagcggtcgcaaaccatccggcccggtacaaatcggcgcggcgctgggtgatgacctggtggagaagttgaaggccgcgcaggccgcccagcggcaacgcatcgaggcagaagcacgccccggtgaatcgtggcaagcggccgctgatcgaatccgcaaagaatcccggcaaccgccggcagccggtgcgccgtcgattaggaagccgcccaagggcgacgagcaaccagattttttcgttccgatgctctatgacgtgggcacccgcgatagtcgcagcatcatggacgtggccgttttccgtctgtcgaagcgtgaccgacgagctggcgaggtgatccgctacgagcttccagacgggcacgtagaggtttccgcagggccggccggcatggccagtgtgtgggattacgacctggtactgatggcggtttcccatctaaccgaatccatgaaccgataccgggaagggaagggagacaagcccggccgcgtgttccgtccacacgttgcggacgtactcaagttctgccggcgagccgatggcggaaagcagaaagacgacctggtagaaacctgcattcggttaaacaccacgcacgttgccatgcagcgtacgaagaaggccaagaacggccgcctggtgacggtatccgagggtgaagccttgattagccgctacaagatcgtaaagagcgaaaccgggcggccggagtacatcgagatcgagctagctgattggatgtaccgcgagatcacagaaggcaagaacccggacgtgctgacggttcaccccgattactttttgatcgatcccggcatcggccgttttctctaccgcctggcacgccgcgccgcaggcaaggcagaagccagatggttgttcaagacgatctacgaacgcagtggcagcgccggagagttcaagaagttctgtttcaccgtgcgcaagctgatcgggtcaaatgacctgccggagtacgatttgaaggaggaggcggggcaggctggcccgatcctagtcatgcgctaccgcaacctgatcgagggcgaagcatccgccggttcctaatgtacggagcagatgctagggcaaattgccctagcaggggaaaaaggtcgaaaaggtctctttcctgtggatagcacgtacattgggaacccaaagccgtacattgggaaccggaacccgtacattgggaacccaaagccgtacattgggaaccggtcacacatgtaagtgactgatataaaagagaaaaaaggcgatttttccgcctaaaactctttaaaacttattaaaactcttaaaacccgcctggcctgtgcataactgtctggccagcgcacagccgaagagctgcaaaaagcgcctacccttcggtcgctgcgctccctacgccccgccgcttcgcgtcggcctatcgcggccgctggccgctcaaaaatggctggcctacggccaggcaatctaccagggcgcggacaagccgcgccgtcgccactcgaccgccggcgcccacatcaaggcaccctgcctcgcgcgtttcggtgatgacggtgaaaacctctgacacatgcagctcccggagacggtcacagcttgtctgtaagcggatgccgggagcagacaagcccgtcagggcgcgtcagcgggtgttggcgggtgtcggggcgcagccatgacccagtcacgtagcgatagcggagtgtatactggcttaactatgcggcatcagagcagattgtactgagagtgcaccatatgcggtgtgaaataccgcacagatgcgtaaggagaaaataccgcatcaggcgctcttccgcttcctcgctcactgactcgctgcgctcggtcgttcggctgcggcgagcggtatcagctcactcaaaggcggtaatacggttatccacagaatcaggggataacgcaggaaagaacatgtgagcaaaaggccagcaaaaggccaggaaccgtaaaaaggccgcgttgctggcgtttttccataggctccgcccccctgacgagcatcacaaaaatcgacgctcaagtcagaggtggcgaaacccgacaggactataaagataccaggcgtttccccctggaagctccctcgtgcgctctcctgttccgaccctgccgcttaccggatacctgtccgcctttctcccttcgggaagcgtggcgctttctcatagctcacgctgtaggtatctcagttcggtgtaggtcgttcgctccaagctgggctgtgtgcacgaaccccccgttcagcccgaccgctgcgccttatccggtaactatcgtcttgagtccaacccggtaagacacgacttatcgccactggcagcagccactggtaacaggattagcagagcgaggtatgtaggcggtgctacagagttcttgaagtggtggcctaactacggctacactagaaggacagtatttggtatctgcgctctgctgaagccagttaccttcggaaaaagagttggtagctcttgatccggcaaacaaaccaccgctggtagcggtggtttttttgtttgcaagcagcagattacgcgcagaaaaaaaggatctcaagaagatcctttgatcttttctacggggtctgacgctcagtggaacgaaaactcacgttaagggattttggtcatgcattctaggtactaaaacaattcatccagtaaaatataatattttattttctcccaatcaggcttgatccccagtaagtcaaaaaatagctcgacatactgttcttccccgatatcctccctgatcgaccggacgcagaaggcaatgtcataccacttgtccgccctgccgcttctcccaagatcaataaagccacttactttgccatctttcacaaagatgttgctgtctcccaggtcgccgtgggaaaagacaagttcctcttcgggcttttccgtctttaaaaaatcatacagctcgcgcggatctttaaatggagtgtcttcttcccagttttcgcaatccacatcggccagatcgttattcagtaagtaatccaattcggctaagcggctgtctaagctattcgtatagggacaatccgatatgtcgatggagtgaaagagcctgatgcactccgcatacagctcgataatcttttcagggctttgttcatcttcatactcttccgagcaaaggacgccatcggcctcactcatgagcagattgctccagccatcatgccgttcaaagtgcaggacctttggaacaggcagctttccttccagccatagcatcatgtccttttcccgttccacatcataggtggtccctttataccggctgtccgtcatttttaaatataggttttcattttctcccaccagcttatataccttagcaggagacattccttccgtatcttttacgcagcggtatttttcgatcagttttttcaattccggtgatattctcattttagccatttattatttccttcctcttttctacagtatttaaagataccccaagaagctaattataacaagacgaactccaattcactgttccttgcattctaaaaccttaaataccagaaaacagctttttcaaagttgttttcaaagttggcgtataacatagtatcgacggagccgattttgaaaccgcggtgatcacaggcagcaacgctctgtcatcgttacaatcaacatgctaccctccgcgagatcatccgtgtttcaaacccggcagcttagttgccgttcttccgaatagcatcggtaacatgagcaaagtctgccgccttacaacggctctcccgctgacgccgtcccggactgatgggctgcctgtatcgagtggtgattttgtgccgagctgccggtcggggagctgttggctggctggtggcaggatatattgtggtgtaaacaaattgacgcttagacaacttaataacacattgcggacgtttttaatgtactgaattaacgccgaattaa

SEQ ID NO: 10 - protein, 62 aa, Acetabularia mediterranea
MASIMMNKSVVLSKECAKPLATPKVTLNKRGFATTIATKNREMMVWQPFNNKMFETFSFLPP

SEQ ID NO: 11 - protein, 90 aa, Arabidopsis thaliana
MAASLQSTATFLQSAKIATAPSRGSSHLRSTQAVGKSFGLETSSARLTCSFQSDFKDFTGKCSDAVKIAGFALATSALVVSGASAEGAPK

SEQ ID NO: 12 - protein, 96 aa, Arabidopsis thaliana
MAQVSRICNGVQNPSLICNLSKSSQRKSPLSVSLKTQQHPRAYPISSSWGLKKSGMTLIGSELRPLKVMSSVSTAEKASEIVLQPIREISGLIKLP

SEQ ID NO: 13 - protein, 100 aa, Arabidopsis thaliana
MAAATTTTTTSSSISFSTKPSPSSSKSPLPISRFSLPFSLNPNKSSSSSRRRGIKSSSPSSISAVLNTTTNVTTTPSPTKPTKPETFISRFAPDQPRKGA

SEQ ID NO: 14 - protein, 46 aa, Arabidopsis thaliana
MITSSLTCSLQALKLSSPFAHGSTPLSSLSKPNSFPNHRMPALVPV

SEQ ID NO: 15 - protein, 93 aa, Arabidopsis thaliana
MASLLGTSSSAIWASPSLSSPSSKPSSSPICFRPGKLFGSKLNAGIQIRPKKNRSRYHVSVMNVATEINSTEQVVGKFDSKKSARPVYPFAAI

SEQ ID NO: 16 - protein, 52 aa, Arabidopsis thaliana
MASTALSSAIVGTSFIRRSPAPISLRSLPSANTQSLFGLKSGTARGGRVVAM

SEQ ID NO: 17 - protein, 39 aa, Arabidopsis thaliana
MAASTMALSSPAFAGKAVNLSPAASEVLGSGRVTNRKTV

SEQ ID NO: 18 - protein, 92 aa, Arabidopsis thaliana
MAAITSATVTIPSFTGLKLAVSSKPKTLSTISRSSSATRAPPKLALKSSLKDFGVIAVATAASIVLAGNAMAMEVLLGSDDGSLAFVPSEFT

SEQ ID NO: 19 - protein, 85 aa, Arabidopsis thaliana
MAAAVSTVGAINRAPLSLNGSGSGAVSAPASTFLGKKVVTVSRFAQSNKKSNGSFKVLAVKEDKQTDGDRWRGLAYDTSDDQIDI

SEQ ID NO: 20 - protein, 54 aa, Arabidopsis thaliana
MKSSMLSSTAWTSPAQATMVAPFTGLKSSASFPVTRKANNDITSITSNGGRVSC

SEQ ID NO: 21 - protein, 91 aa, Arabidopsis thaliana
MAASGTSATFRASVSSAPSSSSQLTHLKSPFKAVKYTPLPSSRSKSSSFSVSCTIAKDPPVLMAAGSDPALWQRPDSFGRFGKFGGKYVPE

SEQ ID NO: 22 - protein, 80 aa, Brassica campestris
MSTTFCSSVCMQATSLAATTRISFQKPALVSTTNLSFNLRRSIPTRFSISCAAKPETVEKVSKIVKKQLSLKDDQKVVAE

SEQ ID NO: 23 - protein, 51 aa, Brassica napus
MATTFSASVSMQATSLATTTRISFQKPVLVSNHGRTNLSFNLSRTRLSISC

SEQ ID NO: 24 - protein, 44 aa, Chlamydomonas reinhardtii
MQALSSRVNIAAKPQRAQRLVVRAEEVKAAPKKEVGPKRGSLVK

SEQ ID NO: 25 - protein, 51 aa, Cucurbita moschata
MAELIQDKESAQSAATAAAASSGYERRNEPAHSRKFLEVRSEEELLSCIKK

SEQ ID NO: 26 - protein, 62 aa, Spinacea oleracea
MSTINGCLTSISPSRTQLKNTSTLRPTFIANSRVNPSSSVPPSLIRNQPVFAAPAPIITPTL

SEQ ID NO: 27 - protein, 75 aa, Spinacea oleracea
MTTAVTAAVSFPSTKTTSLSARCSSVISPDKISYKKVPLYYRNVSATGKMGPIRAQIASDVEAPPPAPAKVEKMS

SEQ ID NO: 28 - protein, 55 aa, Spinacea oleracea
MTTAVTAAVSFPSTKTTSLSARSSSVISPDKISYKKVPLYYRNVSATGKMGPIRA

SEQ ID NO: 29 - DNA, 419 bp, Spinacia oleracea
  5'UTR (1)..(168)
  CDS (166)..(273)
  CDS (351)..(419)
gcataaacttatcttcatagttgccactccaatttgctccttgaatctcctccacccaatacataatccactcctccatcacccacttcactactaaatcaaacttaactctgtttttctctctcctcctttcatttcttattcttccaatcatcgtactccgccatgaccaccgctgtcaccgccgctgtttctttcccctctaccaaaaccacctctctctccgcccgaagctcctccgtcatttcccctgacaaaatcagctacaaaaaggtgattcccaatttcactgtgttttttattaataatttgttattttgatgatgagatgattaatttgggtgctgcaggttcctttgtactacaggaatgtatctgcaactgggaaaatgggacccatcagggcccagatcgcctct

SEQ ID NO: 30 - protein, 59 aa, Spinacia oleracea
MTTAVTAAVSFPSTKTTSLSARSSSVISPDKISYKKVPLYYRNVSATGKMGPIRAQIAS

SEQ ID NO: 31 - DNA, 8659 bp, Artificial sequence
  plasmid pMTX155
agcttggacaatcagtaaattgaacggagaatattattcataaaaatacgatagtaacgggtgatatattcattagaatgaaccgaaaccggcggtaaggatctgagctacacatgctcaggttttttacaacgtgcacaacagaattgaaagcaaatatcatgcgatcataggcgtctcgcatatctcattaaagcagggcatgccggtcgagtcaaatctcggtgacgggcaggaccggacggggcggtaccggcaggctgaagtccagctgccagaaacccacgtcatgccagttcccgtgcttgaagccggccgcccgcagcatgccgcggggggcatatccgagcgcctcgtgcatgcgcacgctcgggtcgttgggcagcccgatgacagcgaccacgctcttgaagccctgtgcctccagggacttcagcaggtgggtgtagagcgtggagcccagtcccgtccgctggtggcggggggagacgtacacggtcgactcggccgtccagtcgtaggcgttgcgtgccttccaggggcccgcgtaggcgatgccggcgacctcgccgtccacctcggcgacgagccagggatagcgctcccgcagacggacgaggtcgtccgtccactcctgcggttcctgcggctcggtacggaagttgaccgtgcttgtctcgatgtagtggttgacgatggtgcagaccgccggcatgtccgcctcggtggcacggcggatgtcggccgggcgtcgttctgggctcatggtagactcgacggatccacgtgtggaagatatgaatttttttgagaaactagataagattaatgaatatcggtgttttggttttttcttgtggccgtctttgtttatattgagatttttcaaatcagtgcgcaagacgtgacgtaagtatccgagtcagtttttatttttctactaatttggtcgaagctttgggcggatcctctagagcagcttgccaacatggtggagcacgacactctcgtctactccaagaatatcaaagatacagtctcagaagaccaaagggctattgagacttttcaacaaagggtaatatcgggaaacctcctcggattccattgcccagctatctgtcacttcatcaaaaggacagtagaaaaggaaggtggcacctacaaatgccatcattgcgataaaggaaaggctatcgttcaagatgcctctgccgacagtggtcccaaagatggacccccacccacgaggagcatcgtggaaaaagaagacgttccaaccacgtcttcaaagcaagtggattgatgtgaacatggtggagcacgacactctcgtctactccaagaatatcaaagatacagtctcagaagaccaaagggctattgagacttttcaacaaagggtaatatcgggaaacctcctcggattccattgcccagctatctgtcacttcatcaaaaggacagtagaaaaggaaggtggcacctacaaatgccatcattgcgataaaggaaaggctatcgttcaagatgcctctgccgacagtggtcccaaagatggacccccacccacgaggagcatcgtggaaaaagaagacgttccaaccacgtcttcaaagcaagtggattgatgtgatatctccactgacgtaagggatgacgcacaatcccactatccttcgcaagacccttcctctatataaggaagttcatttcatttggagaggacagggtaccctggaattccagctgaccaccatggcaattcccggggatcagctcgaatttccccgatcgttcaaacatttggcaataaagtttcttaagattgaatcctgttgccggtcttgcgatgattatcatataatttctgttgaattacgttaagcatgtaataattaacatgtaatgcatgacgttatttatgagatgggtttttatgattagagtcccgcaattatacatttaatacgcgatagaaaacaaaatatagcgcgcaaactaggataaattatcgcgcgcggtgtcatctatgttactagatcgggaattggcatgcaagcttggcactggccgtcgttttacaacgtcgtgactgggaaaaccctggcgttacccaacttaatcgccttgcagcacatccccctttcgccagctggcgtaatagcgaagaggcccgcaccgatcgcccttcccaacagttgcgcagcctgaatggcgaatgctagagcagcttgagcttggatcagattgtcgtttcccgccttcagtttaaactatcagtgtttgacaggatatattggcgggtaaacctaagagaaaagagcgtttattagaataacggatatttaaaagggcgtgaaaaggtttatccgttcgtccatttgtatgtgcatgccaaccacagggttcccctcgggatcaaagtactttgatccaacccctccgctgctatagtgcagtcggcttctgacgttcagtgcagccgtcttctgaaaacgacatgtcgcacaagtcctaagttacgcgacaggctgccgccctgcccttttcctggcgttttcttgtcgcgtgttttagtcgcataaagtagaatacttgcgactagaaccggagacattacgccatgaacaagagcgccgccgctggcctgctgggctatgcccgcgtcagcaccgacgaccaggacttgaccaaccaacgggccgaactgcacgcggccggctgcaccaagctgttttccgagaagatcaccggcaccaggcgcgaccgcccggagctggccaggatgcttgaccacctacgccctggcgacgttgtgacagtgaccaggctagaccgcctggcccgcagcacccgcgacctactggacattgccgagcgcatccaggaggccggcgcgggcctgcgtagcctggcagagccgtgggccgacaccaccacgccggccggccgcatggtgttgaccgtgttcgccggcattgccgagttcgagcgttccctaatcatcgaccgcacccggagcgggcgcgaggccgccaaggcccgaggcgtgaagtttggcccccgccctaccctcaccccggcacagatcgcgcacgcccgcgagctgatcgaccaggaaggccgcaccgtgaaagaggcggctgcactgcttggcgtgcatcgctcgaccctgtaccgcgcacttgagcgcagcgaggaagtgacgcccaccgaggccaggcggcgcggtgccttccgtgaggacgcattgaccgaggccgacgccctggcggccgccgagaatgaacgccaagaggaacaagcatgaaaccgcaccaggacggccaggacgaaccgtttttcattaccgaagagatcgaggcggagatgatcgcggccgggtacgtgttcgagccgcccgcgcacgtctcaaccgtgcggctgcatgaaatcctggccggtttgtctgatgccaagctggcggcctggccggccagcttggccgctgaagaaaccgagcgccgccgtctaaaaaggtgatgtgtatttgagtaaaacagcttgcgtcatgcggtcgctgcgtatatgatgcgatgagtaaataaacaaatacgcaaggggaacgcatgaaggttatcgctgtacttaaccagaaaggcgggtcaggcaagacgaccatcgcaacccatctagcccgcgccctgcaactcgccggggccgatgttctgttagtcgattccgatccccagggcagtgcccgcgattgggcggccgtgcgggaagatcaaccgctaaccgttgtcggcatcgaccgcccgacgattgaccgcgacgtgaaggccatcggccggcgcgacttcgtagtgatcgacggagcgccccaggcggcggacttggctgtgtccgcgatcaaggcagccgacttcgtgctgattccggtgcagccaagcccttacgacatatgggccaccgccgacctggtggagctggttaagcagcgcattgaggtcacggatggaaggctacaagcggcctttgtcgtgtcgcgggcgatcaaaggcacgcgcatcggcggtgaggttgccgaggcgctggccgggtacgagctgcccattcttgagtcccgtatcacgcagcgcgtgagctacccaggcactgccgccgccggcacaaccgttcttgaatcagaacccgagggcgacgctgcccgcgaggtccaggcgctggccgctgaaattaaatcaaaactcatttgagttaatgaggtaaagagaaaatgagcaaaagcacaaacacgctaagtgccggccgtccgagcgcacgcagcagcaaggctgcaacgttggccagcctggcagacacgccagccatgaagcgggtcaactttcagttgccggcggaggatcacaccaagctgaagatgtacgcggtacgccaaggcaagaccattaccgagctgctatctgaatacatcgcgcagctaccagagtaaatgagcaaatgaataaatgagtagatgaattttagcggctaaaggaggcggcatggaaaatcaagaacaaccaggcaccgacgccgtggaatgccccatgtgtggaggaacgggcggttggccaggcgtaagcggctgggttgtctgccggccctgcaatggcactggaacccccaagcccgaggaatcggcgtgacggtcgcaaaccatccggcccggtacaaatcggcgcggcgctgggtgatgacctggtggagaagttgaaggccgcgcaggccgcccagcggcaacgcatcgaggcagaagcacgccccggtgaatcgtggcaagcggccgctgatcgaatccgcaaagaatcccggcaaccgccggcagccggtgcgccgtcgattaggaagccgcccaagggcgacgagcaaccagattttttcgttccgatgctctatgacgtgggcacccgcgatagtcgcagcatcatggacgtggccgttttccgtctgtcgaagcgtgaccgacgagctggcgaggtgatccgctacgagcttccagacgggcacgtagaggtttccgcagggccggccggcatggccagtgtgtgggattacgacctggtactgatggcggtttcccatctaaccgaatccatgaaccgataccgggaagggaagggagacaagcccggccgcgtgttccgtccacacgttgcggacgtactcaagttctgccggcgagccgatggcggaaagcagaaagacgacctggtagaaacctgcattcggttaaacaccacgcacgttgccatgcagcgtacgaagaaggccaagaacggccgcctggtgacggtatccgagggtgaagccttgattagccgctacaagatcgtaaagagcgaaaccgggcggccggagtacatcgagatcgagctagctgattggatgtaccgcgagatcacagaaggcaagaacccggacgtgctgacggttcaccccgattactttttgatcgatcccggcatcggccgttttctctaccgcctggcacgccgcgccgcaggcaaggcagaagccagatggttgttcaagacgatctacgaacgcagtggcagcgccggagagttcaagaagttctgtttcaccgtgcgcaagctgatcgggtcaaatgacctgccggagtacgatttgaaggaggaggcggggcaggctggcccgatcctagtcatgcgctaccgcaacctgatcgagggcgaagcatccgccggttcctaatgtacggagcagatgctagggcaaattgccctagcaggggaaaaaggtcgaaaaggtctctttcctgtggatagcacgtacattgggaacccaaagccgtacattgggaaccggaacccgtacattgggaacccaaagccgtacattgggaaccggtcacacatgtaagtgactgatataaaagagaaaaaaggcgatttttccgcctaaaactctttaaaacttattaaaactcttaaaacccgcctggcctgtgcataactgtctggccagcgcacagccgaagagctgcaaaaagcgcctacccttcggtcgctgcgctccctacgccccgccgcttcgcgtcggcctatcgcggccgctggccgctcaaaaatggctggcctacggccaggcaatctaccagggcgcggacaagccgcgccgtcgccactcgaccgccggcgcccacatcaaggcaccctgcctcgcgcgtttcggtgatgacggtgaaaacctctgacacatgcagctcccggagacggtcacagcttgtctgtaagcggatgccgggagcagacaagcccgtcagggcgcgtcagcgggtgttggcgggtgtcggggcgcagccatgacccagtcacgtagcgatagcggagtgtatactggcttaactatgcggcatcagagcagattgtactgagagtgcaccatatgcggtgtgaaataccgcacagatgcgtaaggagaaaataccgcatcaggcgctcttccgcttcctcgctcactgactcgctgcgctcggtcgttcggctgcggcgagcggtatcagctcactcaaaggcggtaatacggttatccacagaatcaggggataacgcaggaaagaacatgtgagcaaaaggccagcaaaaggccaggaaccgtaaaaaggccgcgttgctggcgtttttccataggctccgcccccctgacgagcatcacaaaaatcgacgctcaagtcagaggtggcgaaacccgacaggactataaagataccaggcgtttccccctggaagctccctcgtgcgctctcctgttccgaccctgccgcttaccggatacctgtccgcctttctcccttcgggaagcgtggcgctttctcatagctcacgctgtaggtatctcagttcggtgtaggtcgttcgctccaagctgggctgtgtgcacgaaccccccgttcagcccgaccgctgcgccttatccggtaactatcgtcttgagtccaacccggtaagacacgacttatcgccactggcagcagccactggtaacaggattagcagagcgaggtatgtaggcggtgctacagagttcttgaagtggtggcctaactacggctacactagaaggacagtatttggtatctgcgctctgctgaagccagttaccttcggaaaaagagttggtagctcttgatccggcaaacaaaccaccgctggtagcggtggtttttttgtttgcaagcagcagattacgcgcagaaaaaaaggatctcaagaagatcctttgatcttttctacggggtctgacgctcagtggaacgaaaactcacgttaagggattttggtcatgcattctaggtactaaaacaattcatccagtaaaatataatattttattttctcccaatcaggcttgatccccagtaagtcaaaaaatagctcgacatactgttcttccccgatatcctccctgatcgaccggacgcagaaggcaatgtcataccacttgtccgccctgccgcttctcccaagatcaataaagccacttactttgccatctttcacaaagatgttgctgtctcccaggtcgccgtgggaaaagacaagttcctcttcgggcttttccgtctttaaaaaatcatacagctcgcgcggatctttaaatggagtgtcttcttcccagttttcgcaatccacatcggccagatcgttattcagtaagtaatccaattcggctaagcggctgtctaagctattcgtatagggacaatccgatatgtcgatggagtgaaagagcctgatgcactccgcatacagctcgataatcttttcagggctttgttcatcttcatactcttccgagcaaaggacgccatcggcctcactcatgagcagattgctccagccatcatgccgttcaaagtgcaggacctttggaacaggcagctttccttccagccatagcatcatgtccttttcccgttccacatcataggtggtccctttataccggctgtccgtcatttttaaatataggttttcattttctcccaccagcttatataccttagcaggagacattccttccgtatcttttacgcagcggtatttttcgatcagttttttcaattccggtgatattctcattttagccatttattatttccttcctcttttctacagtatttaaagataccccaagaagctaattataacaagacgaactccaattcactgttccttgcattctaaaaccttaaataccagaaaacagctttttcaaagttgttttcaaagttggcgtataacatagtatcgacggagccgattttgaaaccgcggtgatcacaggcagcaacgctctgtcatcgttacaatcaacatgctaccctccgcgagatcatccgtgtttcaaacccggcagcttagttgccgttcttccgaatagcatcggtaacatgagcaaagtctgccgccttacaacggctctcccgctgacgccgtcccggactgatgggctgcctgtatcgagtggtgattttgtgccgagctgccggtcggggagctgttggctggctggtggcaggatatattgtggtgtaaacaaattgacgcttagacaacttaataacacattgcggacgtttttaatgtactgaattaacgccgaatta

SEQ ID NO: 32 - DNA, 9469 bp, Artificial sequence
  plasmid VC-MME354-1QCZ
  5'UTR (2130)..(2294)
  transit_peptide (2295)..(2402)
  CDS (2295)..(2402)
  transit_peptide (2480)..(2548)
  CDS (2480)..(2548)
  CDS (2549)..(2566): adapter
agctttgggcggatcctctagaggacaatcagtaaattgaacggagaatattattcataaaaatacgatagtaacgggtgatatattcattagaatgaaccgaaaccggcggtaaggatctgagctacacatgctcaggttttttacaacgtgcacaacagaattgaaagcaaatatcatgcgatcataggcgtctcgcatatctcattaaagcagggcatgccggtcgagtcaaatctcggtgacgggcaggaccggacggggcggtaccggcaggctgaagtccagctgccagaaacccacgtcatgccagttcccgtgcttgaagccggccgcccgcagcatgccgcggggggcatatccgagcgcctcgtgcatgcgcacgctcgggtcgttgggcagcccgatgacagcgaccacgctcttgaagccctgtgcctccagggacttcagcaggtgggtgtagagcgtggagcccagtcccgtccgctggtggcggggggagacgtacacggtcgactcggccgtccagtcgtaggcgttgcgtgccttccaggggcccgcgtaggcgatgccggcgacctcgccgtccacctcggcgacgagccagggatagcgctcccgcagacggacgaggtcgtccgtccactcctgcggttcctgcggctcggtacggaagttgaccgtgcttgtctcgatgtagtggttgacgatggtgcagaccgccggcatgtccgcctcggtggcacggcggatgtcggccgggcgtcgttctgggctcatggtagactcgacggatccacgtgtggaagatatgaatttttttgagaaactagataagattaatgaatatcggtgttttggttttttcttgtggccgtctttgtttatattgagatttttcaaatcagtgcgcaagacgtgacgtaagtatccgagtcagtttttatttttctactaatttggtcgaatctagattcgacggtatcgataagctcgcggatccctgaaagcgacgttggatgttaacatctacaaattgccttttcttatcgaccatgtacgtaagcgcttacgtttttggtggacccttgaggaaactggtagctgttgtgggcctgtggtctcaagatggatcattaatttccaccttcacctacgatggggggcatcgcaccggtgagtaatattgtacggctaagagcgaatttggcctgtaggatccctgaaagcgacgttggatgttaacatctacaaattgccttttcttatcgaccatgtacgtaagcgcttacgtttttggtggacccttgaggaaactggtagctgttgtgggcctgtggtctcaagatggatcattaatttccaccttcacctacgatggggggcatcgcaccggtgagtaatattgtacggctaagagcgaatttggcctgtaggatccctgaaagcgacgttggatgttaacatctacaaattgccttttcttatcgaccatgtacgtaagcgcttacgtttttggtggacccttgaggaaactggtagctgttgtgggcctgtggtctcaagatggatcattaatttccaccttcacctacgatggggggcatcgcaccggtgagtaatattgtacggctaagagcgaatttggcctgtaggatccgcgagctggtcaatcccattgcttttgaagcagctcaacattgatctctttctcgatcgagggagatttttcaaatcagtgcgcaagacgtgacgtaagtatccgagtcagtttttatttttctactaatttggtcgtttatttcggcgtgtaggacatggcaaccgggcctgaatttcgcgggtattctgtttctattccaactttttcttgatccgcagccattaacgacttttgaatagatacgctgacacgccaagcctcgctagtcaaaagtgtaccaaacaacgctttacagcaagaacggaatgcgcgtgacgctcgcggtgacgccatttcgccttttcagaaatggataaatagccttgcttcctattatatcttcccaaattaccaatacattacactagcatctgaatttcataaccaatctcgatacaccaaatcgaagatctccctggaattcgcataaacttatcttcatagttgccactccaatttgctccttgaatctcctccacccaatacataatccactcctccatcacccacttcactactaaatcaaacttaactctgtttttctctctcctcctttcatttcttattcttccaatcatcgtactccgccatgaccaccgctgtcaccgccgctgtttctttcccctctaccaaaaccacctctctctccgcccgaagctcctccgtcatttcccctgacaaaatcagctacaaaaaggtgattcccaatttcactgtgttttttattaataatttgttattttgatgatgagatgattaatttgggtgctgcaggttcctttgtactacaggaatgtatctgcaactgggaaaatgggacccatcagggcccagatcgcctctgaattccagctgaccaccatggcaattcccggggatcagctcgaatttccccgatcgttcaaacatttggcaataaagtttcttaagattgaatcctgttgccggtcttgcgatgattatcatataatttctgttgaattacgttaagcatgtaataattaacatgtaatgcatgacgttatttatgagatgggtttttatgattagagtcccgcaattatacatttaatacgcgatagaaaacaaaatatagcgcgcaaactaggataaattatcgcgcgcggtgtcatctatgttactagatcgggaattggcatgcaagcttggcactggccgtcgttttacaacgtcgtgactgggaaaaccctggcgttacccaacttaatcgccttgcagcacatccccctttcgccagctggcgtaatagcgaagaggcccgcaccgatcgcccttcccaacagttgcgcagcctgaatggcgaatgctagagcagcttgagcttggatcagattgtcgtttcccgccttcagtttaaactatcagtgtttgacaggatatattggcgggtaaacctaagagaaaagagcgtttattagaataatcggatatttaaaagggcgtgaaaaggtttatccgttcgtccatttgtatgtgcatgccaaccacagggttcccctcgggatcaaagtactttgatccaacccctccgctgctatagtgcagtcggcttctgacgttcagtgcagccgtcttctgaaaacgacatgtcgcacaagtcctaagttacgcgacaggctgccgccctgcccttttcctggcgttttcttgtcgcgtgttttagtcgcataaagtagaatacttgcgactagaaccggagacattacgccatgaacaagagcgccgccgctggcctgctgggctatgcccgcgtcagcaccgacgaccaggacttgaccaaccaacgggccgaactgcacgcggccggctgcaccaagctgttttccgagaagatcaccggcaccaggcgcgaccgcccggagctggccaggatgcttgaccacctacgccctggcgacgttgtgacagtgaccaggctagaccgcctggcccgcagcacccgcgacctactggacattgccgagcgcatccaggaggccggcgcgggcctgcgtagcctggcagagccgtgggccgacaccaccacgccggccggccgcatggtgttgaccgtgttcgccggcattgccgagttcgagcgttccctaatcatcgaccgcacccggagcgggcgcgaggccgccaaggcccgaggcgtgaagtttggcccccgccctaccctcaccccggcacagatcgcgcacgcccgcgagctgatcgaccaggaaggccgcaccgtgaaagaggcggctgcactgcttggcgtgcatcgctcgaccctgtaccgcgcacttgagcgcagcgaggaagtgacgcccaccgaggccaggcggcgcggtgccttccgtgaggacgcattgaccgaggccgacgccctggcggccgccgagaatgaacgccaagaggaacaagcatgaaaccgcaccaggacggccaggacgaaccgtttttcattaccgaagagatcgaggcggagatgatcgcggccgggtacgtgttcgagccgcccgcgcacgtctcaaccgtgcggctgcatgaaatcctggccggtttgtctgatgccaagctggcggcctggccggccagcttggccgctgaagaaaccgagcgccgccgtctaaaaaggtgatgtgtatttgagtaaaacagcttgcgtcatgcggtcgctgcgtatatgatgcgatgagtaaataaacaaatacgcaaggggaacgcatgaaggttatcgctgtacttaaccagaaaggcgggtcaggcaagacgaccatcgcaacccatctagcccgcgccctgcaactcgccggggccgatgttctgttagtcgattccgatccccagggcagtgcccgcgattgggcggccgtgcgggaagatcaaccgctaaccgttgtcggcatcgaccgcccgacgattgaccgcgacgtgaaggccatcggccggcgcgacttcgtagtgatcgacggagcgccccaggcggcggacttggctgtgtccgcgatcaaggcagccgacttcgtgctgattccggtgcagccaagcccttacgacatatgggccaccgccgacctggtggagctggttaagcagcgcattgaggtcacggatggaaggctacaagcggcctttgtcgtgtcgcgggcgatcaaaggcacgcgcatcggcggtgaggttgccgaggcgctggccgggtacgagctgcccattcttgagtcccgtatcacgcagcgcgtgagctacccaggcactgccgccgccggcacaaccgttcttgaatcagaacccgagggcgacgctgcccgcgaggtccaggcgctggccgctgaaattaaatcaaaactcatttgagttaatgaggtaaagagaaaatgagcaaaagcacaaacacgctaagtgccggccgtccgagcgcacgcagcagcaaggctgcaacgttggccagcctggcagacacgccagccatgaagcgggtcaactttcagttgccggcggaggatcacaccaagctgaagatgtacgcggtacgccaaggcaagaccattaccgagctgctatctgaatacatcgcgcagctaccagagtaaatgagcaaatgaataaatgagtagatgaattttagcggctaaaggaggcggcatggaaaatcaagaacaaccaggcaccgacgccgtggaatgccccatgtgtggaggaacgggcggttggccaggcgtaagcggctgggttgcctgccggccctgcaatggcactggaacccccaagcccgaggaatcggcgtgagcggtcgcaaaccatccggcccggtacaaatcggcgcggcgctgggtgatgacctggtggagaagttgaaggccgcgcaggccgcccagcggcaacgcatcgaggcagaagcacgccccggtgaatcgtggcaagcggccgctgatcgaatccgcaaagaatcccggcaaccgccggcagccggtgcgccgtcgattaggaagccgcccaagggcgacgagcaaccagattttttcgttccgatgctctatgacgtgggcacccgcgatagtcgcagcatcatggacgtggccgttttccgtctgtcgaagcgtgaccgacgagctggcgaggtgatccgctacgagcttccagacgggcacgtagaggtttccgcagggccggccggcatggccagtgtgtgggattacgacctggtactgatggcggtttcccatctaaccgaatccatgaaccgataccgggaagggaagggagacaagcccggccgcgtgttccgtccacacgttgcggacgtactcaagttctgccggcgagccgatggcggaaagcagaaagacgacctggtagaaacctgcattcggttaaacaccacgcacgttgccatgcagcgtacgaagaaggccaagaacggccgcctggtgacggtatccgagggtgaagccttgattagccgctacaagatcgtaaagagcgaaaccgggcggccggagtacatcgagatcgagctagctgattggatgtaccgcgagatcacagaaggcaagaacccggacgtgctgacggttcaccccgattactttttgatcgatcccggcatcggccgttttctctaccgcctggcacgccgcgccgcaggcaaggcagaagccagatggttgttcaagacgatctacgaacgcagtggcagcgccggagagttcaagaagttctgtttcaccgtgcgcaagctgatcgggtcaaatgacctgccggagtacgatttgaaggaggaggcggggcaggctggcccgatcctagtcatgcgctaccgcaacctgatcgagggcgaagcatccgccggttcctaatgtacggagcagatgctagggcaaattgccctagcaggggaaaaaggtcgaaaaggtctctttcctgtggatagcacgtacattgggaacccaaagccgtacattgggaaccggaacccgtacattgggaacccaaagccgtacattgggaaccggtcacacatgtaagtgactgatataaaagagaaaaaaggcgatttttccgcctaaaactctttaaaacttattaaaactcttaaaacccgcctggcctgtgcataactgtctggccagcgcacagccgaagagctgcaaaaagcgcctacccttcggtcgctgcgctccctacgccccgccgcttcgcgtcggcctatcgcggccgctggccgctcaaaaatggctggcctacggccaggcaatctaccagggcgcggacaagccgcgccgtcgccactcgaccgccggcgcccacatcaaggcaccctgcctcgcgcgtttcggtgatgacggtgaaaacctctgacacatgcagctcccggagacggtcacagcttgtctgtaagcggatgccgggagcagacaagcccgtcagggcgcgtcagcgggtgttggcgggtgtcggggcgcagccatgacccagtcacgtagcgatagcggagtgtatactggcttaactatgcggcatcagagcagattgtactgagagtgcaccatatgcggtgtgaaataccgcacagatgcgtaaggagaaaataccgcatcaggcgctcttccgcttcctcgctcactgactcgctgcgctcggtcgttcggctgcggcgagcggtatcagctcactcaaaggcggtaatacggttatccacagaatcaggggataacgcaggaaagaacatgtgagcaaaaggccagcaaaaggccaggaaccgtaaaaaggccgcgttgctggcgtttttccataggctccgcccccctgacgagcatcacaaaaatcgacgctcaagtcagaggtggcgaaacccgacaggactataaagataccaggcgtttccccctggaagctccctcgtgcgctctcctgttccgaccctgccgcttaccggatacctgtccgcctttctcccttcgggaagcgtggcgctttctcatagctcacgctgtaggtatctcagttcggtgtaggtcgttcgctccaagctgggctgtgtgcacgaaccccccgttcagcccgaccgctgcgccttatccggtaactatcgtcttgagtccaacccggtaagacacgacttatcgccactggcagcagccactggtaacaggattagcagagcgaggtatgtaggcggtgctacagagttcttgaagtggtggcctaactacggctacactagaaggacagtatttggtatctgcgctctgctgaagccagttaccttcggaaaaagagttggtagctcttgatccggcaaacaaaccaccgctggtagcggtggtttttttgtttgcaagcagcagattacgcgcagaaaaaaaggatctcaagaagatcctttgatcttttctacggggtctgacgctcagtggaacgaaaactcacgttaagggattttggtcatgcattctaggtactaaaacaattcatccagtaaaatataatattttattttctcccaatcaggcttgatccccagtaagtcaaaaaatagctcgacatactgttcttccccgatatcctccctgatcgaccggacgcagaaggcaatgtcataccacttgtccgccctgccgcttctcccaagatcaataaagccacttactttgccatctttcacaaagatgttgctgtctcccaggtcgccgtgggaaaagacaagttcctcttcgggcttttccgtctttaaaaaatcatacagctcgcgcggatctttaaatggagtgtcttcttcccagttttcgcaatccacatcggccagatcgttattcagtaagtaatccaattcggctaagcggctgtctaagctattcgtatagggacaatccgatatgtcgatggagtgaaagagcctgatgcactccgcatacagctcgataatcttttcagggctttgttcatcttcatactcttccgagcaaaggacgccatcggcctcactcatgagcagattgctccagccatcatgccgttcaaagtgcaggacctttggaacaggcagctttccttccagccatagcatcatgtccttttcccgttccacatcataggtggtccctttataccggctgtccgtcatttttaaatataggttttcattttctcccaccagcttatataccttagcaggagacattccttccgtatcttttacgcagcggtatttttcgatcagttttttcaattccggtgatattctcattttagccatttattatttccttcctcttttctacagtatttaaagataccccaagaagctaattataacaagacgaactccaattcactgttccttgcattctaaaaccttaaataccagaaaacagctttttcaaagttgttttcaaagttggcgtataacatagtatcgacggagccgattttgaaaccgcggtgatcacaggcagcaacgctctgtcatcgttacaatcaacatgctaccctccgcgagatcatccgtgtttcaaacccggcagcttagttgccgttcttccgaatagcatcggtaacatgagcaaagtctgccgccttacaacggctctcccgctgacgccgtcccggactgatgggctgcctgtatcgagtggtgattttgtgccgagctgccggtcggggagctgttggctggctggtggcaggatatattgtggtgtaaacaaattgacgcttagacaacttaataacacattgcggacgtttttaatgtactgaattaacgccgaatta

SEQ ID NO: 33 - protein, 65 aa, Artificial sequence
  Synthetic Construct
MTTAVTAAVSFPSTKTTSLSARSSSVISPDKISYKKVPLYYRNVSATGKMGPIRAQIASEFQLTT

SEQ ID NO: 34 - DNA, 9129 bp, Artificial sequence
  plasmid VC-MME356-1QCZ
  transit_peptide (2128)..(2208)
  CDS (2128)..(2208)
  CDS (2209)..(2226): adapter
agcttggacaatcagtaaattgaacggagaatattattcataaaaatacgatagtaacgggtgatatattcattagaatgaaccgaaaccggcggtaaggatctgagctacacatgctcaggttttttacaacgtgcacaacagaattgaaagcaaatatcatgcgatcataggcgtctcgcatatctcattaaagcagggcatgccggtcgagtcaaatctcggtgacgggcaggaccggacggggcggtaccggcaggctgaagtccagctgccagaaacccacgtcatgccagttcccgtgcttgaagccggccgcccgcagcatgccgcggggggcatatccgagcgcctcgtgcatgcgcacgctcgggtcgttgggcagcccgatgacagcgaccacgctcttgaagccctgtgcctccagggacttcagcaggtgggtgtagagcgtggagcccagtcccgtccgctggtggcggggggagacgtacacggtcgactcggccgtccagtcgtaggcgttgcgtgccttccaggggcccgcgtaggcgatgccggcgacctcgccgtccacctcggcgacgagccagggatagcgctcccgcagacggacgaggtcgtccgtccactcctgcggttcctgcggctcggtacggaagttgaccgtgcttgtctcgatgtagtggttgacgatggtgcagaccgccggcatgtccgcctcggtggcacggcggatgtcggccgggcgtcgttctgggctcatggtagactcgacggatccacgtgtggaagatatgaatttttttgagaaactagataagattaatgaatatcggtgttttggttttttcttgtggccgtctttgtttatattgagatttttcaaatcagtgcgcaagacgtgacgtaagtatccgagtcagtttttatttttctactaatttggtcgaagctttgggcggatcctctagattcgacggtatcgataagctcgcggatccctgaaagcgacgttggatgttaacatctacaaattgccttttcttatcgaccatgtacgtaagcgcttacgtttttggtggacccttgaggaaactggtagctgttgtgggcctgtggtctcaagatggatcattaatttccaccttcacctacgatggggggcatcgcaccggtgagtaatattgtacggctaagagcgaatttggcctgtaggatccctgaaagcgacgttggatgttaacatctacaaattgccttttcttatcgaccatgtacgtaagcgcttacgtttttggtggacccttgaggaaactggtagctgttgtgggcctgtggtctcaagatggatcattaatttccaccttcacctacgatggggggcatcgcaccggtgagtaatattgtacggctaagagcgaatttggcctgtaggatccctgaaagcgacgttggatgttaacatctacaaattgccttttcttatcgaccatgtacgtaagcgcttacgtttttggtggacccttgaggaaactggtagctgttgtgggcctgtggtctcaagatggatcattaatttccaccttcacctacgatggggggcatcgcaccggtgagtaatattgtacggctaagagcgaatttggcctgtaggatccgcgagctggtcaatcccattgcttttgaagcagctcaacattgatctctttctcgatcgagggagatttttcaaatcagtgcgcaagacgtgacgtaagtatccgagtcagtttttatttttctactaatttggtcgtttatttcggcgtgtaggacatggcaaccgggcctgaatttcgcgggtattctgtttctattccaactttttcttgatccgcagccattaacgacttttgaatagatacgctgacacgccaagcctcgctagtcaaaagtgtaccaaacaacgctttacagcaagaacggaatgcgcgtgacgctcgcggtgacgccatttcgccttttcagaaatggataaatagccttgcttcctattatatcttcccaaattaccaatacattacactagcatctgaatttcataaccaatctcgatacaccaaatcgaagatctccctggaattcatgcagaggtttttctccgccagatcgattctcggttacgccgtcaagacgcggaggaggtctttctcttctcgttcttcggaattccagctgaccaccatggcaattcccggggatcagctcgaatttccccgatcgttcaaacatttggcaataaagtttcttaagattgaatcctgttgccggtcttgcgatgattatcatataatttctgttgaattacgttaagcatgtaataattaacatgtaatgcatgacgttatttatgagatgggtttttatgattagagtcccgcaattatacatttaatacgcgatagaaaacaaaatatagcgcgcaaactaggataaattatcgcgcgcggtgtcatctatgttactagatcgggaattggcatgcaagcttggcactggccgtcgttttacaacgtcgtgactgggaaaaccctggcgttacccaacttaatcgccttgcagcacatccccctttcgccagctggcgtaatagcgaagaggcccgcaccgatcgcccttcccaacagttgcgcagcctgaatggcgaatgctagagcagcttgagcttggatcagattgtcgtttcccgccttcagtttaaactatcagtgtttgacaggatatattggcgggtaaacctaagagaaaagagcgtttattagaataatcggatatttaaaagggcgtgaaaaggtttatccgttcgtccatttgtatgtgcatgccaaccacagggttcccctcgggatcaaagtactttgatccaacccctccgctgctatagtgcagtcggcttctgacgttcagtgcagccgtcttctgaaaacgacatgtcgcacaagtcctaagttacgcgacaggctgccgccctgcccttttcctggcgttttcttgtcgcgtgttttagtcgcataaagtagaatacttgcgactagaaccggagacattacgccatgaacaagagcgccgccgctggcctgctgggctatgcccgcgtcagcaccgacgaccaggacttgaccaaccaacgggccgaactgcacgcggccggctgcaccaagctgttttccgagaagatcaccggcaccaggcgcgaccgcccggagctggccaggatgcttgaccacctacgccctggcgacgttgtgacagtgaccaggctagaccgcctggcccgcagcacccgcgacctactggacattgccgagcgcatccaggaggccggcgcgggcctgcgtagcctggcagagccgtgggccgacaccaccacgccggccggccgcatggtgttgaccgtgttcgccggcattgccgagttcgagcgttccctaatcatcgaccgcacccggagcgggcgcgaggccgccaaggcccgaggcgtgaagtttggcccccgccctaccctcaccccggcacagatcgcgcacgcccgcgagctgatcgaccaggaaggccgcaccgtgaaagaggcggctgcactgcttggcgtgcatcgctcgaccctgtaccgcgcacttgagcgcagcgaggaagtgacgcccaccgaggccaggcggcgcggtgccttccgtgaggacgcattgaccgaggccgacgccctggcggccgccgagaatgaacgccaagaggaacaagcatgaaaccgcaccaggacggccaggacgaaccgtttttcattaccgaagagatcgaggcggagatgatcgcggccgggtacgtgttcgagccgcccgcgcacgtctcaaccgtgcggctgcatgaaatcctggccggtttgtctgatgccaagctggcggcctggccggccagcttggccgctgaagaaaccgagcgccgccgtctaaaaaggtgatgtgtatttgagtaaaacagcttgcgtcatgcggtcgctgcgtatatgatgcgatgagtaaataaacaaatacgcaaggggaacgcatgaaggttatcgctgtacttaaccagaaaggcgggtcaggcaagacgaccatcgcaacccatctagcccgcgccctgcaactcgccggggccgatgttctgttagtcgattccgatccccagggcagtgcccgcgattgggcggccgtgcgggaagatcaaccgctaaccgttgtcggcatcgaccgcccgacgattgaccgcgacgtgaaggccatcggccggcgcgacttcgtagtgatcgacggagcgccccaggcggcggacttggctgtgtccgcgatcaaggcagccgacttcgtgctgattccggtgcagccaagcccttacgacatatgggccaccgccgacctggtggagctggttaagcagcgcattgaggtcacggatggaaggctacaagcggcctttgtcgtgtcgcgggcgatcaaaggcacgcgcatcggcggtgaggttgccgaggcgctggccgggtacgagctgcccattcttgagtcccgtatcacgcagcgcgtgagctacccaggcactgccgccgccggcacaaccgttcttgaatcagaacccgagggcgacgctgcccgcgaggtccaggcgctggccgctgaaattaaatcaaaactcatttgagttaatgaggtaaagagaaaatgagcaaaagcacaaacacgctaagtgccggccgtccgagcgcacgcagcagcaaggctgcaacgttggccagcctggcagacacgccagccatgaagcgggtcaactttcagttgccggcggaggatcacaccaagctgaagatgtacgcggtacgccaaggcaagaccattaccgagctgctatctgaatacatcgcgcagctaccagagtaaatgagcaaatgaataaatgagtagatgaattttagcggctaaaggaggcggcatggaaaatcaagaacaaccaggcaccgacgccgtggaatgccccatgtgtggaggaacgggcggttggccaggcgtaagcggctgggttgcctgccggccctgcaatggcactggaacccccaagcccgaggaatcggcgtgagcggtcgcaaaccatccggcccggtacaaatcggcgcggcgctgggtgatgacctggtggagaagttgaaggccgcgcaggccgcccagcggcaacgcatcgaggcagaagcacgccccggtgaatcgtggcaagcggccgctgatcgaatccgcaaagaatcccggcaaccgccggcagccggtgcgccgtcgattaggaagccgcccaagggcgacgagcaaccagattttttcgttccgatgctctatgacgtgggcacccgcgatagtcgcagcatcatggacgtggccgttttccgtctgtcgaagcgtgaccgacgagctggcgaggtgatccgctacgagcttccagacgggcacgtagaggtttccgcagggccggccggcatggccagtgtgtgggattacgacctggtactgatggcggtttcccatctaaccgaatccatgaaccgataccgggaagggaagggagacaagcccggccgcgtgttccgtccacacgttgcggacgtactcaagttctgccggcgagccgatggcggaaagcagaaagacgacctggtagaaacctgcattcggttaaacaccacgcacgttgccatgcagcgtacgaagaaggccaagaacggccgcctggtgacggtatccgagggtgaagccttgattagccgctacaagatcgtaaagagcgaaaccgggcggccggagtacatcgagatcgagctagctgattggatgtaccgcgagatcacagaaggcaagaacccggacgtgctgacggttcaccccgattactttttgatcgatcccggcatcggccgttttctctaccgcctggcacgccgcgccgcaggcaaggcagaagccagatggttgttcaagacgatctacgaacgcagtggcagcgccggagagttcaagaagttctgtttcaccgtgcgcaagctgatcgggtcaaatgacctgccggagtacgatttgaaggaggaggcggggcaggctggcccgatcctagtcatgcgctaccgcaacctgatcgagggcgaagcatccgccggttcctaatgtacggagcagatgctagggcaaattgccctagcaggggaaaaaggtcgaaaaggtctctttcctgtggatagcacgtacattgggaacccaaagccgtacattgggaaccggaacccgtacattgggaacccaaagccgtacattgggaaccggtcacacatgtaagtgactgatataaaagagaaaaaaggcgatttttccgcctaaaactctttaaaacttattaaaactcttaaaacccgcctggcctgtgcataactgtctggccagcgcacagccgaagagctgcaaaaagcgcctacccttcggtcgctgcgctccctacgccccgccgcttcgcgtcggcctatcgcggccgctggccgctcaaaaatggctggcctacggccaggcaatctaccagggcgcggacaagccgcgccgtcgccactcgaccgccggcgcccacatcaaggcaccctgcctcgcgcgtttcggtgatgacggtgaaaacctctgacacatgcagctcccggagacggtcacagcttgtctgtaagcggatgccgggagcagacaagcccgtcagggcgcgtcagcgggtgttggcgggtgtcggggcgcagccatgacccagtcacgtagcgatagcggagtgtatactggcttaactatgcggcatcagagcagattgtactgagagtgcaccatatgcggtgtgaaataccgcacagatgcgtaaggagaaaataccgcatcaggcgctcttccgcttcctcgctcactgactcgctgcgctcggtcgttcggctgcggcgagcggtatcagctcactcaaaggcggtaatacggttatccacagaatcaggggataacgcaggaaagaacatgtgagcaaaaggccagcaaaaggccaggaaccgtaaaaaggccgcgttgctggcgtttttccataggctccgcccccctgacgagcatcacaaaaatcgacgctcaagtcagaggtggcgaaacccgacaggactataaagataccaggcgtttccccctggaagctccctcgtgcgctctcctgttccgaccctgccgcttaccggatacctgtccgcctttctcccttcgggaagcgtggcgctttctcatagctcacgctgtaggtatctcagttcggtgtaggtcgttcgctccaagctgggctgtgtgcacgaaccccccgttcagcccgaccgctgcgccttatccggtaactatcgtcttgagtccaacccggtaagacacgacttatcgccactggcagcagccactggtaacaggattagcagagcgaggtatgtaggcggtgctacagagttcttgaagtggtggcctaactacggctacactagaaggacagtatttggtatctgcgctctgctgaagccagttaccttcggaaaaagagttggtagctcttgatccggcaaacaaaccaccgctggtagcggtggtttttttgtttgcaagcagcagattacgcgcagaaaaaaaggatctcaagaagatcctttgatcttttctacggggtctgacgctcagtggaacgaaaactcacgttaagggattttggtcatgcattctaggtactaaaacaattcatccagtaaaatataatattttattttctcccaatcaggcttgatccccagtaagtcaaaaaatagctcgacatactgttcttccccgatatcctccctgatcgaccggacgcagaaggcaatgtcataccacttgtccgccctgccgcttctcccaagatcaataaagccacttactttgccatctttcacaaagatgttgctgtctcccaggtcgccgtgggaaaagacaagttcctcttcgggcttttccgtctttaaaaaatcatacagctcgcgcggatctttaaatggagtgtcttcttcccagttttcgcaatccacatcggccagatcgttattcagtaagtaatccaattcggctaagcggctgtctaagctattcgtatagggacaatccgatatgtcgatggagtgaaagagcctgatgcactccgcatacagctcgataatcttttcagggctttgttcatcttcatactcttccgagcaaaggacgccatcggcctcactcatgagcagattgctccagccatcatgccgttcaaagtgcaggacctttggaacaggcagctttccttccagccatagcatcatgtccttttcccgttccacatcataggtggtccctttataccggctgtccgtcatttttaaatataggttttcattttctcccaccagcttatataccttagcaggagacattccttccgtatcttttacgcagcggtatttttcgatcagttttttcaattccggtgatattctcattttagccatttattatttccttcctcttttctacagtatttaaagataccccaagaagctaattataacaagacgaactccaattcactgttccttgcattctaaaaccttaaataccagaaaacagctttttcaaagttgttttcaaagttggcgtataacatagtatcgacggagccgattttgaaaccgcggtgatcacaggcagcaacgctctgtcatcgttacaatcaacatgctaccctccgcgagatcatccgtgtttcaaacccggcagcttagttgccgttcttccgaatagcatcggtaacatgagcaaagtctgccgccttacaacggctctcccgctgacgccgtcccggactgatgggctgcctgtatcgagtggtgattttgtgccgagctgccggtcggggagctgttggctggctggtggcaggatatattgtggtgtaaacaaattgacgcttagacaacttaataacacattgcggacgtttttaatgtactgaattaacgccgaatta

SEQ ID NO: 35 - protein, 33 aa, Artificial sequence
  Synthetic Construct
MQRFFSARSILGYAVKTRRRSFSSRSSEFQLTT

SEQ ID NO: 36 - DNA, 8585 bp, Artificial sequence
  plasmid VC-MME301-1QCZ
agcttggacaatcagtaaattgaacggagaatattattcataaaaatacgatagtaacgggtgatatattcattagaatgaaccgaaaccggcggtaaggatctgagctacacatgctcaggttttttacaacgtgcacaacagaattgaaagcaaatatcatgcgatcataggcgtctcgcatatctcattaaagcagggcatgccggtcgagtcaaatctcggtgacgggcaggaccggacggggcggtaccggcaggctgaagtccagctgccagaaacccacgtcatgccagttcccgtgcttgaagccggccgcccgcagcatgccgcggggggcatatccgagcgcctcgtgcatgcgcacgctcgggtcgttgggcagcccgatgacagcgaccacgctcttgaagccctgtgcctccagggacttcagcaggtgggtgtagagcgtggagcccagtcccgtccgctggtggcggggggagacgtacacggtcgactcggccgtccagtcgtaggcgttgcgtgccttccaggggcccgcgtaggcgatgccggcgacctcgccgtccacctcggcgacgagccagggatagcgctcccgcagacggacgaggtcgtccgtccactcctgcggttcctgcggctcggtacggaagttgaccgtgcttgtctcgatgtagtggttgacgatggtgcagaccgccggcatgtccgcctcggtggcacggcggatgtcggccgggcgtcgttctgggctcatggtagactcgacggatccacgtgtggaagatatgaatttttttgagaaactagataagattaatgaatatcggtgttttggttttttcttgtggccgtctttgtttatattgagatttttcaaatcagtgcgcaagacgtgacgtaagtatccgagtcagtttttatttttctactaatttggtcgaagctttgggcggatcctctagactgcagcaaatttacacattgccactaaacgtctaaacccttgtaatttgtttttgttttactatgtgtgttatgtatttgatttgcgataaatttttatatttggtactaaatttataacaccttttatgctaacgtttgccaacacttagcaatttgcaagttgattaattgattctaaattatttttgtcttctaaatacatatactaatcaactggaaatgtaaatatttgctaatatttctactataggagaattaaagtgagtgaatatggtaccacaaggtttggagatttaattgttgcaatgctgcatggatggcatatacaccaaacattcaataattcttgaggataataatggtaccacacaagatttgaggtgcatgaacgtcacgtggacaaaaggtttagtaatttttcaagacaacaatgttaccacacacaagttttgaggtgcatgcatggatgccctgtggaaagtttaaaaatattttggaaatgatttgcatggaagccatgtgtaaaaccatgacatccacttggaggatgcaataatgaagaaaactacaaatttacatgcaactagttatgcatgtagtctatataatgaggattttgcaatactttcattcatacacactcactaagttttacacgattataatttcttcataccattaattaagaattccagctgaccaccatggcaattcccggggatcagctcgaatttccccgatcgttcaaacatttggcaataaagtttcttaagattgaatcctgttgccggtcttgcgatgattatcatataatttctgttgaattacgttaagcatgtaataattaacatgtaatgcatgacgttatttatgagatgggtttttatgattagagtcccgcaattatacatttaatacgcgatagaaaacaaaatatagcgcgcaaactaggataaattatcgcgcgcggtgtcatctatgttactagatcgggaattggcatgcaagcttggcactggccgtcgttttacaacgtcgtgactgggaaaaccctggcgttacccaacttaatcgccttgcagcacatccccctttcgccagctggcgtaatagcgaagaggcccgcaccgatcgcccttcccaacagttgcgcagcctgaatggcgaatgctagagcagcttgagcttggatcagattgtcgtttcccgccttcagtttaaactatcagtgtttgacaggatatattggcgggtaaacctaagagaaaagagcgtttattagaataatcggatatttaaaagggcgtgaaaaggtttatccgttcgtccatttgtatgtgcatgccaaccacagggttcccctcgggatcaaagtactttgatccaacccctccgctgctatagtgcagtcggcttctgacgttcagtgcagccgtcttctgaaaacgacatgtcgcacaagtcctaagttacgcgacaggctgccgccctgcccttttcctggcgttttcttgtcgcgtgttttagtcgcataaagtagaatacttgcgactagaaccggagacattacgccatgaacaagagcgccgccgctggcctgctgggctatgcccgcgtcagcaccgacgaccaggacttgaccaaccaacgggccgaactgcacgcggccggctgcaccaagctgttttccgagaagatcaccggcaccaggcgcgaccgcccggagctggccaggatgcttgaccacctacgccctggcgacgttgtgacagtgaccaggctagaccgcctggcccgcagcacccgcgacctactggacattgccgagcgcatccaggaggccggcgcgggcctgcgtagcctggcagagccgtgggccgacaccaccacgccggccggccgcatggtgttgaccgtgttcgccggcattgccgagttcgagcgttccctaatcatcgaccgcacccggagcgggcgcgaggccgccaaggcccgaggcgtgaagtttggcccccgccctaccctcaccccggcacagatcgcgcacgcccgcgagctgatcgaccaggaaggccgcaccgtgaaagaggcggctgcactgcttggcgtgcatcgctcgaccctgtaccgcgcacttgagcgcagcgaggaagtgacgcccaccgaggccaggcggcgcggtgccttccgtgaggacgcattgaccgaggccgacgccctggcggccgccgagaatgaacgccaagaggaacaagcatgaaaccgcaccaggacggccaggacgaaccgtttttcattaccgaagagatcgaggcggagatgatcgcggccgggtacgtgttcgagccgcccgcgcacgtctcaaccgtgcggctgcatgaaatcctggccggtttgtctgatgccaagctggcggcctggccggccagcttggccgctgaagaaaccgagcgccgccgtctaaaaaggtgatgtgtatttgagtaaaacagcttgcgtcatgcggtcgctgcgtatatgatgcgatgagtaaataaacaaatacgcaaggggaacgcatgaaggttatcgctgtacttaaccagaaaggcgggtcaggcaagacgaccatcgcaacccatctagcccgcgccctgcaactcgccggggccgatgttctgttagtcgattccgatccccagggcagtgcccgcgattgggcggccgtgcgggaagatcaaccgctaaccgttgtcggcatcgaccgcccgacgattgaccgcgacgtgaaggccatcggccggcgcgacttcgtagtgatcgacggagcgccccaggcggcggacttggctgtgtccgcgatcaaggcagccgacttcgtgctgattccggtgcagccaagcccttacgacatatgggccaccgccgacctggtggagctggttaagcagcgcattgaggtcacggatggaaggctacaagcggcctttgtcgtgtcgcgggcgatcaaaggcacgcgcatcggcggtgaggttgccgaggcgctggccgggtacgagctgcccattcttgagtcccgtatcacgcagcgcgtgagctacccaggcactgccgccgccggcacaaccgttcttgaatcagaacccgagggcgacgctgcccgcgaggtccaggcgctggccgctgaaattaaatcaaaactcatttgagttaatgaggtaaagagaaaatgagcaaaagcacaaacacgctaagtgccggccgtccgagcgcacgcagcagcaaggctgcaacgttggccagcctggcagacacgccagccatgaagcgggtcaactttcagttgccggcggaggatcacaccaagctgaagatgtacgcggtacgccaaggcaagaccattaccgagctgctatctgaatacatcgcgcagctaccagagtaaatgagcaaatgaataaatgagtagatgaattttagcggctaaaggaggcggcatggaaaatcaagaacaaccaggcaccgacgccgtggaatgccccatgtgtggaggaacgggcggttggccaggcgtaagcggctgggttgcctgccggccctgcaatggcactggaacccccaagcccgaggaatcggcgtgagcggtcgcaaaccatccggcccggtacaaatcggcgcggcgctgggtgatgacctggtggagaagttgaaggccgcgcaggccgcccagcggcaacgcatcgaggcagaagcacgccccggtgaatcgtggcaagcggccgctgatcgaatccgcaaagaatcccggcaaccgccggcagccggtgcgccgtcgattaggaagccgcccaagggcgacgagcaaccagattttttcgttccgatgctctatgacgtgggcacccgcgatagtcgcagcatcatggacgtggccgttttccgtctgtcgaagcgtgaccgacgagctggcgaggtgatccgctacgagcttccagacgggcacgtagaggtttccgcagggccggccggcatggccagtgtgtgggattacgacctggtactgatggcggtttcccatctaaccgaatccatgaaccgataccgggaagggaagggagacaagcccggccgcgtgttccgtccacacgttgcggacgtactcaagttctgccggcgagccgatggcggaaagcagaaagacgacctggtagaaacctgcattcggttaaacaccacgcacgttgccatgcagcgtacgaagaaggccaagaacggccgcctggtgacggtatccgagggtgaagccttgattagccgctacaagatcgtaaagagcgaaaccgggcggccggagtacatcgagatcgagctagctgattggatgtaccgcgagatcacagaaggcaagaacccggacgtgctgacggttcaccccgattactttttgatcgatcccggcatcggccgttttctctaccgcctggcacgccgcgccgcaggcaaggcagaagccagatggttgttcaagacgatctacgaacgcagtggcagcgccggagagttcaagaagttctgtttcaccgtgcgcaagctgatcgggtcaaatgacctgccggagtacgatttgaaggaggaggcggggcaggctggcccgatcctagtcatgcgctaccgcaacctgatcgagggcgaagcatccgccggttcctaatgtacggagcagatgctagggcaaattgccctagcaggggaaaaaggtcgaaaaggtctctttcctgtggatagcacgtacattgggaacccaaagccgtacattgggaaccggaacccgtacattgggaacccaaagccgtacattgggaaccggtcacacatgtaagtgactgatataaaagagaaaaaaggcgatttttccgcctaaaactctttaaaacttattaaaactcttaaaacccgcctggcctgtgcataactgtctggccagcgcacagccgaagagctgcaaaaagcgcctacccttcggtcgctgcgctccctacgccccgccgcttcgcgtcggcctatcgcggccgctggccgctcaaaaatggctggcctacggccaggcaatctaccagggcgcggacaagccgcgccgtcgccactcgaccgccggcgcccacatcaaggcaccctgcctcgcgcgtttcggtgatgacggtgaaaacctctgacacatgcagctcccggagacggtcacagcttgtctgtaagcggatgccgggagcagacaagcccgtcagggcgcgtcagcgggtgttggcgggtgtcggggcgcagccatgacccagtcacgtagcgatagcggagtgtatactggcttaactatgcggcatcagagcagattgtactgagagtgcaccatatgcggtgtgaaataccgcacagatgcgtaaggagaaaataccgcatcaggcgctcttccgcttcctcgctcactgactcgctgcgctcggtcgttcggctgcggcgagcggtatcagctcactcaaaggcggtaatacggttatccacagaatcaggggataacgcaggaaagaacatgtgagcaaaaggccagcaaaaggccaggaaccgtaaaaaggccgcgttgctggcgtttttccataggctccgcccccctgacgagcatcacaaaaatcgacgctcaagtcagaggtggcgaaacccgacaggactataaagataccaggcgtttccccctggaagctccctcgtgcgctctcctgttccgaccctgccgcttaccggatacctgtccgcctttctcccttcgggaagcgtggcgctttctcatagctcacgctgtaggtatctcagttcggtgtaggtcgttcgctccaagctgggctgtgtgcacgaaccccccgttcagcccgaccgctgcgccttatccggtaactatcgtcttgagtccaacccggtaagacacgacttatcgccactggcagcagccactggtaacaggattagcagagcgaggtatgtaggcggtgctacagagttcttgaagtggtggcctaactacggctacactagaaggacagtatttggtatctgcgctctgctgaagccagttaccttcggaaaaagagttggtagctcttgatccggcaaacaaaccaccgctggtagcggtggtttttttgtttgcaagcagcagattacgcgcagaaaaaaaggatctcaagaagatcctttgatcttttctacggggtctgacgctcagtggaacgaaaactcacgttaagggattttggtcatgcattctaggtactaaaacaattcatccagtaaaatataatattttattttctcccaatcaggcttgatccccagtaagtcaaaaaatagctcgacatactgttcttccccgatatcctccctgatcgaccggacgcagaaggcaatgtcataccacttgtccgccctgccgcttctcccaagatcaataaagccacttactttgccatctttcacaaagatgttgctgtctcccaggtcgccgtgggaaaagacaagttcctcttcgggcttttccgtctttaaaaaatcatacagctcgcgcggatctttaaatggagtgtcttcttcccagttttcgcaatccacatcggccagatcgttattcagtaagtaatccaattcggctaagcggctgtctaagctattcgtatagggacaatccgatatgtcgatggagtgaaagagcctgatgcactccgcatacagctcgataatcttttcagggctttgttcatcttcatactcttccgagcaaaggacgccatcggcctcactcatgagcagattgctccagccatcatgccgttcaaagtgcaggacctttggaacaggcagctttccttccagccatagcatcatgtccttttcccgttccacatcataggtggtccctttataccggctgtccgtcatttttaaatataggttttcattttctcccaccagcttatataccttagcaggagacattccttccgtatcttttacgcagcggtatttttcgatcagttttttcaattccggtgatattctcattttagccatttattatttccttcctcttttctacagtatttaaagataccccaagaagctaattataacaagacgaactccaattcactgttccttgcattctaaaaccttaaataccagaaaacagctttttcaaagttgttttcaaagttggcgtataacatagtatcgacggagccgattttgaaaccgcggtgatcacaggcagcaacgctctgtcatcgttacaatcaacatgctaccctccgcgagatcatccgtgtttcaaacccggcagcttagttgccgttcttccgaatagcatcggtaacatgagcaaagtctgccgccttacaacggctctcccgctgacgccgtcccggactgatgggctgcctgtatcgagtggtgattttgtgccgagctgccggtcggggagctgttggctggctggtggcaggatatattgtggtgtaaacaaattgacgcttagacaacttaataacacattgcggacgtttttaatgtactgaattaacgccgaatta

SEQ ID NO: 37 - DNA, 9010 bp, Artificial sequence
  plasmid pMTX461korrp
  5'UTR (1673)..(1837)
  transit_peptide (1838)..(1945)
  CDS (1838)..(1945)
  transit_peptide (2023)..(2091)
  CDS (2023)..(2091)
  CDS (2092)..(2109): adapter
agctttgggcggatcctctagaggacaatcagtaaattgaacggagaatattattcataaaaatacgatagtaacgggtgatatattcattagaatgaaccgaaaccggcggtaaggatctgagctacacatgctcaggttttttacaacgtgcacaacagaattgaaagcaaatatcatgcgatcataggcgtctcgcatatctcattaaagcagggcatgccggtcgagtcaaatctcggtgacgggcaggaccggacggggcggtaccggcaggctgaagtccagctgccagaaacccacgtcatgccagttcccgtgcttgaagccggccgcccgcagcatgccgcggggggcatatccgagcgcctcgtgcatgcgcacgctcgggtcgttgggcagcccgatgacagcgaccacgctcttgaagccctgtgcctccagggacttcagcaggtgggtgtagagcgtggagcccagtcccgtccgctggtggcggggggagacgtacacggtcgactcggccgtccagtcgtaggcgttgcgtgccttccaggggcccgcgtaggcgatgccggcgacctcgccgtccacctcggcgacgagccagggatagcgctcccgcagacggacgaggtcgtccgtccactcctgcggttcctgcggctcggtacggaagttgaccgtgcttgtctcgatgtagtggttgacgatggtgcagaccgccggcatgtccgcctcggtggcacggcggatgtcggccgggcgtcgttctgggctcatggtagactcgacggatccacgtgtggaagatatgaatttttttgagaaactagataagattaatgaatatcggtgttttggttttttcttgtggccgtctttgtttatattgagatttttcaaatcagtgcgcaagacgtgacgtaagtatccgagtcagtttttatttttctactaatttggtcgaatctagactgcagcaaatttacacattgccactaaacgtctaaacccttgtaatttgtttttgttttactatgtgtgttatgtatttgatttgcgataaatttttatatttggtactaaatttataacaccttttatgctaacgtttgccaacacttagcaatttgcaagttgattaattgattctaaattatttttgtcttctaaatacatatactaatcaactggaaatgtaaatatttgctaatatttctactataggagaattaaagtgagtgaatatggtaccacaaggtttggagatttaattgttgcaatgctgcatggatggcatatacaccaaacattcaataattcttgaggataataatggtaccacacaagatttgaggtgcatgaacgtcacgtggacaaaaggtttagtaatttttcaagacaacaatgttaccacacacaagttttgaggtgcatgcatggatgccctgtggaaagtttaaaaatattttggaaatgatttgcatggaagccatgtgtaaaaccatgacatccacttggaggatgcaataatgaagaaaactacaaatttacatgcaactagttatgcatgtagtctatataatgaggattttgcaatactttcattcatacacactcactaagttttacacgattataatttcttcataccattaattaagaattcgcataaacttatcttcatagttgccactccaatttgctccttgaatctcctccacccaatacataatccactcctccatcacccacttcactactaaatcaaacttaactctgtttttctctctcctcctttcatttcttattcttccaatcatcgtactccgccatgaccaccgctgtcaccgccgctgtttctttcccctctaccaaaaccacctctctctccgcccgaagctcctccgtcatttcccctgacaaaatcagctacaaaaaggtgattcccaatttcactgtgttttttattaataatttgttattttgatgatgagatgattaatttgggtgctgcaggttcctttgtactacaggaatgtatctgcaactgggaaaatgggacccatcagggcccagatcgcctctgaattccagctgaccaccatggcaattcccggggatcagctcgaatttccccgatcgttcaaacatttggcaataaagtttcttaagattgaatcctgttgccggtcttgcgatgattatcatataatttctgttgaattacgttaagcatgtaataattaacatgtaatgcatgacgttatttatgagatgggtttttatgattagagtcccgcaattatacatttaatacgcgatagaaaacaaaatatagcgcgcaaactaggataaattatcgcgcgcggtgtcatctatgttactagatcgggaattggcatgcaagcttggcactggccgtcgttttacaacgtcgtgactgggaaaaccctggcgttacccaacttaatcgccttgcagcacatccccctttcgccagctggcgtaatagcgaagaggcccgcaccgatcgcccttcccaacagttgcgcagcctgaatggcgaatgctagagcagcttgagcttggatcagattgtcgtttcccgccttcagtttaaactatcagtgtttgacaggatatattggcgggtaaacctaagagaaaagagcgtttattagaataacggatatttaaaagggcgtgaaaaggtttatccgttcgtccatttgtatgtgcatgccaaccacagggttcccctcgggatcaaagtactttgatccaacccctccgctgctatagtgcagtcggcttctgacgttcagtgcagccgtcttctgaaaacgacatgtcgcacaagtcctaagttacgcgacaggctgccgccctgcccttttcctggcgttttcttgtcgcgtgttttagtcgcataaagtagaatacttgcgactagaaccggagacattacgccatgaacaagagcgccgccgctggcctgctgggctatgcccgcgtcagcaccgacgaccaggacttgaccaaccaacgggccgaactgcacgcggccggctgcaccaagctgttttccgagaagatcaccggcaccaggcgcgaccgcccggagctggccaggatgcttgaccacctacgccctggcgacgttgtgacagtgaccaggctagaccgcctggcccgcagcacccgcgacctactggacattgccgagcgcatccaggaggccggcgcgggcctgcgtagcctggcagagccgtgggccgacaccaccacgccggccggccgcatggtgttgaccgtgttcgccggcattgccgagttcgagcgttccctaatcatcgaccgcacccggagcgggcgcgaggccgccaaggcccgaggcgtgaagtttggcccccgccctaccctcaccccggcacagatcgcgcacgcccgcgagctgatcgaccaggaaggccgcaccgtgaaagaggcggctgcactgcttggcgtgcatcgctcgaccctgtaccgcgcacttgagcgcagcgaggaagtgacgcccaccgaggccaggcggcgcggtgccttccgtgaggacgcattgaccgaggccgacgccctggcggccgccgagaatgaacgccaagaggaacaagcatgaaaccgcaccaggacggccaggacgaaccgtttttcattaccgaagagatcgaggcggagatgatcgcggccgggtacgtgttcgagccgcccgcgcacgtctcaaccgtgcggctgcatgaaatcctggccggtttgtctgatgccaagctggcggcctggccggccagcttggccgctgaagaaaccgagcgccgccgtctaaaaaggtgatgtgtatttgagtaaaacagcttgcgtcatgcggtcgctgcgtatatgatgcgatgagtaaataaacaaatacgcaaggggaacgcatgaaggttatcgctgtacttaaccagaaaggcgggtcaggcaagacgaccatcgcaacccatctagcccgcgccctgcaactcgccggggccgatgttctgttagtcgattccgatccccagggcagtgcccgcgattgggcggccgtgcgggaagatcaaccgctaaccgttgtcggcatcgaccgcccgacgattgaccgcgacgtgaaggccatcggccggcgcgacttcgtagtgatcgacggagcgccccaggcggcggacttggctgtgtccgcgatcaaggcagccgacttcgtgctgattccggtgcagccaagcccttacgacatatgggccaccgccgacctggtggagctggttaagcagcgcattgaggtcacggatggaaggctacaagcggcctttgtcgtgtcgcgggcgatcaaaggcacgcgcatcggcggtgaggttgccgaggcgctggccgggtacgagctgcccattcttgagtcccgtatcacgcagcgcgtgagctacccaggcactgccgccgccggcacaaccgttcttgaatcagaacccgagggcgacgctgcccgcgaggtccaggcgctggccgctgaaattaaatcaaaactcatttgagttaatgaggtaaagagaaaatgagcaaaagcacaaacacgctaagtgccggccgtccgagcgcacgcagcagcaaggctgcaacgttggccagcctggcagacacgccagccatgaagcgggtcaactttcagttgccggcggaggatcacaccaagctgaagatgtacgcggtacgccaaggcaagaccattaccgagctgctatctgaatacatcgcgcagctaccagagtaaatgagcaaatgaataaatgagtagatgaattttagcggctaaaggaggcggcatggaaaatcaagaacaaccaggcaccgacgccgtggaatgccccatgtgtggaggaacgggcggttggccaggcgtaagcggctgggttgtctgccggccctgcaatggcactggaacccccaagcccgaggaatcggcgtgacggtcgcaaaccatccggcccggtacaaatcggcgcggcgctgggtgatgacctggtggagaagttgaaggccgcgcaggccgcccagcggcaacgcatcgaggcagaagcacgccccggtgaatcgtggcaagcggccgctgatcgaatccgcaaagaatcccggcaaccgccggcagccggtgcgccgtcgattaggaagccgcccaagggcgacgagcaaccagattttttcgttccgatgctctatgacgtgggcacccgcgatagtcgcagcatcatggacgtggccgttttccgtctgtcgaagcgtgaccgacgagctggcgaggtgatccgctacgagcttccagacgggcacgtagaggtttccgcagggccggccggcatggccagtgtgtgggattacgacctggtactgatggcggtttcccatctaaccgaatccatgaaccgataccgggaagggaagggagacaagcccggccgcgtgttccgtccacacgttgcggacgtactcaagttctgccggcgagccgatggcggaaagcagaaagacgacctggtagaaacctgcattcggttaaacaccacgcacgttgccatgcagcgtacgaagaaggccaagaacggccgcctggtgacggtatccgagggtgaagccttgattagccgctacaagatcgtaaagagcgaaaccgggcggccggagtacatcgagatcgagctagctgattggatgtaccgcgagatcacagaaggcaagaacccggacgtgctgacggttcaccccgattactttttgatcgatcccggcatcggccgttttctctaccgcctggcacgccgcgccgcaggcaaggcagaagccagatggttgttcaagacgatctacgaacgcagtggcagcgccggagagttcaagaagttctgtttcaccgtgcgcaagctgatcgggtcaaatgacctgccggagtacgatttgaaggaggaggcggggcaggctggcccgatcctagtcatgcgctaccgcaacctgatcgagggcgaagcatccgccggttcctaatgtacggagcagatgctagggcaaattgccctagcaggggaaaaaggtcgaaaaggtctctttcctgtggatagcacgtacattgggaacccaaagccgtacattgggaaccggaacccgtacattgggaacccaaagccgtacattgggaaccggtcacacatgtaagtgactgatataaaagagaaaaaaggcgatttttccgcctaaaactctttaaaacttattaaaactcttaaaacccgcctggcctgtgcataactgtctggccagcgcacagccgaagagctgcaaaaagcgcctacccttcggtcgctgcgctccctacgccccgccgcttcgcgtcggcctatcgcggccgctggccgctcaaaaatggctggcctacggccaggcaatctaccagggcgcggacaagccgcgccgtcgccactcgaccgccggcgcccacatcaaggcaccctgcctcgcgcgtttcggtgatgacggtgaaaacctctgacacatgcagctcccggagacggtcacagcttgtctgtaagcggatgccgggagcagacaagcccgtcagggcgcgtcagcgggtgttggcgggtgtcggggcgcagccatgacccagtcacgtagcgatagcggagtgtatactggcttaactatgcggcatcagagcagattgtactgagagtgcaccatatgcggtgtgaaataccgcacagatgcgtaaggagaaaataccgcatcaggcgctcttccgcttcctcgctcactgactcgctgcgctcggtcgttcggctgcggcgagcggtatcagctcactcaaaggcggtaatacggttatccacagaatcaggggataacgcaggaaagaacatgtgagcaaaaggccagcaaaaggccaggaaccgtaaaaaggccgcgttgctggcgtttttccataggctccgcccccctgacgagcatcacaaaaatcgacgctcaagtcagaggtggcgaaacccgacaggactataaagataccaggcgtttccccctggaagctccctcgtgcgctctcctgttccgaccctgccgcttaccggatacctgtccgcctttctcccttcgggaagcgtggcgctttctcatagctcacgctgtaggtatctcagttcggtgtaggtcgttcgctccaagctgggctgtgtgcacgaaccccccgttcagcccgaccgctgcgccttatccggtaactatcgtcttgagtccaacccggtaagacacgacttatcgccactggcagcagccactggtaacaggattagcagagcgaggtatgtaggcggtgctacagagttcttgaagtggtggcctaactacggctacactagaaggacagtatttggtatctgcgctctgctgaagccagttaccttcggaaaaagagttggtagctcttgatccggcaaacaaaccaccgctggtagcggtggtttttttgtttgcaagcagcagattacgcgcagaaaaaaaggatctcaagaagatcctttgatcttttctacggggtctgacgctcagtggaacgaaaactcacgttaagggattttggtcatgcattctaggtactaaaacaattcatccagtaaaatataatattttattttctcccaatcaggcttgatccccagtaagtcaaaaaatagctcgacatactgttcttccccgatatcctccctgatcgaccggacgcagaaggcaatgtcataccacttgtccgccctgccgcttctcccaagatcaataaagccacttactttgccatctttcacaaagatgttgctgtctcccaggtcgccgtgggaaaagacaagttcctcttcgggcttttccgtctttaaaaaatcatacagctcgcgcggatctttaaatggagtgtcttcttcccagttttcgcaatccacatcggccagatcgttattcagtaagtaatccaattcggctaagcggctgtctaagctattcgtatagggacaatccgatatgtcgatggagtgaaagagcctgatgcactccgcatacagctcgataatcttttcagggctttgttcatcttcatactcttccgagcaaaggacgccatcggcctcactcatgagcagattgctccagccatcatgccgttcaaagtgcaggacctttggaacaggcagctttccttccagccatagcatcatgtccttttcccgttccacatcataggtggtccctttataccggctgtccgtcatttttaaatataggttttcattttctcccaccagcttatataccttagcaggagacattccttccgtatcttttacgcagcggtatttttcgatcagttttttcaattccggtgatattctcattttagccatttattatttccttcctcttttctacagtatttaaagataccccaagaagctaattataacaagacgaactccaattcactgttccttgcattctaaaaccttaaataccagaaaacagctttttcaaagttgttttcaaagttggcgtataacatagtatcgacggagccgattttgaaaccgcggtgatcacaggcagcaacgctctgtcatcgttacaatcaacatgctaccctccgcgagatcatccgtgtttcaaacccggcagcttagttgccgttcttccgaatagcatcggtaacatgagcaaagtctgccgccttacaacggctctcccgctgacgccgtcccggactgatgggctgcctgtatcgagtggtgattttgtgccgagctgccggtcggggagctgttggctggctggtggcaggatatattgtggtgtaaacaaattgacgcttagacaacttaataacacattgcggacgtttttaatgtactgaattaacgccgaatta

SEQ ID NO: 38 - protein, 65 aa, Artificial sequence; identical to SEQ ID NO: 33
  Synthetic Construct

SEQ ID NO: 39 - DNA, 8674 bp, Artificial sequence
  plasmid VC-MME462-1QCZ
  transit_peptide (1673)..(1753)
  CDS (1673)..(1753)
  CDS (1754)..(1771): adapter
agctttgggcggatcctctagaggacaatcagtaaattgaacggagaatattattcataaaaatacgatagtaacgggtgatatattcattagaatgaaccgaaaccggcggtaaggatctgagctacacatgctcaggttttttacaacgtgcacaacagaattgaaagcaaatatcatgcgatcataggcgtctcgcatatctcattaaagcagggcatgccggtcgagtcaaatctcggtgacgggcaggaccggacggggcggtaccggcaggctgaagtccagctgccagaaacccacgtcatgccagttcccgtgcttgaagccggccgcccgcagcatgccgcggggggcatatccgagcgcctcgtgcatgcgcacgctcgggtcgttgggcagcccgatgacagcgaccacgctcttgaagccctgtgcctccagggacttcagcaggtgggtgtagagcgtggagcccagtcccgtccgctggtggcggggggagacgtacacggtcgactcggccgtccagtcgtaggcgttgcgtgccttccaggggcccgcgtaggcgatgccggcgacctcgccgtccacctcggcgacgagccagggatagcgctcccgcagacggacgaggtcgtccgtccactcctgcggttcctgcggctcggtacggaagttgaccgtgcttgtctcgatgtagtggttgacgatggtgcagaccgccggcatgtccgcctcggtggcacggcggatgtcggccgggcgtcgttctgggctcatggtagactcgacggatccacgtgtggaagatatgaatttttttgagaaactagataagattaatgaatatcggtgttttggttttttcttgtggccgtctttgtttatattgagatttttcaaatcagtgcgcaagacgtgacgtaagtatccgagtcagtttttatttttctactaatttggtcgaatctagactgcagcaaatttacacattgccactaaacgtctaaacccttgtaatttgtttttgttttactatgtgtgttatgtatttgatttgcgataaatttttatatttggtactaaatttataacaccttttatgctaacgtttgccaacacttagcaatttgcaagttgattaattgattctaaattatttttgtcttctaaatacatatactaatcaactggaaatgtaaatatttgctaatatttctactataggagaattaaagtgagtgaatatggtaccacaaggtttggagatttaattgttgcaatgctgcatggatggcatatacaccaaacattcaataattcttgaggataataatggtaccacacaagatttgaggtgcatgaacgtcacgtggacaaaaggtttagtaatttttcaagacaacaatgttaccacacacaagttttgaggtgcatgcatggatgccctgtggaaagtttaaaaatattttggaaatgatttgcatggaagccatgtgtaaaaccatgacatccacttggaggatgcaataatgaagaaaactacaaatttacatgcaactagttatgcatgtagtctatataatgaggattttgcaatactttcattcatacacactcactaagttttacacgattataatttcttcataccattaattaagaattcatgcagaggtttttctccgccagatcgattctcggttacgccgtcaagacgcggaggaggtctttctcttctcgttcttcggaattccagctgaccaccatggcaattcccggggatcagctcgaatttccccgatcgttcaaacatttggcaataaagtttcttaagattgaatcctgttgccggtcttgcgatgattatcatataatttctgttgaattacgttaagcatgtaataattaacatgtaatgcatgacgttatttatgagatgggtttttatgattagagtcccgcaattatacatttaatacgcgatagaaaacaaaatatagcgcgcaaactaggataaattatcgcgcgcggtgtcatctatgttactagatcgggaattggcatgcaagcttggcactggccgtcgttttacaacgtcgtgactgggaaaaccctggcgttacccaacttaatcgccttgcagcacatccccctttcgccagctggcgtaatagcgaagaggcccgcaccgatcgcccttcccaacagttgcgcagcctgaatggcgaatgctagagcagcttgagcttggatcagattgtcgtttcccgccttcagtttaaactatcagtgtttgacaggatatattggcgggtaaacctaagagaaaagagcgtttattagaataatcggatatttaaaagggcgtgaaaaggtttatccgttcgtccatttgtatgtgcatgccaaccacagggttcccctcgggatcaaagtactttgatccaacccctccgctgctatagtgcagtcggcttctgacgttcagtgcagccgtcttctgaaaacgacatgtcgcacaagtcctaagttacgcgacaggctgccgccctgcccttttcctggcgttttcttgtcgcgtgttttagtcgcataaagtagaatacttgcgactagaaccggagacattacgccatgaacaagagcgccgccgctggcctgctgggctatgcccgcgtcagcaccgacgaccaggacttgaccaaccaacgggccgaactgcacgcggccggctgcaccaagctgttttccgagaagatcaccggcaccaggcgcgaccgcccggagctggccaggatgcttgaccacctacgccctggcgacgttgtgacagtgaccaggctagaccgcctggcccgcagcacccgcgacctactggacattgccgagcgcatccaggaggccggcgcgggcctgcgtagcctggcagagccgtgggccgacaccaccacgccggccggccgcatggtgttgaccgtgttcgccggcattgccgagttcgagcgttccctaatcatcgaccgcacccggagcgggcgcgaggccgccaaggcccgaggcgtgaagtttggcccccgccctaccctcaccccggcacagatcgcgcacgcccgcgagctgatcgaccaggaaggccgcaccgtgaaagaggcggctgcactgcttggcgtgcatcgctcgaccctgtaccgcgcacttgagcgcagcgaggaagtgacgcccaccgaggccaggcggcgcggtgccttccgtgaggacgcattgaccgaggccgacgccctggcggccgccgagaatgaacgccaagaggaacaagcatgaaaccgcaccaggacggccaggacgaaccgtttttcattaccgaagagatcgaggcggagatgatcgcggccgggtacgtgttcgagccgcccgcgcacgtctcaaccgtgcggctgcatgaaatcctggccggtttgtctgatgccaagctggcggcctggccggccagcttggccgctgaagaaaccgagcgccgccgtctaaaaaggtgatgtgtatttgagtaaaacagcttgcgtcatgcggtcgctgcgtatatgatgcgatgagtaaataaacaaatacgcaaggggaacgcatgaaggttatcgctgtacttaaccagaaaggcgggtcaggcaagacgaccatcgcaacccatctagcccgcgccctgcaactcgccggggccgatgttctgttagtcgattccgatccccagggcagtgcccgcgattgggcggccgtgcgggaagatcaaccgctaaccgttgtcggcatcgaccgcccgacgattgaccgcgacgtgaaggccatcggccggcgcgacttcgtagtgatcgacggagcgccccaggcggcggacttggctgtgtccgcgatcaaggcagccgacttcgtgctgattccggtgcagccaagcccttacgacatatgggccaccgccgacctggtggagctggttaagcagcgcattgaggtcacggatggaaggctacaagcggcctttgtcgtgtcgcgggcgatcaaaggcacgcgcatcggcggtgaggttgccgaggcgctggccgggtacgagctgcccattcttgagtcccgtatcacgcagcgcgtgagctacccaggcactgccgccgccggcacaaccgttcttgaatcagaacccgagggcgacgctgcccgcgaggtccaggcgctggccgctgaaattaaatcaaaactcatttgagttaatgaggtaaagagaaaatgagcaaaagcacaaacacgctaagtgccggccgtccgagcgcacgcagcagcaaggctgcaacgttggccagcctggcagacacgccagccatgaagcgggtcaactttcagttgccggcggaggatcacaccaagctgaagatgtacgcggtacgccaaggcaagaccattaccgagctgctatctgaatacatcgcgcagctaccagagtaaatgagcaaatgaataaatgagtagatgaattttagcggctaaaggaggcggcatggaaaatcaagaacaaccaggcaccgacgccgtggaatgccccatgtgtggaggaacgggcggttggccaggcgtaagcggctgggttgcctgccggccctgcaatggcactggaacccccaagcccgaggaatcggcgtgagcggtcgcaaaccatccggcccggtacaaatcggcgcggcgctgggtgatgacctggtggagaagttgaaggccgcgcaggccgcccagcggcaacgcatcgaggcagaagcacgccccggtgaatcgtggcaagcggccgctgatcgaatccgcaaagaatcccggcaaccgccggcagccggtgcgccgtcgattaggaagccgcccaagggcgacgagcaaccagattttttcgttccgatgctctatgacgtgggcacccgcgatagtcgcagcatcatggacgtggccgttttccgtctgtcgaagcgtgaccgacgagctggcgaggtgatccgctacgagcttccagacgggcacgtagaggtttccgcagggccggccggcatggccagtgtgtgggattacgacctggtactgatggcggtttcccatctaaccgaatccatgaaccgataccgggaagggaagggagacaagcccggccgcgtgttccgtccacacgttgcggacgtactcaagttctgccggcgagccgatggcggaaagcagaaagacgacctggtagaaacctgcattcggttaaacaccacgcacgttgccatgcagcgtacgaagaaggccaagaacggccgcctggtgacggtatccgagggtgaagccttgattagccgctacaagatcgtaaagagcgaaaccgggcggccggagtacatcgagatcgagctagctgattggatgtaccgcgagatcacagaaggcaagaacccggacgtgctgacggttcaccccgattactttttgatcgatcccggcatcggccgttttctctaccgcctggcacgccgcgccgcaggcaaggcagaagccagatggttgttcaagacgatctacgaacgcagtggcagcgccggagagttcaagaagttctgtttcaccgtgcgcaagctgatcgggtcaaatgacctgccggagtacgatttgaaggaggaggcggggcaggctggcccgatcctagtcatgcgctaccgcaacctgatcgagggcgaagcatccgccggttcctaatgtacggagcagatgctagggcaaattgccctagcaggggaaaaaggtcgaaaaggtctctttcctgtggatagcacgtacattgggaacccaaagccgtacattgggaaccggaacccgtacattgggaacccaaagccgtacattgggaaccggtcacacatgtaagtgactgatataaaagagaaaaaaggcgatttttccgcctaaaactctttaaaacttattaaaactcttaaaacccgcctggcctgtgcataactgtctggccagcgcacagccgaagagctgcaaaaagcgcctacccttcggtcgctgcgctccctacgccccgccgcttcgcgtcggcctatcgcggccgctggccgctcaaaaatggctggcctacggccaggcaatctaccagggcgcggacaagccgcgccgtcgccactcgaccgccggcgcccacatcaaggcaccctgcctcgcgcgtttcggtgatgacggtgaaaacctctgacacatgcagctcccggagacggtcacagcttgtctgtaagcggatgccgggagcagacaagcccgtcagggcgcgtcagcgggtgttggcgggtgtcggggcgcagccatgacccagtcacgtagcgatagcggagtgtatactggcttaactatgcggcatcagagcagattgtactgagagtgcaccatatgcggtgtgaaataccgcacagatgcgtaaggagaaaataccgcatcaggcgctcttccgcttcctcgctcactgactcgctgcgctcggtcgttcggctgcggcgagcggtatcagctcactcaaaggcggtaatacggttatccacagaatcaggggataacgcaggaaagaacatgtgagcaaaaggccagcaaaaggccaggaaccgtaaaaaggccgcgttgctggcgtttttccataggctccgcccccctgacgagcatcacaaaaatcgacgctcaagtcagaggtggcgaaacccgacaggactataaagataccaggcgtttccccctggaagctccctcgtgcgctctcctgttccgaccctgccgcttaccggatacctgtccgcctttctcccttcgggaagcgtggcgctttctcatagctcacgctgtaggtatctcagttcggtgtaggtcgttcgctccaagctgggctgtgtgcacgaaccccccgttcagcccgaccgctgcgccttatccggtaactatcgtcttgagtccaacccggtaagacacgacttatcgccactggcagcagccactggtaacaggattagcagagcgaggtatgtaggcggtgctacagagttcttgaagtggtggcctaactacggctacactagaaggacagtatttggtatctgcgctctgctgaagccagttaccttcggaaaaagagttggtagctcttgatccggcaaacaaaccaccgctggtagcggtggtttttttgtttgcaagcagcagattacgcgcagaaaaaaaggatctcaagaagatcctttgatcttttctacggggtctgacgctcagtggaacgaaaactcacgttaagggattttggtcatgcattctaggtactaaaacaattcatccagtaaaatataatattttattttctcccaatcaggcttgatccccagtaagtcaaaaaatagctcgacatactgttcttccccgatatcctccctgatcgaccggacgcagaaggcaatgtcataccacttgtccgccctgccgcttctcccaagatcaataaagccacttactttgccatctttcacaaagatgttgctgtctcccaggtcgccgtgggaaaagacaagttcctcttcgggcttttccgtctttaaaaaatcatacagctcgcgcggatctttaaatggagtgtcttcttcccagttttcgcaatccacatcggccagatcgttattcagtaagtaatccaattcggctaagcggctgtctaagctattcgtatagggacaatccgatatgtcgatggagtgaaagagcctgatgcactccgcatacagctcgataatcttttcagggctttgttcatcttcatactcttccgagcaaaggacgccatcggcctcactcatgagcagattgctccagccatcatgccgttcaaagtgcaggacctttggaacaggcagctttccttccagccatagcatcatgtccttttcccgttccacatcataggtggtccctttataccggctgtccgtcatttttaaatataggttttcattttctcccaccagcttatataccttagcaggagacattccttccgtatcttttacgcagcggtatttttcgatcagttttttcaattccggtgatattctcattttagccatttattatttccttcctcttttctacagtatttaaagataccccaagaagctaattataacaagacgaactccaattcactgttccttgcattctaaaaccttaaataccagaaaacagctttttcaaagttgttttcaaagttggcgtataacatagtatcgacggagccgattttgaaaccgcggtgatcacaggcagcaacgctctgtcatcgttacaatcaacatgctaccctccgcgagatcatccgtgtttcaaacccggcagcttagttgccgttcttccgaatagcatcggtaacatgagcaaagtctgccgccttacaacggctctcccgctgacgccgtcccggactgatgggctgcctgtatcgagtggtgattttgtgccgagctgccggtcggggagctgttggctggctggtggcaggatatattgtggtgtaaacaaattgacgcttagacaacttaataacacattgcggacgtttttaatgtactgaattaacgccgaatta

SEQ ID NO: 40 - protein, 33 aa, Artificial sequence; identical to SEQ ID NO: 35
  Synthetic Construct

SEQ ID NO: 41 - DNA, 9045 bp, Artificial sequence
  plasmid VC-MME220-1qcz
agcttggacaatcagtaaattgaacggagaatattattcataaaaatacgatagtaacgggtgatatattcattagaatgaaccgaaaccggcggtaaggatctgagctacacatgctcaggttttttacaacgtgcacaacagaattgaaagcaaatatcatgcgatcataggcgtctcgcatatctcattaaagcagggcatgccggtcgagtcaaatctcggtgacgggcaggaccggacggggcggtaccggcaggctgaagtccagctgccagaaacccacgtcatgccagttcccgtgcttgaagccggccgcccgcagcatgccgcggggggcatatccgagcgcctcgtgcatgcgcacgctcgggtcgttgggcagcccgatgacagcgaccacgctcttgaagccctgtgcctccagggacttcagcaggtgggtgtagagcgtggagcccagtcccgtccgctggtggcggggggagacgtacacggtcgactcggccgtccagtcgtaggcgttgcgtgccttccaggggcccgcgtaggcgatgccggcgacctcgccgtccacctcggcgacgagccagggatagcgctcccgcagacggacgaggtcgtccgtccactcctgcggttcctgcggctcggtacggaagttgaccgtgcttgtctcgatgtagtggttgacgatggtgcagaccgccggcatgtccgcctcggtggcacggcggatgtcggccgggcgtcgttctgggctcatggtagactcgacggatccacgtgtggaagatatgaatttttttgagaaactagataagattaatgaatatcggtgttttggttttttcttgtggccgtctttgtttatattgagatttttcaaatcagtgcgcaagacgtgacgtaagtatccgagtcagtttttatttttctactaatttggtcgaagctttgggcggatcctctagattcgacggtatcgataagctcgcggatccctgaaagcgacgttggatgttaacatctacaaattgccttttcttatcgaccatgtacgtaagcgcttacgtttttggtggacccttgaggaaactggtagctgttgtgggcctgtggtctcaagatggatcattaatttccaccttcacctacgatggggggcatcgcaccggtgagtaatattgtacggctaagagcgaatttggcctgtaggatccctgaaagcgacgttggatgttaacatctacaaattgccttttcttatcgaccatgtacgtaagcgcttacgtttttggtggacccttgaggaaactggtagctgttgtgggcctgtggtctcaagatggatcattaatttccaccttcacctacgatggggggcatcgcaccggtgagtaatattgtacggctaagagcgaatttggcctgtaggatccctgaaagcgacgttggatgttaacatctacaaattgccttttcttatcgaccatgtacgtaagcgcttacgtttttggtggacccttgaggaaactggtagctgttgtgggcctgtggtctcaagatggatcattaatttccaccttcacctacgatggggggcatcgcaccggtgagtaatattgtacggctaagagcgaatttggcctgtaggatccgcgagctggtcaatcccattgcttttgaagcagctcaacattgatctctttctcgatcgagggagatttttcaaatcagtgcgcaagacgtgacgtaagtatccgagtcagtttttatttttctactaatttggtcgtttatttcggcgtgtaggacatggcaaccgggcctgaatttcgcgggtattctgtttctattccaactttttcttgatccgcagccattaacgacttttgaatagatacgctgacacgccaagcctcgctagtcaaaagtgtaccaaacaacgctttacagcaagaacggaatgcgcgtgacgctcgcggtgacgccatttcgccttttcagaaatggataaatagccttgcttcctattatatcttcccaaattaccaatacattacactagcatctgaatttcataaccaatctcgatacaccaaatcgaagatctcccgggttgctcttccatggcaatgattaattaacgaagagcaagagctcgaatttccccgatcgttcaaacatttggcaataaagtttcttaagattgaatcctgttgccggtcttgcgatgattatcatataatttctgttgaattacgttaagcatgtaataattaacatgtaatgcatgacgttatttatgagatgggtttttatgattagagtcccgcaattatacatttaatacgcgatagaaaacaaaatatagcgcgcaaactaggataaattatcgcgcgcggtgtcatctatgttactagatcgggaattggcatgcaagcttggcactggccgtcgttttacaacgtcgtgactgggaaaaccctggcgttacccaacttaatcgccttgcagcacatccccctttcgccagctggcgtaatagcgaagaggcccgcaccgatcgcccttcccaacagttgcgcagcctgaatggcgaatgctagagcagcttgagcttggatcagattgtcgtttcccgccttcagtttaaactatcagtgtttgacaggatatattggcgggtaaacctaagagaaaagagcgtttattagaataatcggatatttaaaagggcgtgaaaaggtttatccgttcgtccatttgtatgtgcatgccaaccacagggttcccctcgggatcaaagtactttgatccaacccctccgctgctatagtgcagtcggcttctgacgttcagtgcagccgtcttctgaaaacgacatgtcgcacaagtcctaagttacgcgacaggctgccgccctgcccttttcctggcgttttcttgtcgcgtgttttagtcgcataaagtagaatacttgcgactagaaccggagacattacgccatgaacaagagcgccgccgctggcctgctgggctatgcccgcgtcagcaccgacgaccaggacttgaccaaccaacgggccgaactgcacgcggccggctgcaccaagctgttttccgagaagatcaccggcaccaggcgcgaccgcccggagctggccaggatgcttgaccacctacgccctggcgacgttgtgacagtgaccaggctagaccgcctggcccgcagcacccgcgacctactggacattgccgagcgcatccaggaggccggcgcgggcctgcgtagcctggcagagccgtgggccgacaccaccacgccggccggccgcatggtgttgaccgtgttcgccggcattgccgagttcgagcgttccctaatcatcgaccgcacccggagcgggcgcgaggccgccaaggcccgaggcgtgaagtttggcccccgccctaccctcaccccggcacagatcgcgcacgcccgcgagctgatcgaccaggaaggccgcaccgtgaaagaggcggctgcactgcttggcgtgcatcgctcgaccctgtaccgcgcacttgagcgcagcgaggaagtgacgcccaccgaggccaggcggcgcggtgccttccgtgaggacgcattgaccgaggccgacgccctggcggccgccgagaatgaacgccaagaggaacaagcatgaaaccgcaccaggacggccaggacgaaccgtttttcattaccgaagagatcgaggcggagatgatcgcggccgggtacgtgttcgagccgcccgcgcacgtctcaaccgtgcggctgcatgaaatcctggccggtttgtctgatgccaagctggcggcctggccggccagcttggccgctgaagaaaccgagcgccgccgtctaaaaaggtgatgtgtatttgagtaaaacagcttgcgtcatgcggtcgctgcgtatatgatgcgatgagtaaataaacaaatacgcaaggggaacgcatgaaggttatcgctgtacttaaccagaaaggcgggtcaggcaagacgaccatcgcaacccatctagcccgcgccctgcaactcgccggggccgatgttctgttagtcgattccgatccccagggcagtgcccgcgattgggcggccgtgcgggaagatcaaccgctaaccgttgtcggcatcgaccgcccgacgattgaccgcgacgtgaaggccatcggccggcgcgacttcgtagtgatcgacggagcgccccaggcggcggacttggctgtgtccgcgatcaaggcagccgacttcgtgctgattccggtgcagccaagcccttacgacatatgggccaccgccgacctggtggagctggttaagcagcgcattgaggtcacggatggaaggctacaagcggcctttgtcgtgtcgcgggcgatcaaaggcacgcgcatcggcggtgaggttgccgaggcgctggccgggtacgagctgcccattcttgagtcccgtatcacgcagcgcgtgagctacccaggcactgccgccgccggcacaaccgttcttgaatcagaacccgagggcgacgctgcccgcgaggtccaggcgctggccgctgaaattaaatcaaaactcatttgagttaatgaggtaaagagaaaatgagcaaaagcacaaacacgctaagtgccggccgtccgagcgcacgcagcagcaaggctgcaacgttggccagcctggcagacacgccagccatgaagcgggtcaactttcagttgccggcggaggatcacaccaagctgaagatgtacgcggtacgccaaggcaagaccattaccgagctgctatctgaatacatcgcgcagctaccagagtaaatgagcaaatgaataaatgagtagatgaattttagcggctaaaggaggcggcatggaaaatcaagaacaaccaggcaccgacgccgtggaatgccccatgtgtggaggaacgggcggttggccaggcgtaagcggctgggttgcctgccggccctgcaatggcactggaacccccaagcccgaggaatcggcgtgagcggtcgcaaaccatccggcccggtacaaatcggcgcggcgctgggtgatgacctggtggagaagttgaaggccgcgcaggccgcccagcggcaacgcatcgaggcagaagcacgccccggtgaatcgtggcaagcggccgctgatcgaatccgcaaagaatcccggcaaccgccggcagccggtgcgccgtcgattaggaagccgcccaagggcgacgagcaaccagattttttcgttccgatgctctatgacgtgggcacccgcgatagtcgcagcatcatggacgtggccgttttccgtctgtcgaagcgtgaccgacgagctggcgaggtgatccgctacgagcttccagacgggcacgtagaggtttccgcagggccggccggcatggccagtgtgtgggattacgacctggtactgatggcggtttcccatctaaccgaatccatgaaccgataccgggaagggaagggagacaagcccggccgcgtgttccgtccacacgttgcggacgtactcaagttctgccggcgagccgatggcggaaagcagaaagacgacctggtagaaacctgcattcggttaaacaccacgcacgttgccatgcagcgtacgaagaaggccaagaacggccgcctggtgacggtatccgagggtgaagccttgattagccgctacaagatcgtaaagagcgaaaccgggcggccggagtacatcgagatcgagctagctgattggatgtaccgcgagatcacagaaggcaagaacccggacgtgctgacggttcaccccgattactttttgatcgatcccggcatcggccgttttctctaccgcctggcacgccgcgccgcaggcaaggcagaagccagatggttgttcaagacgatctacgaacgcagtggcagcgccggagagttcaagaagttctgtttcaccgtgcgcaagctgatcgggtcaaatgacctgccggagtacgatttgaaggaggaggcggggcaggctggcccgatcctagtcatgcgctaccgcaacctgatcgagggcgaagcatccgccggttcctaatgtacggagcagatgctagggcaaattgccctagcaggggaaaaaggtcgaaaaggtctctttcctgtggatagcacgtacattgggaacccaaagccgtacattgggaaccggaacccgtacattgggaacccaaagccgtacattgggaaccggtcacacatgtaagtgactgatataaaagagaaaaaaggcgatttttccgcctaaaactctttaaaacttattaaaactcttaaaacccgcctggcctgtgcataactgtctggccagcgcacagccgaagagctgcaaaaagcgcctacccttcggtcgctgcgctccctacgccccgccgcttcgcgtcggcctatcgcggccgctggccgctcaaaaatggctggcctacggccaggcaatctaccagggcgcggacaagccgcgccgtcgccactcgaccgccggcgcccacatcaaggcaccctgcctcgcgcgtttcggtgatgacggtgaaaacctctgacacatgcagctcccggagacggtcacagcttgtctgtaagcggatgccgggagcagacaagcccgtcagggcgcgtcagcgggtgttggcgggtgtcggggcgcagccatgacccagtcacgtagcgatagcggagtgtatactggcttaactatgcggcatcagagcagattgtactgagagtgcaccatatgcggtgtgaaataccgcacagatgcgtaaggagaaaataccgcatcaggcgctcttccgcttcctcgctcactgactcgctgcgctcggtcgttcggctgcggcgagcggtatcagctcactcaaaggcggtaatacggttatccacagaatcaggggataacgcaggaaagaacatgtgagcaaaaggccagcaaaaggccaggaaccgtaaaaaggccgcgttgctggcgtttttccataggctccgcccccctgacgagcatcacaaaaatcgacgctcaagtcagaggtggcgaaacccgacaggactataaagataccaggcgtttccccctggaagctccctcgtgcgctctcctgttccgaccctgccgcttaccggatacctgtccgcctttctcccttcgggaagcgtggcgctttctcatagctcacgctgtaggtatctcagttcggtgtaggtcgttcgctccaagctgggctgtgtgcacgaaccccccgttcagcccgaccgctgcgccttatccggtaactatcgtcttgagtccaacccggtaagacacgacttatcgccactggcagcagccactggtaacaggattagcagagcgaggtatgtaggcggtgctacagagttcttgaagtggtggcctaactacggctacactagaaggacagtatttggtatctgcgctctgctgaagccagttaccttcggaaaaagagttggtagctcttgatccggcaaacaaaccaccgctggtagcggtggtttttttgtttgcaagcagcagattacgcgcagaaaaaaaggatctcaagaagatcctttgatcttttctacggggtctgacgctcagtggaacgaaaactcacgttaagggattttggtcatgcattctaggtactaaaacaattcatccagtaaaatataatattttattttctcccaatcaggcttgatccccagtaagtcaaaaaatagctcgacatactgttcttccccgatatcctccctgatcgaccggacgcagaaggcaatgtcataccacttgtccgccctgccgcttctcccaagatcaataaagccacttactttgccatctttcacaaagatgttgctgtctcccaggtcgccgtgggaaaagacaagttcctcttcgggcttttccgtctttaaaaaatcatacagctcgcgcggatctttaaatggagtgtcttcttcccagttttcgcaatccacatcggccagatcgttattcagtaagtaatccaattcggctaagcggctgtctaagctattcgtatagggacaatccgatatgtcgatggagtgaaagagcctgatgcactccgcatacagctcgataatcttttcagggctttgttcatcttcatactcttccgagcaaaggacgccatcggcctcactcatgagcagattgctccagccatcatgccgttcaaagtgcaggacctttggaacaggcagctttccttccagccatagcatcatgtccttttcccgttccacatcataggtggtccctttataccggctgtccgtcatttttaaatataggttttcattttctcccaccagcttatataccttagcaggagacattccttccgtatcttttacgcagcggtatttttcgatcagttttttcaattccggtgatattctcattttagccatttattatttccttcctcttttctacagtatttaaagataccccaagaagctaattataacaagacgaactccaattcactgttccttgcattctaaaaccttaaataccagaaaacagctttttcaaagttgttttcaaagttggcgtataacatagtatcgacggagccgattttgaaaccgcggtgatcacaggcagcaacgctctgtcatcgttacaatcaacatgctaccctccgcgagatcatccgtgtttcaaacccggcagcttagttgccgttcttccgaatagcatcggtaacatgagcaaagtctgccgccttacaacggctctcccgctgacgccgtcccggactgatgggctgcctgtatcgagtggtgattttgtgccgagctgccggtcggggagctgttggctggctggtggcaggatatattgtggtgtaaacaaattgacgcttagacaacttaataacacattgcggacgtttttaatgtactgaattaacgccgaatta

SEQ ID NO: 42 - DNA, 9466 bp, Artificial sequence
  plasmid VC-MME432-1qcz
  5'UTR (2125)..(2289)
  transit_peptide (2290)..(2397)
  CDS (2290)..(2397)
  transit_peptide (2475)..(2543)
  CDS (2475)..(2543)
  CDS (2544)..(2552): adapter
gctttgggcggatcctctagaggacaatcagtaaattgaacggagaatattattcataaaaatacgatagtaacgggtgatatattcattagaatgaaccgaaaccggcggtaaggatctgagctacacatgctcaggttttttacaacgtgcacaacagaattgaaagcaaatatcatgcgatcataggcgtctcgcatatctcattaaagcagggcatgccggtcgagtcaaatctcggtgacgggcaggaccggacggggcggtaccggcaggctgaagtccagctgccagaaacccacgtcatgccagttcccgtgcttgaagccggccgcccgcagcatgccgcggggggcatatccgagcgcctcgtgcatgcgcacgctcgggtcgttgggcagcccgatgacagcgaccacgctcttgaagccctgtgcctccagggacttcagcaggtgggtgtagagcgtggagcccagtcccgtccgctggtggcggggggagacgtacacggtcgactcggccgtccagtcgtaggcgttgcgtgccttccaggggcccgcgtaggcgatgccggcgacctcgccgtccacctcggcgacgagccagggatagcgctcccgcagacggacgaggtcgtccgtccactcctgcggttcctgcggctcggtacggaagttgaccgtgcttgtctcgatgtagtggttgacgatggtgcagaccgccggcatgtccgcctcggtggcacggcggatgtcggccgggcgtcgttctgggctcatggtagactcgacggatccacgtgtggaagatatgaatttttttgagaaactagataagattaatgaatatcggtgttttggttttttcttgtggccgtctttgtttatattgagatttttcaaatcagtgcgcaagacgtgacgtaagtatccgagtcagtttttatttttctactaatttggtcgaatctagattcgacggtatcgataagctcgcggatccctgaaagcgacgttggatgttaacatctacaaattgccttttcttatcgaccatgtacgtaagcgcttacgtttttggtggacccttgaggaaactggtagctgttgtgggcctgtggtctcaagatggatcattaatttccaccttcacctacgatggggggcatcgcaccggtgagtaatattgtacggctaagagcgaatttggcctgtaggatccctgaaagcgacgttggatgttaacatctacaaattgccttttcttatcgaccatgtacgtaagcgcttacgtttttggtggacccttgaggaaactggtagctgttgtgggcctgtggtctcaagatggatcattaatttccaccttcacctacgatggggggcatcgcaccggtgagtaatattgtacggctaagagcgaatttggcctgtaggatccctgaaagcgacgttggatgttaacatctacaaattgccttttcttatcgaccatgtacgtaagcgcttacgtttttggtggacccttgaggaaactggtagctgttgtgggcctgtggtctcaagatggatcattaatttccaccttcacctacgatggggggcatcgcaccggtgagtaatattgtacggctaagagcgaatttggcctgtaggatccgcgagctggtcaatcccattgcttttgaagcagctcaacattgatctctttctcgatcgagggagatttttcaaatcagtgcgcaagacgtgacgtaagtatccgagtcagtttttatttttctactaatttggtcgtttatttcggcgtgtaggacatggcaaccgggcctgaatttcgcgggtattctgtttctattccaactttttcttgatccgcagccattaacgacttttgaatagatacgctgacacgccaagcctcgctagtcaaaagtgtaccaaacaacgctttacagcaagaacggaatgcgcgtgacgctcgcggtgacgccatttcgccttttcagaaatggataaatagccttgcttcctattatatcttcccaaattaccaatacattacactagcatctgaatttcataaccaatctcgatacaccaaatcgaagatctcccaaacgcataaacttatcttcatagttgccactccaatttgctccttgaatctcctccacccaatacataatccactcctccatcacccacttcactactaaatcaaacttaactctgtttttctctctcctcctttcatttcttattcttccaatcatcgtactccgccatgaccaccgctgtcaccgccgctgtttctttcccctctaccaaaaccacctctctctccgcccgaagctcctccgtcatttcccctgacaaaatcagctacaaaaaggtgattcccaatttcactgtgttttttattaataatttgttattttgatgatgagatgattaatttgggtgctgcaggttcctttgtactacaggaatgtatctgcaactgggaaaatgggacccatcagggcccagatcgcctcttgctcttccatggcaatgattaattaacgaagagcaagagctcgaatttccccgatcgttcaaacatttggcaataaagtttcttaagattgaatcctgttgccggtcttgcgatgattatcatataatttctgttgaattacgttaagcatgtaataattaacatgtaatgcatgacgttatttatgagatgggtttttatgattagagtcccgcaattatacatttaatacgcgatagaaaacaaaatatagcgcgcaaactaggataaattatcgcgcgcggtgtcatctatgttactagatcgggaattggcatgcaagcttggcactggccgtcgttttacaacgtcgtgactgggaaaaccctggcgttacccaacttaatcgccttgcagcacatccccctttcgccagctggcgtaatagcgaagaggcccgcaccgatcgcccttcccaacagttgcgcagcctgaatggcgaatgctagagcagcttgagcttggatcagattgtcgtttcccgccttcagtttaaactatcagtgtttgacaggatatattggcgggtaaacctaagagaaaagagcgtttattagaataatcggatatttaaaagggcgtgaaaaggtttatccgttcgtccatttgtatgtgcatgccaaccacagggttcccctcgggatcaaagtactttgatccaacccctccgctgctatagtgcagtcggcttctgacgttcagtgcagccgtcttctgaaaacgacatgtcgcacaagtcctaagttacgcgacaggctgccgccctgcccttttcctggcgttttcttgtcgcgtgttttagtcgcataaagtagaatacttgcgactagaaccggagacattacgccatgaacaagagcgccgccgctggcctgctgggctatgcccgcgtcagcaccgacgaccaggacttgaccaaccaacgggccgaactgcacgcggccggctgcaccaagctgttttccgagaagatcaccggcaccaggcgcgaccgcccggagctggccaggatgcttgaccacctacgccctggcgacgttgtgacagtgaccaggctagaccgcctggcccgcagcacccgcgacctactggacattgccgagcgcatccaggaggccggcgcgggcctgcgtagcctggcagagccgtgggccgacaccaccacgccggccggccgcatggtgttgaccgtgttcgccggcattgccgagttcgagcgttccctaatcatcgaccgcacccggagcgggcgcgaggccgccaaggcccgaggcgtgaagtttggcccccgccctaccctcaccccggcacagatcgcgcacgcccgcgagctgatcgaccaggaaggccgcaccgtgaaagaggcggctgcactgcttggcgtgcatcgctcgaccctgtaccgcgcacttgagcgcagcgaggaagtgacgcccaccgaggccaggcggcgcggtgccttccgtgaggacgcattgaccgaggccgacgccctggcggccgccgagaatgaacgccaagaggaacaagcatgaaaccgcaccaggacggccaggacgaaccgtttttcattaccgaagagatcgaggcggagatgatcgcggccgggtacgtgttcgagccgcccgcgcacgtctcaaccgtgcggctgcatgaaatcctggccggtttgtctgatgccaagctggcggcctggccggccagcttggccgctgaagaaaccgagcgccgccgtctaaaaaggtgatgtgtatttgagtaaaacagcttgcgtcatgcggtcgctgcgtatatgatgcgatgagtaaataaacaaatacgcaaggggaacgcatgaaggttatcgctgtacttaaccagaaaggcgggtcaggcaagacgaccatcgcaacccatctagcccgcgccctgcaactcgccggggccgatgttctgttagtcgattccgatccccagggcagtgcccgcgattgggcggccgtgcgggaagatcaaccgctaaccgttgtcggcatcgaccgcccgacgattgaccgcgacgtgaaggccatcggccggcgcgacttcgtagtgatcgacggagcgccccaggcggcggacttggctgtgtccgcgatcaaggcagccgacttcgtgctgattccggtgcagccaagcccttacgacatatgggccaccgccgacctggtggagctggttaagcagcgcattgaggtcacggatggaaggctacaagcggcctttgtcgtgtcgcgggcgatcaaaggcacgcgcatcggcggtgaggttgccgaggcgctggccgggtacgagctgcccattcttgagtcccgtatcacgcagcgcgtgagctacccaggcactgccgccgccggcacaaccgttcttgaatcagaacccgagggcgacgctgcccgcgaggtccaggcgctggccgctgaaattaaatcaaaactcatttgagttaatgaggtaaagagaaaatgagcaaaagcacaaacacgctaagtgccggccgtccgagcgcacgcagcagcaaggctgcaacgttggccagcctggcagacacgccagccatgaagcgggtcaactttcagttgccggcggaggatcacaccaagctgaagatgtacgcggtacgccaaggcaagaccattaccgagctgctatctgaatacatcgcgcagctaccagagtaaatgagcaaatgaataaatgagtagatgaattttagcggctaaaggaggcggcatggaaaatcaagaacaaccaggcaccgacgccgtggaatgccccatgtgtggaggaacgggcggttggccaggcgtaagcggctgggttgcctgccggccctgcaatggcactggaacccccaagcccgaggaatcggcgtgagcggtcgcaaaccatccggcccggtacaaatcggcgcggcgctgggtgatgacctggtggagaagttgaaggccgcgcaggccgcccagcggcaacgcatcgaggcagaagcacgccccggtgaatcgtggcaagcggccgctgatcgaatccgcaaagaatcccggcaaccgccggcagccggtgcgccgtcgattaggaagccgcccaagggcgacgagcaaccagattttttcgttccgatgctctatgacgtgggcacccgcgatagtcgcagcatcatggacgtggccgttttccgtctgtcgaagcgtgaccgacgagctggcgaggtgatccgctacgagcttccagacgggcacgtagaggtttccgcagggccggccggcatggccagtgtgtgggattacgacctggtactgatggcggtttcccatctaaccgaatccatgaaccgataccgggaagggaagggagacaagcccggccgcgtgttccgtccacacgttgcggacgtactcaagttctgccggcgagccgatggcggaaagcagaaagacgacctggtagaaacctgcattcggttaaacaccacgcacgttgccatgcagcgtacgaagaaggccaagaacggccgcctggtgacggtatccgagggtgaagccttgattagccgctacaagatcgtaaagagcgaaaccgggcggccggagtacatcgagatcgagctagctgattggatgtaccgcgagatcacagaaggcaagaacccggacgtgctgacggttcaccccgattactttttgatcgatcccggcatcggccgttttctctaccgcctggcacgccgcgccgcaggcaaggcagaagccagatggttgttcaagacgatctacgaacgcagtggcagcgccggagagttcaagaagttctgtttcaccgtgcgcaagctgatcgggtcaaatgacctgccggagtacgatttgaaggaggaggcggggcaggctggcccgatcctagtcatgcgctaccgcaacctgatcgagggcgaagcatccgccggttcctaatgtacggagcagatgctagggcaaattgccctagcaggggaaaaaggtcgaaaaggtctctttcctgtggatagcacgtacattgggaacccaaagccgtacattgggaaccggaacccgtacattgggaacccaaagccgtacattgggaaccggtcacacatgtaagtgactgatataaaagagaaaaaaggcgatttttccgcctaaaactctttaaaacttattaaaactcttaaaacccgcctggcctgtgcataactgtctggccagcgcacagccgaagagctgcaaaaagcgcctacccttcggtcgctgcgctccctacgccccgccgcttcgcgtcggcctatcgcggccgctggccgctcaaaaatggctggcctacggccaggcaatctaccagggcgcggacaagccgcgccgtcgccactcgaccgccggcgcccacatcaaggcaccctgcctcgcgcgtttcggtgatgacggtgaaaacctctgacacatgcagctcccggagacggtcacagcttgtctgtaagcggatgccgggagcagacaagcccgtcagggcgcgtcagcgggtgttggcgggtgtcggggcgcagccatgacccagtcacgtagcgatagcggagtgtatactggcttaactatgcggcatcagagcagattgtactgagagtgcaccatatgcggtgtgaaataccgcacagatgcgtaaggagaaaataccgcatcaggcgctcttccgcttcctcgctcactgactcgctgcgctcggtcgttcggctgcggcgagcggtatcagctcactcaaaggcggtaatacggttatccacagaatcaggggataacgcaggaaagaacatgtgagcaaaaggccagcaaaaggccaggaaccgtaaaaaggccgcgttgctggcgtttttccataggctccgcccccctgacgagcatcacaaaaatcgacgctcaagtcagaggtggcgaaacccgacaggactataaagataccaggcgtttccccctggaagctccctcgtgcgctctcctgttccgaccctgccgcttaccggatacctgtccgcctttctcccttcgggaagcgtggcgctttctcatagctcacgctgtaggtatctcagttcggtgtaggtcgttcgctccaagctgggctgtgtgcacgaaccccccgttcagcccgaccgctgcgccttatccggtaactatcgtcttgagtccaacccggtaagacacgacttatcgccactggcagcagccactggtaacaggattagcagagcgaggtatgtaggcggtgctacagagttcttgaagtggtggcctaactacggctacactagaaggacagtatttggtatctgcgctctgctgaagccagttaccttcggaaaaagagttggtagctcttgatccggcaaacaaaccaccgctggtagcggtggtttttttgtttgcaagcagcagattacgcgcagaaaaaaaggatctcaagaagatcctttgatcttttctacggggtctgacgctcagtggaacgaaaactcacgttaagggattttggtcatgcattctaggtactaaaacaattcatccagtaaaatataatattttattttctcccaatcaggcttgatccccagtaagtcaaaaaatagctcgacatactgttcttccccgatatcctccctgatcgaccggacgcagaaggcaatgtcataccacttgtccgccctgccgcttctcccaagatcaataaagccacttactttgccatctttcacaaagatgttgctgtctcccaggtcgccgtgggaaaagacaagttcctcttcgggcttttccgtctttaaaaaatcatacagctcgcgcggatctttaaatggagtgtcttcttcccagttttcgcaatccacatcggccagatcgttattcagtaagtaatccaattcggctaagcggctgtctaagctattcgtatagggacaatccgatatgtcgatggagtgaaagagcctgatgcactccgcatacagctcgataatcttttcagggctttgttcatcttcatactcttccgagcaaaggacgccatcggcctcactcatgagcagattgctccagccatcatgccgttcaaagtgcaggacctttggaacaggcagctttccttccagccatagcatcatgtccttttcccgttccacatcataggtggtccctttataccggctgtccgtcatttttaaatataggttttcattttctcccaccagcttatataccttagcaggagacattccttccgtatcttttacgcagcggtatttttcgatcagttttttcaattccggtgatattctcattttagccatttattatttccttcctcttttctacagtatttaaagataccccaagaagctaattataacaagacgaactccaattcactgttccttgcattctaaaaccttaaataccagaaaacagctttttcaaagttgttttcaaagttggcgtataacatagtatcgacggagccgattttgaaaccgcggtgatcacaggcagcaacgctctgtcatcgttacaatcaacatgctaccctccgcgagatcatccgtgtttcaaacccggcagcttagttgccgttcttccgaatagcatcggtaacatgagcaaagtctgccgccttacaacggctctcccgctgacgccgtcccggactgatgggctgcctgtatcgagtggtgattttgtgccgagctgccggtcggggagctgttggctggctggtggcaggatatattgtggtgtaaacaaattgacgcttagacaacttaataacacattgcggacgtttttaatgtactgaattaacgccgaattaa

SEQ ID NO: 43 - protein, 62 aa, Artificial sequence
  Synthetic Construct
MTTAVTAAVSFPSTKTTSLSARSSSVISPDKISYKKVPLYYRNVSATGKMGPIRAQIASCSS

SEQ ID NO: 44 - DNA, 9137 bp, Artificial sequence
  plasmid VC-MME431-1qcz
  transit_peptide (2125)..(2214)
  CDS (2125)..(2214)
  CDS (2215)..(2223): adapter
gctttgggcggatcctctagaggacaatcagtaaattgaacggagaatattattcataaaaatacgatagtaacgggtgatatattcattagaatgaaccgaaaccggcggtaaggatctgagctacacatgctcaggttttttacaacgtgcacaacagaattgaaagcaaatatcatgcgatcataggcgtctcgcatatctcattaaagcagggcatgccggtcgagtcaaatctcggtgacgggcaggaccggacggggcggtaccggcaggctgaagtccagctgccagaaacccacgtcatgccagttcccgtgcttgaagccggccgcccgcagcatgccgcggggggcatatccgagcgcctcgtgcatgcgcacgctcgggtcgttgggcagcccgatgacagcgaccacgctcttgaagccctgtgcctccagggacttcagcaggtgggtgtagagcgtggagcccagtcccgtccgctggtggcggggggagacgtacacggtcgactcggccgtccagtcgtaggcgttgcgtgccttccaggggcccgcgtaggcgatgccggcgacctcgccgtccacctcggcgacgagccagggatagcgctcccgcagacggacgaggtcgtccgtccactcctgcggttcctgcggctcggtacggaagttgaccgtgcttgtctcgatgtagtggttgacgatggtgcagaccgccggcatgtccgcctcggtggcacggcggatgtcggccgggcgtcgttctgggctcatggtagactcgacggatccacgtgtggaagatatgaatttttttgagaaactagataagattaatgaatatcggtgttttggttttttcttgtggccgtctttgtttatattgagatttttcaaatcagtgcgcaagacgtgacgtaagtatccgagtcagtttttatttttctactaatttggtcgaatctagattcgacggtatcgataagctcgcggatccctgaaagcgacgttggatgttaacatctacaaattgccttttcttatcgaccatgtacgtaagcgcttacgtttttggtggacccttgaggaaactggtagctgttgtgggcctgtggtctcaagatggatcattaatttccaccttcacctacgatggggggcatcgcaccggtgagtaatattgtacggctaagagcgaatttggcctgtaggatccctgaaagcgacgttggatgttaacatctacaaattgccttttcttatcgaccatgtacgtaagcgcttacgtttttggtggacccttgaggaaactggtagctgttgtgggcctgtggtctcaagatggatcattaatttccaccttcacctacgatggggggcatcgcaccggtgagtaatattgtacggctaagagcgaatttggcctgtaggatccctgaaagcgacgttggatgttaacatctacaaattgccttttcttatcgaccatgtacgtaagcgcttacgtttttggtggacccttgaggaaactggtagctgttgtgggcctgtggtctcaagatggatcattaatttccaccttcacctacgatggggggcatcgcaccggtgagtaatattgtacggctaagagcgaatttggcctgtaggatccgcgagctggtcaatcccattgcttttgaagcagctcaacattgatctctttctcgatcgagggagatttttcaaatcagtgcgcaagacgtgacgtaagtatccgagtcagtttttatttttctactaatttggtcgtttatttcggcgtgtaggacatggcaaccgggcctgaatttcgcgggtattctgtttctattccaactttttcttgatccgcagccattaacgacttttgaatagatacgctgacacgccaagcctcgctagtcaaaagtgtaccaaacaacgctttacagcaagaacggaatgcgcgtgacgctcgcggtgacgccatttcgccttttcagaaatggataaatagccttgcttcctattatatcttcccaaattaccaatacattacactagcatctgaatttcataaccaatctcgatacaccaaatcgaagatctcccaaacatgcagaggtttttctccgccagatcgattctcggttacgccgtcaagacgcggaggaggtctttctcttctcgttcttcgtctctcctttgctcttccatggcaatgattaattaacgaagagcaagagctcgaatttccccgatcgttcaaacatttggcaataaagtttcttaagattgaatcctgttgccggtcttgcgatgattatcatataatttctgttgaattacgttaagcatgtaataattaacatgtaatgcatgacgttatttatgagatgggtttttatgattagagtcccgcaattatacatttaatacgcgatagaaaacaaaatatagcgcgcaaactaggataaattatcgcgcgcggtgtcatctatgttactagatcgggaattggcatgcaagcttggcactggccgtcgttttacaacgtcgtgactgggaaaaccctggcgttacccaacttaatcgccttgcagcacatccccctttcgccagctggcgtaatagcgaagaggcccgcaccgatcgcccttcccaacagttgcgcagcctgaatggcgaatgctagagcagcttgagcttggatcagattgtcgtttcccgccttcagtttaaactatcagtgtttgacaggatatattggcgggtaaacctaagagaaaagagcgtttattagaataatcggatatttaaaagggcgtgaaaaggtttatccgttcgtccatttgtatgtgcatgccaaccacagggttcccctcgggatcaaagtactttgatccaacccctccgctgctatagtgcagtcggcttctgacgttcagtgcagccgtcttctgaaaacgacatgtcgcacaagtcctaagttacgcgacaggctgccgccctgcccttttcctggcgttttcttgtcgcgtgttttagtcgcataaagtagaatacttgcgactagaaccggagacattacgccatgaacaagagcgccgccgctggcctgctgggctatgcccgcgtcagcaccgacgaccaggacttgaccaaccaacgggccgaactgcacgcggccggctgcaccaagctgttttccgagaagatcaccggcaccaggcgcgaccgcccggagctggccaggatgcttgaccacctacgccctggcgacgttgtgacagtgaccaggctagaccgcctggcccgcagcacccgcgacctactggacattgccgagcgcatccaggaggccggcgcgggcctgcgtagcctggcagagccgtgggccgacaccaccacgccggccggccgcatggtgttgaccgtgttcgccggcattgccgagttcgagcgttccctaatcatcgaccgcacccggagcgggcgcgaggccgccaaggcccgaggcgtgaagtttggcccccgccctaccctcaccccggcacagatcgcgcacgcccgcgagctgatcgaccaggaaggccgcaccgtgaaagaggcggctgcactgcttggcgtgcatcgctcgaccctgtaccgcgcacttgagcgcagcgaggaagtgacgcccaccgaggccaggcggcgcggtgccttccgtgaggacgcattgaccgaggccgacgccctggcggccgccgagaatgaacgccaagaggaacaagcatgaaaccgcaccaggacggccaggacgaaccgtttttcattaccgaagagatcgaggcggagatgatcgcggccgggtacgtgttcgagccgcccgcgcacgtctcaaccgtgcggctgcatgaaatcctggccggtttgtctgatgccaagctggcggcctggccggccagcttggccgctgaagaaaccgagcgccgccgtctaaaaaggtgatgtgtatttgagtaaaacagcttgcgtcatgcggtcgctgcgtatatgatgcgatgagtaaataaacaaatacgcaaggggaacgcatgaaggttatcgctgtacttaaccagaaaggcgggtcaggcaagacgaccatcgcaacccatctagcccgcgccctgcaactcgccggggccgatgttctgttagtcgattccgatccccagggcagtgcccgcgattgggcggccgtgcgggaagatcaaccgctaaccgttgtcggcatcgaccgcccgacgattgaccgcgacgtgaaggccatcggccggcgcgacttcgtagtgatcgacggagcgccccaggcggcggacttggctgtgtccgcgatcaaggcagccgacttcgtgctgattccggtgcagccaagcccttacgacatatgggccaccgccgacctggtggagctggttaagcagcgcattgaggtcacggatggaaggctacaagcggcctttgtcgtgtcgcgggcgatcaaaggcacgcgcatcggcggtgaggttgccgaggcgctggccgggtacgagctgcccattcttgagtcccgtatcacgcagcgcgtgagctacccaggcactgccgccgccggcacaaccgttcttgaatcagaacccgagggcgacgctgcccgcgaggtccaggcgctggccgctgaaattaaatcaaaactcatttgagttaatgaggtaaagagaaaatgagcaaaagcacaaacacgctaagtgccggccgtccgagcgcacgcagcagcaaggctgcaacgttggccagcctggcagacacgccagccatgaagcgggtcaactttcagttgccggcggaggatcacaccaagctgaagatgtacgcggtacgccaaggcaagaccattaccgagctgctatctgaatacatcgcgcagctaccagagtaaatgagcaaatgaataaatgagtagatgaattttagcggctaaaggaggcggcatggaaaatcaagaacaaccaggcaccgacgccgtggaatgccccatgtgtggaggaacgggcggttggccaggcgtaagcggctgggttgcctgccggccctgcaatggcactggaacccccaagcccgaggaatcggcgtgagcggtcgcaaaccatccggcccggtacaaatcggcgcggcgctgggtgatgacctggtggagaagttgaaggccgcgcaggccgcccagcggcaacgcatcgaggcagaagcacgccccggtgaatcgtggcaagcggccgctgatcgaatccgcaaagaatcccggcaaccgccggcagccggtgcgccgtcgattaggaagccgcccaagggcgacgagcaaccagattttttcgttccgatgctctatgacgtgggcacccgcgatagtcgcagcatcatggacgtggccgttttccgtctgtcgaagcgtgaccgacgagctggcgaggtgatccgctacgagcttccagacgggcacgtagaggtttccgcagggccggccggcatggccagtgtgtgggattacgacctggtactgatggcggtttcccatctaaccgaatccatgaaccgataccgggaagggaagggagacaagcccggccgcgtgttccgtccacacgttgcggacgtactcaagttctgccggcgagccgatggcggaaagcagaaagacgacctggtagaaacctgcattcggttaaacaccacgcacgttgccatgcagcgtacgaagaaggccaagaacggccgcctggtgacggtatccgagggtgaagccttgattagccgctacaagatcgtaaagagcgaaaccgggcggccggagtacatcgagatcgagctagctgattggatgtaccgcgagatcacagaaggcaagaacccggacgtgctgacggttcaccccgattactttttgatcgatcccggcatcggccgttttctctaccgcctggcacgccgcgccgcaggcaaggcagaagccagatggttgttcaagacgatctacgaacgcagtggcagcgccggagagttcaagaagttctgtttcaccgtgcgcaagctgatcgggtcaaatgacctgccggagtacgatttgaaggaggaggcggggcaggctggcccgatcctagtcatgcgctaccgcaacctgatcgagggcgaagcatccgccggttcctaatgtacggagcagatgctagggcaaattgccctagcaggggaaaaaggtcgaaaaggtctctttcctgtggatagcacgtacattgggaacccaaagccgtacattgggaaccggaacccgtacattgggaacccaaagccgtacattgggaaccggtcacacatgtaagtgactgatataaaagagaaaaaaggcgatttttccgcctaaaactctttaaaacttattaaaactcttaaaacccgcctggcctgtgcataactgtctggccagcgcacagccgaagagctgcaaaaagcgcctacccttcggtcgctgcgctccctacgccccgccgcttcgcgtcggcctatcgcggccgctggccgctcaaaaatggctggcctacggccaggcaatctaccagggcgcggacaagccgcgccgtcgccactcgaccgccggcgcccacatcaaggcaccctgcctcgcgcgtttcggtgatgacggtgaaaacctctgacacatgcagctcccggagacggtcacagcttgtctgtaagcggatgccgggagcagacaagcccgtcagggcgcgtcagcgggtgttggcgggtgtcggggcgcagccatgacccagtcacgtagcgatagcggagtgtatactggcttaactatgcggcatcagagcagattgtactgagagtgcaccatatgcggtgtgaaataccgcacagatgcgtaaggagaaaataccgcatcaggcgctcttccgcttcctcgctcactgactcgctgcgctcggtcgttcggctgcggcgagcggtatcagctcactcaaaggcggtaatacggttatccacagaatcaggggataacgcaggaaagaacatgtgagcaaaaggccagcaaaaggccaggaaccgtaaaaaggccgcgttgctggcgtttttccataggctccgcccccctgacgagcatcacaaaaatcgacgctcaagtcagaggtggcgaaacccgacaggactataaagataccaggcgtttccccctggaagctccctcgtgcgctctcctgttccgaccctgccgcttaccggatacctgtccgcctttctcccttcgggaagcgtggcgctttctcatagctcacgctgtaggtatctcagttcggtgtaggtcgttcgctccaagctgggctgtgtgcacgaaccccccgttcagcccgaccgctgcgccttatccggtaactatcgtcttgagtccaacccggtaagacacgacttatcgccactggcagcagccactggtaacaggattagcagagcgaggtatgtaggcggtgctacagagttcttgaagtggtggcctaactacggctacactagaaggacagtatttggtatctgcgctctgctgaagccagttaccttcggaaaaagagttggtagctcttgatccggcaaacaaaccaccgctggtagcggtggtttttttgtttgcaagcagcagattacgcgcagaaaaaaaggatctcaagaagatcctttgatcttttctacggggtctgacgctcagtggaacgaaaactcacgttaagggattttggtcatgcattctaggtactaaaacaattcatccagtaaaatataatattttattttctcccaatcaggcttgatccccagtaagtcaaaaaatagctcgacatactgttcttccccgatatcctccctgatcgaccggacgcagaaggcaatgtcataccacttgtccgccctgccgcttctcccaagatcaataaagccacttactttgccatctttcacaaagatgttgctgtctcccaggtcgccgtgggaaaagacaagttcctcttcgggcttttccgtctttaaaaaatcatacagctcgcgcggatctttaaatggagtgtcttcttcccagttttcgcaatccacatcggccagatcgttattcagtaagtaatccaattcggctaagcggctgtctaagctattcgtatagggacaatccgatatgtcgatggagtgaaagagcctgatgcactccgcatacagctcgataatcttttcagggctttgttcatcttcatactcttccgagcaaaggacgccatcggcctcactcatgagcagattgctccagccatcatgccgttcaaagtgcaggacctttggaacaggcagctttccttccagccatagcatcatgtccttttcccgttccacatcataggtggtccctttataccggctgtccgtcatttttaaatataggttttcattttctcccaccagcttatataccttagcaggagacattccttccgtatcttttacgcagcggtatttttcgatcagttttttcaattccggtgatattctcattttagccatttattatttccttcctcttttctacagtatttaaagataccccaagaagctaattataacaagacgaactccaattcactgttccttgcattctaaaaccttaaataccagaaaacagctttttcaaagttgttttcaaagttggcgtataacatagtatcgacggagccgattttgaaaccgcggtgatcacaggcagcaacgctctgtcatcgttacaatcaacatgctaccctccgcgagatcatccgtgtttcaaacccggcagcttagttgccgttcttccgaatagcatcggtaacatgagcaaagtctgccgccttacaacggctctcccgctgacgccgtcccggactgatgggctgcctgtatcgagtggtgattttgtgccgagctgccggtcggggagctgttggctggctggtggcaggatatattgtggtgtaaacaaattgacgcttagacaacttaataacacattgcggacgtttttaatgtactgaattaacgccgaattaa

SEQ ID NO: 45 - protein, 33 aa, Artificial sequence
  Synthetic Construct
MQRFFSARSILGYAVKTRRRSFSSRSSSLLCSS

SEQ ID NO: 46 - DNA, 8885 bp, Artificial sequence
  plasmid VC-MME221-1qcz
agcttggacaatcagtaaattgaacggagaatattattcataaaaatacgatagtaacgggtgatatattcattagaatgaaccgaaaccggcggtaaggatctgagctacacatgctcaggttttttacaacgtgcacaacagaattgaaagcaaatatcatgcgatcataggcgtctcgcatatctcattaaagcagggcatgccggtcgagtcaaatctcggtgacgggcaggaccggacggggcggtaccggcaggctgaagtccagctgccagaaacccacgtcatgccagttcccgtgcttgaagccggccgcccgcagcatgccgcggggggcatatccgagcgcctcgtgcatgcgcacgctcgggtcgttgggcagcccgatgacagcgaccacgctcttgaagccctgtgcctccagggacttcagcaggtgggtgtagagcgtggagcccagtcccgtccgctggtggcggggggagacgtacacggtcgactcggccgtccagtcgtaggcgttgcgtgccttccaggggcccgcgtaggcgatgccggcgacctcgccgtccacctcggcgacgagccagggatagcgctcccgcagacggacgaggtcgtccgtccactcctgcggttcctgcggctcggtacggaagttgaccgtgcttgtctcgatgtagtggttgacgatggtgcagaccgccggcatgtccgcctcggtggcacggcggatgtcggccgggcgtcgttctgggctcatggtagactcgacggatccacgtgtggaagatatgaatttttttgagaaactagataagattaatgaatatcggtgttttggttttttcttgtggccgtctttgtttatattgagatttttcaaatcagtgcgcaagacgtgacgtaagtatccgagtcagtttttatttttctactaatttggtcgaagctttgggcggatcctctagaattcgaatccaaaaattacggatatgaatataggcatatccgtatccgaattatccgtttgacagctagcaacgattgtacaattgcttctttaaaaaaggaagaaagaaagaaagaaaagaatcaacatcagcgttaacaaacggccccgttacggcccaaacggtcatatagagtaacggcgttaagcgttgaaagactcctatcgaaatacgtaaccgcaaacgtgtcatagtcagatcccctcttccttcaccgcctcaaacacaaaaataatcttctacagcctatatatacaacccccccttctatctctcctttctcacaattcatcatctttctttctctacccccaattttaagaaatcctctcttctcctcttcattttcaaggtaaatctctctctctctctctctctctgttattccttgttttaattaggtatgtattattgctagtttgttaatctgcttatcttatgtatgccttatgtgaatatctttatcttgttcatctcatccgtttagaagctataaatttgttgatttgactgtgtatctacacgtggttatgtttatatctaatcagatatgaatttcttcatattgttgcgtttgtgtgtaccaatccgaaatcgttgatttttttcatttaatcgtgtagctaattgtacgtatacatatggatctacgtatcaattgttcatctgtttgtgtttgtatgtatacagatctgaaaacatcacttctctcatctgattgtgttgttacatacatagatatagatctgttatatcattttttttattaattgtgtatatatatatgtgcatagatctggattacatgattgtgattatttacatgattttgttatttacgtatgtatatatgtagatctggactttttggagttgttgacttgattgtatttgtgtgtgtatatgtgtgttctgatcttgatatgttatgtatgtgcagcccgggttgctcttccatggcaatgattaattaacgaagagcaagagctcgaatttccccgatcgttcaaacatttggcaataaagtttcttaagattgaatcctgttgccggtcttgcgatgattatcatataatttctgttgaattacgttaagcatgtaataattaacatgtaatgcatgacgttatttatgagatgggtttttatgattagagtcccgcaattatacatttaatacgcgatagaaaacaaaatatagcgcgcaaactaggataaattatcgcgcgcggtgtcatctatgttactagatcgggaattggcatgcaagcttggcactggccgtcgttttacaacgtcgtgactgggaaaaccctggcgttacccaacttaatcgccttgcagcacatccccctttcgccagctggcgtaatagcgaagaggcccgcaccgatcgcccttcccaacagttgcgcagcctgaatggcgaatgctagagcagcttgagcttggatcagattgtcgtttcccgccttcagtttaaactatcagtgtttgacaggatatattggcgggtaaacctaagagaaaagagcgtttattagaataatcggatatttaaaagggcgtgaaaaggtttatccgttcgtccatttgtatgtgcatgccaaccacagggttcccctcgggatcaaagtactttgatccaacccctccgctgctatagtgcagtcggcttctgacgttcagtgcagccgtcttctgaaaacgacatgtcgcacaagtcctaagttacgcgacaggctgccgccctgcccttttcctggcgttttcttgtcgcgtgttttagtcgcataaagtagaatacttgcgactagaaccggagacattacgccatgaacaagagcgccgccgctggcctgctgggctatgcccgcgtcagcaccgacgaccaggacttgaccaaccaacgggccgaactgcacgcggccggctgcaccaagctgttttccgagaagatcaccggcaccaggcgcgaccgcccggagctggccaggatgcttgaccacctacgccctggcgacgttgtgacagtgaccaggctagaccgcctggcccgcagcacccgcgacctactggacattgccgagcgcatccaggaggccggcgcgggcctgcgtagcctggcagagccgtgggccgacaccaccacgccggccggccgcatggtgttgaccgtgttcgccggcattgccgagttcgagcgttccctaatcatcgaccgcacccggagcgggcgcgaggccgccaaggcccgaggcgtgaagtttggcccccgccctaccctcaccccggcacagatcgcgcacgcccgcgagctgatcgaccaggaaggccgcaccgtgaaagaggcggctgcactgcttggcgtgcatcgctcgaccctgtaccgcgcacttgagcgcagcgaggaagtgacgcccaccgaggccaggcggcgcggtgccttccgtgaggacgcattgaccgaggccgacgccctggcggccgccgagaatgaacgccaagaggaacaagcatgaaaccgcaccaggacggccaggacgaaccgtttttcattaccgaagagatcgaggcggagatgatcgcggccgggtacgtgttcgagccgcccgcgcacgtctcaaccgtgcggctgcatgaaatcctggccggtttgtctgatgccaagctggcggcctggccggccagcttggccgctgaagaaaccgagcgccgccgtctaaaaaggtgatgtgtatttgagtaaaacagcttgcgtcatgcggtcgctgcgtatatgatgcgatgagtaaataaacaaatacgcaaggggaacgcatgaaggttatcgctgtacttaaccagaaaggcgggtcaggcaagacgaccatcgcaacccatctagcccgcgccctgcaactcgccggggccgatgttctgttagtcgattccgatccccagggcagtgcccgcgattgggcggccgtgcgggaagatcaaccgctaaccgttgtcggcatcgaccgcccgacgattgaccgcgacgtgaaggccatcggccggcgcgacttcgtagtgatcgacggagcgccccaggcggcggacttggctgtgtccgcgatcaaggcagccgacttcgtgctgattccggtgcagccaagcccttacgacatatgggccaccgccgacctggtggagctggttaagcagcgcattgaggtcacggatggaaggctacaagcggcctttgtcgtgtcgcgggcgatcaaaggcacgcgcatcggcggtgaggttgccgaggcgctggccgggtacgagctgcccattcttgagtcccgtatcacgcagcgcgtgagctacccaggcactgccgccgccggcacaaccgttcttgaatcagaacccgagggcgacgctgcccgcgaggtccaggcgctggccgctgaaattaaatcaaaactcatttgagttaatgaggtaaagagaaaatgagcaaaagcacaaacacgctaagtgccggccgtccgagcgcacgcagcagcaaggctgcaacgttggccagcctggcagacacgccagccatgaagcgggtcaactttcagttgccggcggaggatcacaccaagctgaagatgtacgcggtacgccaaggcaagaccattaccgagctgctatctgaatacatcgcgcagctaccagagtaaatgagcaaatgaataaatgagtagatgaattttagcggctaaaggaggcggcatggaaaatcaagaacaaccaggcaccgacgccgtggaatgccccatgtgtggaggaacgggcggttggccaggcgtaagcggctgggttgcctgccggccctgcaatggcactggaacccccaagcccgaggaatcggcgtgagcggtcgcaaaccatccggcccggtacaaatcggcgcggcgctgggtgatgacctggtggagaagttgaaggccgcgcaggccgcccagcggcaacgcatcgaggcagaagcacgccccggtgaatcgtggcaagcggccgctgatcgaatccgcaaagaatcccggcaaccgccggcagccggtgcgccgtcgattaggaagccgcccaagggcgacgagcaaccagattttttcgttccgatgctctatgacgtgggcacccgcgatagtcgcagcatcatggacgtggccgttttccgtctgtcgaagcgtgaccgacgagctggcgaggtgatccgctacgagcttccagacgggcacgtagaggtttccgcagggccggccggcatggccagtgtgtgggattacgacctggtactgatggcggtttcccatctaaccgaatccatgaaccgataccgggaagggaagggagacaagcccggccgcgtgttccgtccacacgttgcggacgtactcaagttctgccggcgagccgatggcggaaagcagaaagacgacctggtagaaacctgcattcggttaaacaccacgcacgttgccatgcagcgtacgaagaaggccaagaacggccgcctggtgacggtatccgagggtgaagccttgattagccgctacaagatcgtaaagagcgaaaccgggcggccggagtacatcgagatcgagctagctgattggatgtaccgcgagatcacagaaggcaagaacccggacgtgctgacggttcaccccgattactttttgatcgatcccggcatcggccgttttctctaccgcctggcacgccgcgccgcaggcaaggcagaagccagatggttgttcaagacgatctacgaacgcagtggcagcgccggagagttcaagaagttctgtttcaccgtgcgcaagctgatcgggtcaaatgacctgccggagtacgatttgaaggaggaggcggggcaggctggcccgatcctagtcatgcgctaccgcaacctgatcgagggcgaagcatccgccggttcctaatgtacggagcagatgctagggcaaattgccctagcaggggaaaaaggtcgaaaaggtctctttcctgtggatagcacgtacattgggaacccaaagccgtacattgggaaccggaacccgtacattgggaacccaaagccgtacattgggaaccggtcacacatgtaagtgactgatataaaagagaaaaaaggcgatttttccgcctaaaactctttaaaacttattaaaactcttaaaacccgcctggcctgtgcataactgtctggccagcgcacagccgaagagctgcaaaaagcgcctacccttcggtcgctgcgctccctacgccccgccgcttcgcgtcggcctatcgcggccgctggccgctcaaaaatggctggcctacggccaggcaatctaccagggcgcggacaagccgcgccgtcgccactcgaccgccggcgcccacatcaaggcaccctgcctcgcgcgtttcggtgatgacggtgaaaacctctgacacatgcagctcccggagacggtcacagcttgtctgtaagcggatgccgggagcagacaagcccgtcagggcgcgtcagcgggtgttggcgggtgtcggggcgcagccatgacccagtcacgtagcgatagcggagtgtatactggcttaactatgcggcatcagagcagattgtactgagagtgcaccatatgcggtgtgaaataccgcacagatgcgtaaggagaaaataccgcatcaggcgctcttccgcttcctcgctcactgactcgctgcgctcggtcgttcggctgcggcgagcggtatcagctcactcaaaggcggtaatacggttatccacagaatcaggggataacgcaggaaagaacatgtgagcaaaaggccagcaaaaggccaggaaccgtaaaaaggccgcgttgctggcgtttttccataggctccgcccccctgacgagcatcacaaaaatcgacgctcaagtcagaggtggcgaaacccgacaggactataaagataccaggcgtttccccctggaagctccctcgtgcgctctcctgttccgaccctgccgcttaccggatacctgtccgcctttctcccttcgggaagcgtggcgctttctcatagctcacgctgtaggtatctcagttcggtgtaggtcgttcgctccaagctgggctgtgtgcacgaaccccccgttcagcccgaccgctgcgccttatccggtaactatcgtcttgagtccaacccggtaagacacgacttatcgccactggcagcagccactggtaacaggattagcagagcgaggtatgtaggcggtgctacagagttcttgaagtggtggcctaactacggctacactagaaggacagtatttggtatctgcgctctgctgaagccagttaccttcggaaaaagagttggtagctcttgatccggcaaacaaaccaccgctggtagcggtggtttttttgtttgcaagcagcagattacgcgcagaaaaaaaggatctcaagaagatcctttgatcttttctacggggtctgacgctcagtggaacgaaaactcacgttaagggattttggtcatgcattctaggtactaaaacaattcatccagtaaaatataatattttattttctcccaatcaggcttgatccccagtaagtcaaaaaatagctcgacatactgttcttccccgatatcctccctgatcgaccggacgcagaaggcaatgtcataccacttgtccgccctgccgcttctcccaagatcaataaagccacttactttgccatctttcacaaagatgttgctgtctcccaggtcgccgtgggaaaagacaagttcctcttcgggcttttccgtctttaaaaaatcatacagctcgcgcggatctttaaatggagtgtcttcttcccagttttcgcaatccacatcggccagatcgttattcagtaagtaatccaattcggctaagcggctgtctaagctattcgtatagggacaatccgatatgtcgatggagtgaaagagcctgatgcactccgcatacagctcgataatcttttcagggctttgttcatcttcatactcttccgagcaaaggacgccatcggcctcactcatgagcagattgctccagccatcatgccgttcaaagtgcaggacctttggaacaggcagctttccttccagccatagcatcatgtccttttcccgttccacatcataggtggtccctttataccggctgtccgtcatttttaaatataggttttcattttctcccaccagcttatataccttagcaggagacattccttccgtatcttttacgcagcggtatttttcgatcagttttttcaattccggtgatattctcattttagccatttattatttccttcctcttttctacagtatttaaagataccccaagaagctaattataacaagacgaactccaattcactgttccttgcattctaaaaccttaaataccagaaaacagctttttcaaagttgttttcaaagttggcgtataacatagtatcgacggagccgattttgaaaccgcggtgatcacaggcagcaacgctctgtcatcgttacaatcaacatgctaccctccgcgagatcatccgtgtttcaaacccggcagcttagttgccgttcttccgaatagcatcggtaacatgagcaaagtctgccgccttacaacggctctcccgctgacgccgtcccggactgatgggctgcctgtatcgagtggtgattttgtgccgagctgccggtcggggagctgttggctggctggtggcaggatatattgtggtgtaaacaaattgacgcttagacaacttaataacacattgcggacgtttttaatgtactgaattaacgccgaatta

SEQ ID NO: 47 - DNA, 9303 bp, Artificial sequence
  plasmid pMTX447korr
  5'UTR (1964)..(2128)
  transit_peptide (2129)..(2236)
  CDS (2129)..(2236)
  transit_peptide (2314)..(2382)
  CDS (2314)..(2382)
  CDS (2383)..(2391): adapter
agcttggacaatcagtaaattgaacggagaatattattcataaaaatacgatagtaacgggtgatatattcattagaatgaaccgaaaccggcggtaaggatctgagctacacatgctcaggttttttacaacgtgcacaacagaattgaaagcaaatatcatgcgatcataggcgtctcgcatatctcattaaagcagggcatgccggtcgagtcaaatctcggtgacgggcaggaccggacggggcggtaccggcaggctgaagtccagctgccagaaacccacgtcatgccagttcccgtgcttgaagccggccgcccgcagcatgccgcggggggcatatccgagcgcctcgtgcatgcgcacgctcgggtcgttgggcagcccgatgacagcgaccacgctcttgaagccctgtgcctccagggacttcagcaggtgggtgtagagcgtggagcccagtcccgtccgctggtggcggggggagacgtacacggtcgactcggccgtccagtcgtaggcgttgcgtgccttccaggggcccgcgtaggcgatgccggcgacctcgccgtccacctcggcgacgagccagggatagcgctcccgcagacggacgaggtcgtccgtccactcctgcggttcctgcggctcggtacggaagttgaccgtgcttgtctcgatgtagtggttgacgatggtgcagaccgccggcatgtccgcctcggtggcacggcggatgtcggccgggcgtcgttctgggctcatggtagactcgacggatccacgtgtggaagatatgaatttttttgagaaactagataagattaatgaatatcggtgttttggttttttcttgtggccgtctttgtttatattgagatttttcaaatcagtgcgcaagacgtgacgtaagtatccgagtcagtttttatttttctactaatttggtcgaagctttgggcggatcctctagaattcgaatccaaaaattacggatatgaatataggcatatccgtatccgaattatccgtttgacagctagcaacgattgtacaattgcttctttaaaaaaggaagaaagaaagaaagaaaagaatcaacatcagcgttaacaaacggccccgttacggcccaaacggtcatatagagtaacggcgttaagcgttgaaagactcctatcgaaatacgtaaccgcaaacgtgtcatagtcagatcccctcttccttcaccgcctcaaacacaaaaataatcttctacagcctatatatacaacccccccttctatctctcctttctcacaattcatcatctttctttctctacccccaattttaagaaatcctctcttctcctcttcattttcaaggtaaatctctctctctctctctctctctgttattccttgttttaattaggtatgtattattgctagtttgttaatctgcttatcttatgtatgccttatgtgaatatctttatcttgttcatctcatccgtttagaagctataaatttgttgatttgactgtgtatctacacgtggttatgtttatatctaatcagatatgaatttcttcatattgttgcgtttgtgtgtaccaatccgaaatcgttgatttttttcatttaatcgtgtagctaattgtacgtatacatatggatctacgtatcaattgttcatctgtttgtgtttgtatgtatacagatctgaaaacatcacttctctcatctgattgtgttgttacatacatagatatagatctgttatatcattttttttattaattgtgtatatatatatgtgcatagatctggattacatgattgtgattatttacatgattttgttatttacgtatgtatatatgtagatctggactttttggagttgttgacttgattgtatttgtgtgtgtatatgtgtgttctgatcttgatatgttatgtatgtgcagcccaaacgcataaacttatcttcatagttgccactccaatttgctccttgaatctcctccacccaatacataatccactcctccatcacccacttcactactaaatcaaacttaactctgtttttctctctcctcctttcatttcttattcttccaatcatcgtactccgccatgaccaccgctgtcaccgccgctgtttctttcccctctaccaaaaccacctctctctccgcccgaagctcctccgtcatttcccctgacaaaatcagctacaaaaaggtgattcccaatttcactgtgttttttattaataatttgttattttgatgatgagatgattaatttgggtgctgcaggttcctttgtactacaggaatgtatctgcaactgggaaaatgggacccatcagggcccagatcgcctcttgctcttccatggcaatgattaattaacgaagagcaagagctcgaatttccccgatcgttcaaacatttggcaataaagtttcttaagattgaatcctgttgccggtcttgcgatgattatcatataatttctgttgaattacgttaagcatgtaataattaacatgtaatgcatgacgttatttatgagatgggtttttatgattagagtcccgcaattatacatttaatacgcgatagaaaacaaaatatagcgcgcaaactaggataaattatcgcgcgcggtgtcatctatgttactagatcgggaattggcatgcaagcttggcactggccgtcgttttacaacgtcgtgactgggaaaaccctggcgttacccaacttaatcgccttgcagcacatccccctttcgccagctggcgtaatagcgaagaggcccgcaccgatcgcccttcccaacagttgcgcagcctgaatggcgaatgctagagcagcttgagcttggatcagattgtcgtttcccgccttcagtttaaactatcagtgtttgacaggatatattggcgggtaaacctaagagaaaagagcgtttattagaataatcggatatttaaaagggcgtgaaaaggtttatccgttcgtccatttgtatgtgcatgccaaccacagggttcccctcgggatcaaagtactttgatccaacccctccgctgctatagtgcagtcggcttctgacgttcagtgcagccgtcttctgaaaacgacatgtcgcacaagtcctaagttacgcgacaggctgccgccctgcccttttcctggcgttttcttgtcgcgtgttttagtcgcataaagtagaatacttgcgactagaaccggagacattacgccatgaacaagagcgccgccgctggcctgctgggctatgcccgcgtcagcaccgacgaccaggacttgaccaaccaacgggccgaactgcacgcggccggctgcaccaagctgttttccgagaagatcaccggcaccaggcgcgaccgcccggagctggccaggatgcttgaccacctacgccctggcgacgttgtgacagtgaccaggctagaccgcctggcccgcagcacccgcgacctactggacattgccgagcgcatccaggaggccggcgcgggcctgcgtagcctggcagagccgtgggccgacaccaccacgccggccggccgcatggtgttgaccgtgttcgccggcattgccgagttcgagcgttccctaatcatcgaccgcacccggagcgggcgcgaggccgccaaggcccgaggcgtgaagtttggcccccgccctaccctcaccccggcacagatcgcgcacgcccgcgagctgatcgaccaggaaggccgcaccgtgaaagaggcggctgcactgcttggcgtgcatcgctcgaccctgtaccgcgcacttgagcgcagcgaggaagtgacgcccaccgaggccaggcggcgcggtgccttccgtgaggacgcattgaccgaggccgacgccctggcggccgccgagaatgaacgccaagaggaacaagcatgaaaccgcaccaggacggccaggacgaaccgtttttcattaccgaagagatcgaggcggagatgatcgcggccgggtacgtgttcgagccgcccgcgcacgtctcaaccgtgcggctgcatgaaatcctggccggtttgtctgatgccaagctggcggcctggccggccagcttggccgctgaagaaaccgagcgccgccgtctaaaaaggtgatgtgtatttgagtaaaacagcttgcgtcatgcggtcgctgcgtatatgatgcgatgagtaaataaacaaatacgcaaggggaacgcatgaaggttatcgctgtacttaaccagaaaggcgggtcaggcaagacgaccatcgcaacccatctagcccgcgccctgcaactcgccggggccgatgttctgttagtcgattccgatccccagggcagtgcccgcgattgggcggccgtgcgggaagatcaaccgctaaccgttgtcggcatcgaccgcccgacgattgaccgcgacgtgaaggccatcggccggcgcgacttcgtagtgatcgacggagcgccccaggcggcggacttggctgtgtccgcgatcaaggcagccgacttcgtgctgattccggtgcagccaagcccttacgacatatgggccaccgccgacctggtggagctggttaagcagcgcattgaggtcacggatggaaggctacaagcggcctttgtcgtgtcgcgggcgatcaaaggcacgcgcatcggcggtgaggttgccgaggcgctggccgggtacgagctgcccattcttgagtcccgtatcacgcagcgcgtgagctacccaggcactgccgccgccggcacaaccgttcttgaatcagaacccgagggcgacgctgcccgcgaggtccaggcgctggccgctgaaattaaatcaaaactcatttgagttaatgaggtaaagagaaaatgagcaaaagcacaaacacgctaagtgccggccgtccgagcgcacgcagcagcaaggctgcaacgttggccagcctggcagacacgccagccatgaagcgggtcaactttcagttgccggcggaggatcacaccaagctgaagatgtacgcggtacgccaaggcaagaccattaccgagctgctatctgaatacatcgcgcagctaccagagtaaatgagcaaatgaataaatgagtagatgaattttagcggctaaaggaggcggcatggaaaatcaagaacaaccaggcaccgacgccgtggaatgccccatgtgtggaggaacgggcggttggccaggcgtaagcggctgggttgtctgccggccctgcaatggcactggaacccccaagcccgaggaatcggcgtgacggtcgcaaaccatccggcccggtacaaatcggcgcggcgctgggtgatgacctggtggagaagttgaaggccgcgcaggccgcccagcggcaacgcatcgaggcagaagcacgccccggtgaatcgtggcaagcggccgctgatcgaatccgcaaagaatcccggcaaccgccggcagccggtgcgccgtcgattaggaagccgcccaagggcgacgagcaaccagattttttcgttccgatgctctatgacgtgggcacccgcgatagtcgcagcatcatggacgtggccgttttccgtctgtcgaagcgtgaccgacgagctggcgaggtgatccgctacgagcttccagacgggcacgtagaggtttccgcagggccggccggcatggccagtgtgtgggattacgacctggtactgatggcggtttcccatctaaccgaatccatgaaccgataccgggaagggaagggagacaagcccggccgcgtgttccgtccacacgttgcggacgtactcaagttctgccggcgagccgatggcggaaagcagaaagacgacctggtagaaacctgcattcggttaaacaccacgcacgttgccatgcagcgtacgaagaaggccaagaacggccgcctggtgacggtatccgagggtgaagccttgattagccgctacaagatcgtaaagagcgaaaccgggcggccggagtacatcgagatcgagctagctgattggatgtaccgcgagatcacagaaggcaagaacccggacgtgctgacggttcaccccgattactttttgatcgatcccggcatcggccgttttctctaccgcctggcacgccgcgccgcaggcaaggcagaagccagatggttgttcaagacgatctacgaacgcagtggcagcgccggagagttcaagaagttctgtttcaccgtgcgcaagctgatcgggtcaaatgacctgccggagtacgatttgaaggaggaggcggggcaggctggcccgatcctagtcatgcgctaccgcaacctgatcgagggcgaagcatccgccggttcctaatgtacggagcagatgctagggcaaattgccctagcaggggaaaaaggtcgaaaaggtctctttcctgtggatagcacgtacattgggaacccaaagccgtacattgggaaccggaacccgtacattgggaacccaaagccgtacattgggaaccggtcacacatgtaagtgactgatataaaagagaaaaaaggcgatttttccgcctaaaactctttaaaacttattaaaactcttaaaacccgcctggcctgtgcataactgtctggccagcgcacagccgaagagctgcaaaaagcgcctacccttcggtcgctgcgctccctacgccccgccgcttcgcgtcggcctatcgcggccgctggccgctcaaaaatggctggcctacggccaggcaatctaccagggcgcggacaagccgcgccgtcgccactcgaccgccggcgcccacatcaaggcaccctgcctcgcgcgtttcggtgatgacggtgaaaacctctgacacatgcagctcccggagacggtcacagcttgtctgtaagcggatgccgggagcagacaagcccgtcagggcgcgtcagcgggtgttggcgggtgtcggggcgcagccatgacccagtcacgtagcgatagcggagtgtatactggcttaactatgcggcatcagagcagattgtactgagagtgcaccatatgcggtgtgaaataccgcacagatgcgtaaggagaaaataccgcatcaggcgctcttccgcttcctcgctcactgactcgctgcgctcggtcgttcggctgcggcgagcggtatcagctcactcaaaggcggtaatacggttatccacagaatcaggggataacgcaggaaagaacatgtgagcaaaaggccagcaaaaggccaggaaccgtaaaaaggccgcgttgctggcgtttttccataggctccgcccccctgacgagcatcacaaaaatcgacgctcaagtcagaggtggcgaaacccgacaggactataaagataccaggcgtttccccctggaagctccctcgtgcgctctcctgttccgaccctgccgcttaccggatacctgtccgcctttctcccttcgggaagcgtggcgctttctcatagctcacgctgtaggtatctcagttcggtgtaggtcgttcgctccaagctgggctgtgtgcacgaaccccccgttcagcccgaccgctgcgccttatccggtaactatcgtcttgagtccaacccggtaagacacgacttatcgccactggcagcagccactggtaacaggattagcagagcgaggtatgtaggcggtgctacagagttcttgaagtggtggcctaactacggctacactagaaggacagtatttggtatctgcgctctgctgaagccagttaccttcggaaaaagagttggtagctcttgatccggcaaacaaaccaccgctggtagcggtggtttttttgtttgcaagcagcagattacgcgcagaaaaaaaggatctcaagaagatcctttgatcttttctacggggtctgacgctcagtggaacgaaaactcacgttaagggattttggtcatgcattctaggtactaaaacaattcatccagtaaaatataatattttattttctcccaatcaggcttgatccccagtaagtcaaaaaatagctcgacatactgttcttccccgatatcctccctgatcgaccggacgcagaaggcaatgtcataccacttgtccgccctgccgcttctcccaagatcaataaagccacttactttgccatctttcacaaagatgttgctgtctcccaggtcgccgtgggaaaagacaagttcctcttcgggcttttccgtctttaaaaaatcatacagctcgcgcggatctttaaatggagtgtcttcttcccagttttcgcaatccacatcggccagatcgttattcagtaagtaatccaattcggctaagcggctgtctaagctattcgtatagggacaatccgatatgtcgatggagtgaaagagcctgatgcactccgcatacagctcgataatcttttcagggctttgttcatcttcatactcttccgagcaaaggacgccatcggcctcactcatgagcagattgctccagccatcatgccgttcaaagtgcaggacctttggaacaggcagctttccttccagccatagcatcatgtccttttcccgttccacatcataggtggtccctttataccggctgtccgtcatttttaaatataggttttcattttctcccaccagcttatataccttagcaggagacattccttccgtatcttttacgcagcggtatttttcgatcagttttttcaattccggtgatattctcattttagccatttattatttccttcctcttttctacagtatttaaagataccccaagaagctaattataacaagacgaactccaattcactgttccttgcattctaaaaccttaaataccagaaaacagctttttcaaagttgttttcaaagttggcgtataacatagtatcgacggagccgattttgaaaccgcggtgatcacaggcagcaacgctctgtcatcgttacaatcaacatgctaccctccgcgagatcatccgtgtttcaaacccggcagcttagttgccgttcttccgaatagcatcggtaacatgagcaaagtctgccgccttacaacggctctcccgctgacgccgtcccggactgatgggctgcctgtatcgagtggtgattttgtgccgagctgccggtcggggagctgttggctggctggtggcaggatatattgtggtgtaaacaaattgacgcttagacaacttaataacacattgcggacgtttttaatgtactgaattaacgccgaatta

SEQ ID NO: 48 - protein, 62 aa, Artificial sequence; identical to SEQ ID NO: 43
  Synthetic Construct

SEQ ID NO: 49 - DNA, 8975 bp, Artificial sequence
  plasmid VC-MME445-1qcz
  transit_peptide (1964)..(2053)
  CDS (1964)..(2053)
  CDS (2054)..(2062): adapter
agcttggacaatcagtaaattgaacggagaatattattcataaaaatacgatagtaacgggtgatatattcattagaatgaaccgaaaccggcggtaaggatctgagctacacatgctcaggttttttacaacgtgcacaacagaattgaaagcaaatatcatgcgatcataggcgtctcgcatatctcattaaagcagggcatgccggtcgagtcaaatctcggtgacgggcaggaccggacggggcggtaccggcaggctgaagtccagctgccagaaacccacgtcatgccagttcccgtgcttgaagccggccgcccgcagcatgccgcggggggcatatccgagcgcctcgtgcatgcgcacgctcgggtcgttgggcagcccgatgacagcgaccacgctcttgaagccctgtgcctccagggacttcagcaggtgggtgtagagcgtggagcccagtcccgtccgctggtggcggggggagacgtacacggtcgactcggccgtccagtcgtaggcgttgcgtgccttccaggggcccgcgtaggcgatgccggcgacctcgccgtccacctcggcgacgagccagggatagcgctcccgcagacggacgaggtcgtccgtccactcctgcggttcctgcggctcggtacggaagttgaccgtgcttgtctcgatgtagtggttgacgatggtgcagaccgccggcatgtccgcctcggtggcacggcggatgtcggccgggcgtcgttctgggctcatggtagactcgacggatccacgtgtggaagatatgaatttttttgagaaactagataagattaatgaatatcggtgttttggttttttcttgtggccgtctttgtttatattgagatttttcaaatcagtgcgcaagacgtgacgtaagtatccgagtcagtttttatttttctactaatttggtcgaagctttgggcggatcctctagaattcgaatccaaaaattacggatatgaatataggcatatccgtatccgaattatccgtttgacagctagcaacgattgtacaattgcttctttaaaaaaggaagaaagaaagaaagaaaagaatcaacatcagcgttaacaaacggccccgttacggcccaaacggtcatatagagtaacggcgttaagcgttgaaagactcctatcgaaatacgtaaccgcaaacgtgtcatagtcagatcccctcttccttcaccgcctcaaacacaaaaataatcttctacagcctatatatacaacccccccttctatctctcctttctcacaattcatcatctttctttctctacccccaattttaagaaatcctctcttctcctcttcattttcaaggtaaatctctctctctctctctctctctgttattccttgttttaattaggtatgtattattgctagtttgttaatctgcttatcttatgtatgccttatgtgaatatctttatcttgttcatctcatccgtttagaagctataaatttgttgatttgactgtgtatctacacgtggttatgtttatatctaatcagatatgaatttcttcatattgttgcgtttgtgtgtaccaatccgaaatcgttgatttttttcatttaatcgtgtagctaattgtacgtatacatatggatctacgtatcaattgttcatctgtttgtgtttgtatgtatacagatctgaaaacatcacttctctcatctgattgtgttgttacatacatagatatagatctgttatatcattttttttattaattgtgtatatatatatgtgcatagatctggattacatgattgtgattatttacatgattttgttatttacgtatgtatatatgtagatctggactttttggagttgttgacttgattgtatttgtgtgtgtatatgtgtgttctgatcttgatatgttatgtatgtgcagcccaaacatgcagaggtttttctccgccagatcgattctcggttacgccgtcaagacgcggaggaggtctttctcttctcgttcttcgtctctcctttgctcttccatggcaatgattaattaacgaagagcaagagctcgaatttccccgatcgttcaaacatttggcaataaagtttcttaagattgaatcctgttgccggtcttgcgatgattatcatataatttctgttgaattacgttaagcatgtaataattaacatgtaatgcatgacgttatttatgagatgggtttttatgattagagtcccgcaattatacatttaatacgcgatagaaaacaaaatatagcgcgcaaactaggataaattatcgcgcgcggtgtcatctatgttactagatcgggaattggcatgcaagcttggcactggccgtcgttttacaacgtcgtgactgggaaaaccctggcgttacccaacttaatcgccttgcagcacatccccctttcgccagctggcgtaatagcgaagaggcccgcaccgatcgcccttcccaacagttgcgcagcctgaatggcgaatgctagagcagcttgagcttggatcagattgtcgtttcccgccttcagtttaaactatcagtgtttgacaggatatattggcgggtaaacctaagagaaaagagcgtttattagaataatcggatatttaaaagggcgtgaaaaggtttatccgttcgtccatttgtatgtgcatgccaaccacagggttcccctcgggatcaaagtactttgatccaacccctccgctgctatagtgcagtcggcttctgacgttcagtgcagccgtcttctgaaaacgacatgtcgcacaagtcctaagttacgcgacaggctgccgccctgcccttttcctggcgttttcttgtcgcgtgttttagtcgcataaagtagaatacttgcgactagaaccggagacattacgccatgaacaagagcgccgccgctggcctgctgggctatgcccgcgtcagcaccgacgaccaggacttgaccaaccaacgggccgaactgcacgcggccggctgcaccaagctgttttccgagaagatcaccggcaccaggcgcgaccgcccggagctggccaggatgcttgaccacctacgccctggcgacgttgtgacagtgaccaggctagaccgcctggcccgcagcacccgcgacctactggacattgccgagcgcatccaggaggccggcgcgggcctgcgtagcctggcagagccgtgggccgacaccaccacgccggccggccgcatggtgttgaccgtgttcgccggcattgccgagttcgagcgttccctaatcatcgaccgcacccggagcgggcgcgaggccgccaaggcccgaggcgtgaagtttggcccccgccctaccctcaccccggcacagatcgcgcacgcccgcgagctgatcgaccaggaaggccgcaccgtgaaagaggcggctgcactgcttggcgtgcatcgctcgaccctgtaccgcgcacttgagcgcagcgaggaagtgacgcccaccgaggccaggcggcgcggtgccttccgtgaggacgcattgaccgaggccgacgccctggcggccgccgagaatgaacgccaagaggaacaagcatgaaaccgcaccaggacggccaggacgaaccgtttttcattaccgaagagatcgaggcggagatgatcgcggccgggtacgtgttcgagccgcccgcgcacgtctcaaccgtgcggctgcatgaaatcctggccggtttgtctgatgccaagctggcggcctggccggccagcttggccgctgaagaaaccgagcgccgccgtctaaaaaggtgatgtgtatttgagtaaaacagcttgcgtcatgcggtcgctgcgtatatgatgcgatgagtaaataaacaaatacgcaaggggaacgcatgaaggttatcgctgtacttaaccagaaaggcgggtcaggcaagacgaccatcgcaacccatctagcccgcgccctgcaactcgccggggccgatgttctgttagtcgattccgatccccagggcagtgcccgcgattgggcggccgtgcgggaagatcaaccgctaaccgttgtcggcatcgaccgcccgacgattgaccgcgacgtgaaggccatcggccggcgcgacttcgtagtgatcgacggagcgccccaggcggcggacttggctgtgtccgcgatcaaggcagccgacttcgtgctgattccggtgcagccaagcccttacgacatatgggccaccgccgacctggtggagctggttaagcagcgcattgaggtcacggatggaaggctacaagcggcctttgtcgtgtcgcgggcgatcaaaggcacgcgcatcggcggtgaggttgccgaggcgctggccgggtacgagctgcccattcttgagtcccgtatcacgcagcgcgtgagctacccaggcactgccgccgccggcacaaccgttcttgaatcagaacccgagggcgacgctgcccgcgaggtccaggcgctggccgctgaaattaaatcaaaactcatttgagttaatgaggtaaagagaaaatgagcaaaagcacaaacacgctaagtgccggccgtccgagcgcacgcagcagcaaggctgcaacgttggccagcctggcagacacgccagccatgaagcgggtcaactttcagttgccggcggaggatcacaccaagctgaagatgtacgcggtacgccaaggcaagaccattaccgagctgctatctgaatacatcgcgcagctaccagagtaaatgagcaaatgaataaatgagtagatgaattttagcggctaaaggaggcggcatggaaaatcaagaacaaccaggcaccgacgccgtggaatgccccatgtgtggaggaacgggcggttggccaggcgtaagcggctgggttgcctgccggccctgcaatggcactggaacccccaagcccgaggaatcggcgtgagcggtcgcaaaccatccggcccggtacaaatcggcgcggcgctgggtgatgacctggtggagaagttgaaggccgcgcaggccgcccagcggcaacgcatcgaggcagaagcacgccccggtgaatcgtggcaagcggccgctgatcgaatccgcaaagaatcccggcaaccgccggcagccggtgcgccgtcgattaggaagccgcccaagggcgacgagcaaccagattttttcgttccgatgctctatgacgtgggcacccgcgatagtcgcagcatcatggacgtggccgttttccgtctgtcgaagcgtgaccgacgagctggcgaggtgatccgctacgagcttccagacgggcacgtagaggtttccgcagggccggccggcatggccagtgtgtgggattacgacctggtactgatggcggtttcccatctaaccgaatccatgaaccgataccgggaagggaagggagacaagcccggccgcgtgttccgtccacacgttgcggacgtactcaagttctgccggcgagccgatggcggaaagcagaaagacgacctggtagaaacctgcattcggttaaacaccacgcacgttgccatgcagcgtacgaagaaggccaagaacggccgcctggtgacggtatccgagggtgaagccttgattagccgctacaagatcgtaaagagcgaaaccgggcggccggagtacatcgagatcgagctagctgattggatgtaccgcgagatcacagaaggcaagaacccggacgtgctgacggttcaccccgattactttttgatcgatcccggcatcggccgttttctctaccgcctggcacgccgcgccgcaggcaaggcagaagccagatggttgttcaagacgatctacgaacgcagtggcagcgccggagagttcaagaagttctgtttcaccgtgcgcaagctgatcgggtcaaatgacctgccggagtacgatttgaaggaggaggcggggcaggctggcccgatcctagtcatgcgctaccgcaacctgatcgagggcgaagcatccgccggttcctaatgtacggagcagatgctagggcaaattgccctagcaggggaaaaaggtcgaaaaggtctctttcctgtggatagcacgtacattgggaacccaaagccgtacattgggaaccggaacccgtacattgggaacccaaagccgtacattgggaaccggtcacacatgtaagtgactgatataaaagagaaaaaaggcgatttttccgcctaaaactctttaaaacttattaaaactcttaaaacccgcctggcctgtgcataactgtctggccagcgcacagccgaagagctgcaaaaagcgcctacccttcggtcgctgcgctccctacgccccgccgcttcgcgtcggcctatcgcggccgctggccgctcaaaaatggctggcctacggccaggcaatctaccagggcgcggacaagccgcgccgtcgccactcgaccgccggcgcccacatcaaggcaccctgcctcgcgcgtttcggtgatgacggtgaaaacctctgacacatgcagctcccggagacggtcacagcttgtctgtaagcggatgccgggagcagacaagcccgtcagggcgcgtcagcgggtgttggcgggtgtcggggcgcagccatgacccagtcacgtagcgatagcggagtgtatactggcttaactatgcggcatcagagcagattgtactgagagtgcaccatatgcggtgtgaaataccgcacagatgcgtaaggagaaaataccgcatcaggcgctcttccgcttcctcgctcactgactcgctgcgctcggtcgttcggctgcggcgagcggtatcagctcactcaaaggcggtaatacggttatccacagaatcaggggataacgcaggaaagaacatgtgagcaaaaggccagcaaaaggccaggaaccgtaaaaaggccgcgttgctggcgtttttccataggctccgcccccctgacgagcatcacaaaaatcgacgctcaagtcagaggtggcgaaacccgacaggactataaagataccaggcgtttccccctggaagctccctcgtgcgctctcctgttccgaccctgccgcttaccggatacctgtccgcctttctcccttcgggaagcgtggcgctttctcatagctcacgctgtaggtatctcagttcggtgtaggtcgttcgctccaagctgggctgtgtgcacgaaccccccgttcagcccgaccgctgcgccttatccggtaactatcgtcttgagtccaacccggtaagacacgacttatcgccactggcagcagccactggtaacaggattagcagagcgaggtatgtaggcggtgctacagagttcttgaagtggtggcctaactacggctacactagaaggacagtatttggtatctgcgctctgctgaagccagttaccttcggaaaaagagttggtagctcttgatccggcaaacaaaccaccgctggtagcggtggtttttttgtttgcaagcagcagattacgcgcagaaaaaaaggatctcaagaagatcctttgatcttttctacggggtctgacgctcagtggaacgaaaactcacgttaagggattttggtcatgcattctaggtactaaaacaattcatccagtaaaatataatattttattttctcccaatcaggcttgatccccagtaagtcaaaaaatagctcgacatactgttcttccccgatatcctccctgatcgaccggacgcagaaggcaatgtcataccacttgtccgccctgccgcttctcccaagatcaataaagccacttactttgccatctttcacaaagatgttgctgtctcccaggtcgccgtgggaaaagacaagttcctcttcgggcttttccgtctttaaaaaatcatacagctcgcgcggatctttaaatggagtgtcttcttcccagttttcgcaatccacatcggccagatcgttattcagtaagtaatccaattcggctaagcggctgtctaagctattcgtatagggacaatccgatatgtcgatggagtgaaagagcctgatgcactccgcatacagctcgataatcttttcagggctttgttcatcttcatactcttccgagcaaaggacgccatcggcctcactcatgagcagattgctccagccatcatgccgttcaaagtgcaggacctttggaacaggcagctttccttccagccatagcatcatgtccttttcccgttccacatcataggtggtccctttataccggctgtccgtcatttttaaatataggttttcattttctcccaccagcttatataccttagcaggagacattccttccgtatcttttacgcagcggtatttttcgatcagttttttcaattccggtgatattctcattttagccatttattatttccttcctcttttctacagtatttaaagataccccaagaagctaattataacaagacgaactccaattcactgttccttgcattctaaaaccttaaataccagaaaacagctttttcaaagttgttttcaaagttggcgtataacatagtatcgacggagccgattttgaaaccgcggtgatcacaggcagcaacgctctgtcatcgttacaatcaacatgctaccctccgcgagatcatccgtgtttcaaacccggcagcttagttgccgttcttccgaatagcatcggtaacatgagcaaagtctgccgccttacaacggctctcccgctgacgccgtcccggactgatgggctgcctgtatcgagtggtgattttgtgccgagctgccggtcggggagctgttggctggctggtggcaggatatattgtggtgtaaacaaattgacgcttagacaacttaataacacattgcggacgtttttaatgtactgaattaacgccgaatta

SEQ ID NO: 50 - protein, 33 aa, Artificial sequence; identical to SEQ ID NO: 45
  Synthetic Construct

SEQ ID NO: 51 - DNA, 8588 bp, Artificial sequence
  plasmid VC-MME289-1qcz
gctttgggcggatcctctagaggacaatcagtaaattgaacggagaatattattcataaaaatacgatagtaacgggtgatatattcattagaatgaaccgaaaccggcggtaaggatctgagctacacatgctcaggttttttacaacgtgcacaacagaattgaaagcaaatatcatgcgatcataggcgtctcgcatatctcattaaagcagggcatgccggtcgagtcaaatctcggtgacgggcaggaccggacggggcggtaccggcaggctgaagtccagctgccagaaacccacgtcatgccagttcccgtgcttgaagccggccgcccgcagcatgccgcggggggcatatccgagcgcctcgtgcatgcgcacgctcgggtcgttgggcagcccgatgacagcgaccacgctcttgaagccctgtgcctccagggacttcagcaggtgggtgtagagcgtggagcccagtcccgtccgctggtggcggggggagacgtacacggtcgactcggccgtccagtcgtaggcgttgcgtgccttccaggggcccgcgtaggcgatgccggcgacctcgccgtccacctcggcgacgagccagggatagcgctcccgcagacggacgaggtcgtccgtccactcctgcggttcctgcggctcggtacggaagttgaccgtgcttgtctcgatgtagtggttgacgatggtgcagaccgccggcatgtccgcctcggtggcacggcggatgtcggccgggcgtcgttctgggctcatggtagactcgacggatccacgtgtggaagatatgaatttttttgagaaactagataagattaatgaatatcggtgttttggttttttcttgtggccgtctttgtttatattgagatttttcaaatcagtgcgcaagacgtgacgtaagtatccgagtcagtttttatttttctactaatttggtcgaatctagactgcagcaaatttacacattgccactaaacgtctaaacccttgtaatttgtttttgttttactatgtgtgttatgtatttgatttgcgataaatttttatatttggtactaaatttataacaccttttatgctaacgtttgccaacacttagcaatttgcaagttgattaattgattctaaattatttttgtcttctaaatacatatactaatcaactggaaatgtaaatatttgctaatatttctactataggagaattaaagtgagtgaatatggtaccacaaggtttggagatttaattgttgcaatgctgcatggatggcatatacaccaaacattcaataattcttgaggataataatggtaccacacaagatttgaggtgcatgaacgtcacgtggacaaaaggtttagtaatttttcaagacaacaatgttaccacacacaagttttgaggtgcatgcatggatgccctgtggaaagtttaaaaatattttggaaatgatttgcatggaagccatgtgtaaaaccatgacatccacttggaggatgcaataatgaagaaaactacaaatttacatgcaactagttatgcatgtagtctatataatgaggattttgcaatactttcattcatacacactcactaagttttacacgattataatttcttcatagccacccgggttgctcttccatggcaatgattaattaacgaagagcaagagctcgaatttccccgatcgttcaaacatttggcaataaagtttcttaagattgaatcctgttgccggtcttgcgatgattatcatataatttctgttgaattacgttaagcatgtaataattaacatgtaatgcatgacgttatttatgagatgggtttttatgattagagtcccgcaattatacatttaatacgcgatagaaaacaaaatatagcgcgcaaactaggataaattatcgcgcgcggtgtcatctatgttactagatcgggaattggcatgcaagcttggcactggccgtcgttttacaacgtcgtgactgggaaaaccctggcgttacccaacttaatcgccttgcagcacatccccctttcgccagctggcgtaatagcgaagaggcccgcaccgatcgcccttcccaacagttgcgcagcctgaatggcgaatgctagagcagcttgagcttggatcagattgtcgtttcccgccttcagtttaaactatcagtgtttgacaggatatattggcgggtaaacctaagagaaaagagcgtttattagaataatcggatatttaaaagggcgtgaaaaggtttatccgttcgtccatttgtatgtgcatgccaaccacagggttcccctcgggatcaaagtactttgatccaacccctccgctgctatagtgcagtcggcttctgacgttcagtgcagccgtcttctgaaaacgacatgtcgcacaagtcctaagttacgcgacaggctgccgccctgcccttttcctggcgttttcttgtcgcgtgttttagtcgcataaagtagaatacttgcgactagaaccggagacattacgccatgaacaagagcgccgccgctggcctgctgggctatgcccgcgtcagcaccgacgaccaggacttgaccaaccaacgggccgaactgcacgcggccggctgcaccaagctgttttccgagaagatcaccggcaccaggcgcgaccgcccggagctggccaggatgcttgaccacctacgccctggcgacgttgtgacagtgaccaggctagaccgcctggcccgcagcacccgcgacctactggacattgccgagcgcatccaggaggccggcgcgggcctgcgtagcctggcagagccgtgggccgacaccaccacgccggccggccgcatggtgttgaccgtgttcgccggcattgccgagttcgagcgttccctaatcatcgaccgcacccggagcgggcgcgaggccgccaaggcccgaggcgtgaagtttggcccccgccctaccctcaccccggcacagatcgcgcacgcccgcgagctgatcgaccaggaaggccgcaccgtgaaagaggcggctgcactgcttggcgtgcatcgctcgaccctgtaccgcgcacttgagcgcagcgaggaagtgacgcccaccgaggccaggcggcgcggtgccttccgtgaggacgcattgaccgaggccgacgccctggcggccgccgagaatgaacgccaagaggaacaagcatgaaaccgcaccaggacggccaggacgaaccgtttttcattaccgaagagatcgaggcggagatgatcgcggccgggtacgtgttcgagccgcccgcgcacgtctcaaccgtgcggctgcatgaaatcctggccggtttgtctgatgccaagctggcggcctggccggccagcttggccgctgaagaaaccgagcgccgccgtctaaaaaggtgatgtgtatttgagtaaaacagcttgcgtcatgcggtcgctgcgtatatgatgcgatgagtaaataaacaaatacgcaaggggaacgcatgaaggttatcgctgtacttaaccagaaaggcgggtcaggcaagacgaccatcgcaacccatctagcccgcgccctgcaactcgccggggccgatgttctgttagtcgattccgatccccagggcagtgcccgcgattgggcggccgtgcgggaagatcaaccgctaaccgttgtcggcatcgaccgcccgacgattgaccgcgacgtgaaggccatcggccggcgcgacttcgtagtgatcgacggagcgccccaggcggcggacttggctgtgtccgcgatcaaggcagccgacttcgtgctgattccggtgcagccaagcccttacgacatatgggccaccgccgacctggtggagctggttaagcagcgcattgaggtcacggatggaaggctacaagcggcctttgtcgtgtcgcgggcgatcaaaggcacgcgcatcggcggtgaggttgccgaggcgctggccgggtacgagctgcccattcttgagtcccgtatcacgcagcgcgtgagctacccaggcactgccgccgccggcacaaccgttcttgaatcagaacccgagggcgacgctgcccgcgaggtccaggcgctggccgctgaaattaaatcaaaactcatttgagttaatgaggtaaagagaaaatgagcaaaagcacaaacacgctaagtgccggccgtccgagcgcacgcagcagcaaggctgcaacgttggccagcctggcagacacgccagccatgaagcgggtcaactttcagttgccggcggaggatcacaccaagctgaagatgtacgcggtacgccaaggcaagaccattaccgagctgctatctgaatacatcgcgcagctaccagagtaaatgagcaaatgaataaatgagtagatgaattttagcggctaaaggaggcggcatggaaaatcaagaacaaccaggcaccgacgccgtggaatgccccatgtgtggaggaacgggcggttggccaggcgtaagcggctgggttgcctgccggccctgcaatggcactggaacccccaagcccgaggaatcggcgtgagcggtcgcaaaccatccggcccggtacaaatcggcgcggcgctgggtgatgacctggtggagaagttgaaggccgcgcaggccgcccagcggcaacgcatcgaggcagaagcacgccccggtgaatcgtggcaagcggccgctgatcgaatccgcaaagaatcccggcaaccgccggcagccggtgcgccgtcgattaggaagccgcccaagggcgacgagcaaccagattttttcgttccgatgctctatgacgtgggcacccgcgatagtcgcagcatcatggacgtggccgttttccgtctgtcgaagcgtgaccgacgagctggcgaggtgatccgctacgagcttccagacgggcacgtagaggtttccgcagggccggccggcatggccagtgtgtgggattacgacctggtactgatggcggtttcccatctaaccgaatccatgaaccgataccgggaagggaagggagacaagcccggccgcgtgttccgtccacacgttgcggacgtactcaagttctgccggcgagccgatggcggaaagcagaaagacgacctggtagaaacctgcattcggttaaacaccacgcacgttgccatgcagcgtacgaagaaggccaagaacggccgcctggtgacggtatccgagggtgaagccttgattagccgctacaagatcgtaaagagcgaaaccgggcggccggagtacatcgagatcgagctagctgattggatgtaccgcgagatcacagaaggcaagaacccggacgtgctgacggttcaccccgattactttttgatcgatcccggcatcggccgttttctctaccgcctggcacgccgcgccgcaggcaaggcagaagccagatggttgttcaagacgatctacgaacgcagtggcagcgccggagagttcaagaagttctgtttcaccgtgcgcaagctgatcgggtcaaatgacctgccggagtacgatttgaaggaggaggcggggcaggctggcccgatcctagtcatgcgctaccgcaacctgatcgagggcgaagcatccgccggttcctaatgtacggagcagatgctagggcaaattgccctagcaggggaaaaaggtcgaaaaggtctctttcctgtggatagcacgtacattgggaacccaaagccgtacattgggaaccggaacccgtacattgggaacccaaagccgtacattgggaaccggtcacacatgtaagtgactgatataaaagagaaaaaaggcgatttttccgcctaaaactctttaaaacttattaaaactcttaaaacccgcctggcctgtgcataactgtctggccagcgcacagccgaagagctgcaaaaagcgcctacccttcggtcgctgcgctccctacgccccgccgcttcgcgtcggcctatcgcggccgctggccgctcaaaaatggctggcctacggccaggcaatctaccagggcgcggacaagccgcgccgtcgccactcgaccgccggcgcccacatcaaggcaccctgcctcgcgcgtttcggtgatgacggtgaaaacctctgacacatgcagctcccggagacggtcacagcttgtctgtaagcggatgccgggagcagacaagcccgtcagggcgcgtcagcgggtgttggcgggtgtcggggcgcagccatgacccagtcacgtagcgatagcggagtgtatactggcttaactatgcggcatcagagcagattgtactgagagtgcaccatatgcggtgtgaaataccgcacagatgcgtaaggagaaaataccgcatcaggcgctcttccgcttcctcgctcactgactcgctgcgctcggtcgttcggctgcggcgagcggtatcagctcactcaaaggcggtaatacggttatccacagaatcaggggataacgcaggaaagaacatgtgagcaaaaggccagcaaaaggccaggaaccgtaaaaaggccgcgttgctggcgtttttccataggctccgcccccctgacgagcatcacaaaaatcgacgctcaagtcagaggtggcgaaacccgacaggactataaagataccaggcgtttccccctggaagctccctcgtgcgctctcctgttccgaccctgccgcttaccggatacctgtccgcctttctcccttcgggaagcgtggcgctttctcatagctcacgctgtaggtatctcagttcggtgtaggtcgttcgctccaagctgggctgtgtgcacgaaccccccgttcagcccgaccgctgcgccttatccggtaactatcgtcttgagtccaacccggtaagacacgacttatcgccactggcagcagccactggtaacaggattagcagagcgaggtatgtaggcggtgctacagagttcttgaagtggtggcctaactacggctacactagaaggacagtatttggtatctgcgctctgctgaagccagttaccttcggaaaaagagttggtagctcttgatccggcaaacaaaccaccgctggtagcggtggtttttttgtttgcaagcagcagattacgcgcagaaaaaaaggatctcaagaagatcctttgatcttttctacggggtctgacgctcagtggaacgaaaactcacgttaagggattttggtcatgcattctaggtactaaaacaattcatccagtaaaatataatattttattttctcccaatcaggcttgatccccagtaagtcaaaaaatagctcgacatactgttcttccccgatatcctccctgatcgaccggacgcagaaggcaatgtcataccacttgtccgccctgccgcttctcccaagatcaataaagccacttactttgccatctttcacaaagatgttgctgtctcccaggtcgccgtgggaaaagacaagttcctcttcgggcttttccgtctttaaaaaatcatacagctcgcgcggatctttaaatggagtgtcttcttcccagttttcgcaatccacatcggccagatcgttattcagtaagtaatccaattcggctaagcggctgtctaagctattcgtatagggacaatccgatatgtcgatggagtgaaagagcctgatgcactccgcatacagctcgataatcttttcagggctttgttcatcttcatactcttccgagcaaaggacgccatcggcctcactcatgagcagattgctccagccatcatgccgttcaaagtgcaggacctttggaacaggcagctttccttccagccatagcatcatgtccttttcccgttccacatcataggtggtccctttataccggctgtccgtcatttttaaatataggttttcattttctcccaccagcttatataccttagcaggagacattccttccgtatcttttacgcagcggtatttttcgatcagttttttcaattccggtgatattctcattttagccatttattatttccttcctcttttctacagtatttaaagataccccaagaagctaattataacaagacgaactccaattcactgttccttgcattctaaaaccttaaataccagaaaacagctttttcaaagttgttttcaaagttggcgtataacatagtatcgacggagccgattttgaaaccgcggtgatcacaggcagcaacgctctgtcatcgttacaatcaacatgctaccctccgcgagatcatccgtgtttcaaacccggcagcttagttgccgttcttccgaatagcatcggtaacatgagcaaagtctgccgccttacaacggctctcccgctgacgccgtcccggactgatgggctgcctgtatcgagtggtgattttgtgccgagctgccggtcggggagctgttggctggctggtggcaggatatattgtggtgtaaacaaattgacgcttagacaacttaataacacattgcggacgtttttaatgtactgaattaacgccgaattaa

SEQ ID NO: 52 - DNA, 9007 bp, Artificial sequence
  plasmid VC-MME464-1qcz
  5'UTR (1666)..(1830)
  transit_peptide (1831)..(1938)
  CDS (1831)..(1938)
  transit_peptide (2016)..(2084)
  CDS (2016)..(2084)
  CDS (2085)..(2093): adapter
gctttgggcggatcctctagaggacaatcagtaaattgaacggagaatattattcataaaaatacgatagtaacgggtgatatattcattagaatgaaccgaaaccggcggtaaggatctgagctacacatgctcaggttttttacaacgtgcacaacagaattgaaagcaaatatcatgcgatcataggcgtctcgcatatctcattaaagcagggcatgccggtcgagtcaaatctcggtgacgggcaggaccggacggggcggtaccggcaggctgaagtccagctgccagaaacccacgtcatgccagttcccgtgcttgaagccggccgcccgcagcatgccgcggggggcatatccgagcgcctcgtgcatgcgcacgctcgggtcgttgggcagcccgatgacagcgaccacgctcttgaagccctgtgcctccagggacttcagcaggtgggtgtagagcgtggagcccagtcccgtccgctggtggcggggggagacgtacacggtcgactcggccgtccagtcgtaggcgttgcgtgccttccaggggcccgcgtaggcgatgccggcgacctcgccgtccacctcggcgacgagccagggatagcgctcccgcagacggacgaggtcgtccgtccactcctgcggttcctgcggctcggtacggaagttgaccgtgcttgtctcgatgtagtggttgacgatggtgcagaccgccggcatgtccgcctcggtggcacggcggatgtcggccgggcgtcgttctgggctcatggtagactcgacggatccacgtgtggaagatatgaatttttttgagaaactagataagattaatgaatatcggtgttttggttttttcttgtggccgtctttgtttatattgagatttttcaaatcagtgcgcaagacgtgacgtaagtatccgagtcagtttttatttttctactaatttggtcgaatctagactgcagcaaatttacacattgccactaaacgtctaaacccttgtaatttgtttttgttttactatgtgtgttatgtatttgatttgcgataaatttttatatttggtactaaatttataacaccttttatgctaacgtttgccaacacttagcaatttgcaagttgattaattgattctaaattatttttgtcttctaaatacatatactaatcaactggaaatgtaaatatttgctaatatttctactataggagaattaaagtgagtgaatatggtaccacaaggtttggagatttaattgttgcaatgctgcatggatggcatatacaccaaacattcaataattcttgaggataataatggtaccacacaagatttgaggtgcatgaacgtcacgtggacaaaaggtttagtaatttttcaagacaacaatgttaccacacacaagttttgaggtgcatgcatggatgccctgtggaaagtttaaaaatattttggaaatgatttgcatggaagccatgtgtaaaaccatgacatccacttggaggatgcaataatgaagaaaactacaaatttacatgcaactagttatgcatgtagtctatataatgaggattttgcaatactttcattcatacacactcactaagttttacacgattataatttcttcatagccacccaaacgcataaacttatcttcatagttgccactccaatttgctccttgaatctcctccacccaatacataatccactcctccatcacccacttcactactaaatcaaacttaactctgtttttctctctcctcctttcatttcttattcttccaatcatcgtactccgccatgaccaccgctgtcaccgccgctgtttctttcccctctaccaaaaccacctctctctccgcccgaagctcctccgtcatttcccctgacaaaatcagctacaaaaaggtgattcccaatttcactgtgttttttattaataatttgttattttgatgatgagatgattaatttgggtgctgcaggttcctttgtactacaggaatgtatctgcaactgggaaaatgggacccatcagggcccagatcgcctcttgctcttccatggcaatgattaattaacgaagagcaagagctcgaatttccccgatcgttcaaacatttggcaataaagtttcttaagattgaatcctgttgccggtcttgcgatgattatcatataatttctgttgaattacgttaagcatgtaataattaacatgtaatgcatgacgttatttatgagatgggtttttatgattagagtcccgcaattatacatttaatacgcgatagaaaacaaaatatagcgcgcaaactaggataaattatcgcgcgcggtgtcatctatgttactagatcgggaattggcatgcaagcttggcactggccgtcgttttacaacgtcgtgactgggaaaaccctggcgttacccaacttaatcgccttgcagcacatccccctttcgccagctggcgtaatagcgaagaggcccgcaccgatcgcccttcccaacagttgcgcagcctgaatggcgaatgctagagcagcttgagcttggatcagattgtcgtttcccgccttcagtttaaactatcagtgtttgacaggatatattggcgggtaaacctaagagaaaagagcgtttattagaataatcggatatttaaaagggcgtgaaaaggtttatccgttcgtccatttgtatgtgcatgccaaccacagggttcccctcgggatcaaagtactttgatccaacccctccgctgctatagtgcagtcggcttctgacgttcagtgcagccgtcttctgaaaacgacatgtcgcacaagtcctaagttacgcgacaggctgccgccctgcccttttcctggcgttttcttgtcgcgtgttttagtcgcataaagtagaatacttgcgactagaaccggagacattacgccatgaacaagagcgccgccgctggcctgctgggctatgcccgcgtcagcaccgacgaccaggacttgaccaaccaacgggccgaactgcacgcggccggctgcaccaagctgttttccgagaagatcaccggcaccaggcgcgaccgcccggagctggccaggatgcttgaccacctacgccctggcgacgttgtgacagtgaccaggctagaccgcctggcccgcagcacccgcgacctactggacattgccgagcgcatccaggaggccggcgcgggcctgcgtagcctggcagagccgtgggccgacaccaccacgccggccggccgcatggtgttgaccgtgttcgccggcattgccgagttcgagcgttccctaatcatcgaccgcacccggagcgggcgcgaggccgccaaggcccgaggcgtgaagtttggcccccgccctaccctcaccccggcacagatcgcgcacgcccgcgagctgatcgaccaggaaggccgcaccgtgaaagaggcggctgcactgcttggcgtgcatcgctcgaccctgtaccgcgcacttgagcgcagcgaggaagtgacgcccaccgaggccaggcggcgcggtgccttccgtgaggacgcattgaccgaggccgacgccctggcggccgccgagaatgaacgccaagaggaacaagcatgaaaccgcaccaggacggccaggacgaaccgtttttcattaccgaagagatcgaggcggagatgatcgcggccgggtacgtgttcgagccgcccgcgcacgtctcaaccgtgcggctgcatgaaatcctggccggtttgtctgatgccaagctggcggcctggccggccagcttggccgctgaagaaaccgagcgccgccgtctaaaaaggtgatgtgtatttgagtaaaacagcttgcgtcatgcggtcgctgcgtatatgatgcgatgagtaaataaacaaatacgcaaggggaacgcatgaaggttatcgctgtacttaaccagaaaggcgggtcaggcaagacgaccatcgcaacccatctagcccgcgccctgcaactcgccggggccgatgttctgttagtcgattccgatccccagggcagtgcccgcgattgggcggccgtgcgggaagatcaaccgctaaccgttgtcggcatcgaccgcccgacgattgaccgcgacgtgaaggccatcggccggcgcgacttcgtagtgatcgacggagcgccccaggcggcggacttggctgtgtccgcgatcaaggcagccgacttcgtgctgattccggtgcagccaagcccttacgacatatgggccaccgccgacctggtggagctggttaagcagcgcattgaggtcacggatggaaggctacaagcggcctttgtcgtgtcgcgggcgatcaaaggcacgcgcatcggcggtgaggttgccgaggcgctggccgggtacgagctgcccattcttgagtcccgtatcacgcagcgcgtgagctacccaggcactgccgccgccggcacaaccgttcttgaatcagaacccgagggcgacgctgcccgcgaggtccaggcgctggccgctgaaattaaatcaaaactcatttgagttaatgaggtaaagagaaaatgagcaaaagcacaaacacgctaagtgccggccgtccgagcgcacgcagcagcaaggctgcaacgttggccagcctggcagacacgccagccatgaagcgggtcaactttcagttgccggcggaggatcacaccaagctgaagatgtacgcggtacgccaaggcaagaccattaccgagctgctatctgaatacatcgcgcagctaccagagtaaatgagcaaatgaataaatgagtagatgaattttagcggctaaaggaggcggcatggaaaatcaagaacaaccaggcaccgacgccgtggaatgccccatgtgtggaggaacgggcggttggccaggcgtaagcggctgggttgcctgccggccctgcaatggcactggaacccccaagcccgaggaatcggcgtgagcggtcgcaaaccatccggcccggtacaaatcggcgcggcgctgggtgatgacctggtggagaagttgaaggccgcgcaggccgcccagcggcaacgcatcgaggcagaagcacgccccggtgaatcgtggcaagcggccgctgatcgaatccgcaaagaatcccggcaaccgccggcagccggtgcgccgtcgattaggaagccgcccaagggcgacgagcaaccagattttttcgttccgatgctctatgacgtgggcacccgcgatagtcgcagcatcatggacgtggccgttttccgtctgtcgaagcgtgaccgacgagctggcgaggtgatccgctacgagcttccagacgggcacgtagaggtttccgcagggccggccggcatggccagtgtgtgggattacgacctggtactgatggcggtttcccatctaaccgaatccatgaaccgataccgggaagggaagggagacaagcccggccgcgtgttccgtccacacgttgcggacgtactcaagttctgccggcgagccgatggcggaaagcagaaagacgacctggtagaaacctgcattcggttaaacaccacgcacgttgccatgcagcgtacgaagaaggccaagaacggccgcctggtgacggtatccgagggtgaagccttgattagccgctacaagatcgtaaagagcgaaaccgggcggccggagtacatcgagatcgagctagctgattggatgtaccgcgagatcacagaaggcaagaacccggacgtgctgacggttcaccccgattactttttgatcgatcccggcatcggccgttttctctaccgcctggcacgccgcgccgcaggcaaggcagaagccagatggttgttcaagacgatctacgaacgcagtggcagcgccggagagttcaagaagttctgtttcaccgtgcgcaagctgatcgggtcaaatgacctgccggagtacgatttgaaggaggaggcggggcaggctggcccgatcctagtcatgcgctaccgcaacctgatcgagggcgaagcatccgccggttcctaatgtacggagcagatgctagggcaaattgccctagcaggggaaaaaggtcgaaaaggtctctttcctgtggatagcacgtacattgggaacccaaagccgtacattgggaaccggaacccgtacattgggaacccaaagccgtacattgggaaccggtcacacatgtaagtgactgatataaaagagaaaaaaggcgatttttccgcctaaaactctttaaaacttattaaaactcttaaaacccgcctggcctgtgcataactgtctggccagcgcacagccgaagagctgcaaaaagcgcctacccttcggtcgctgcgctccctacgccccgccgcttcgcgtcggcctatcgcggccgctggccgctcaaaaatggctggcctacggccaggcaatctaccagggcgcggacaagccgcgccgtcgccactcgaccgccggcgcccacatcaaggcaccctgcctcgcgcgtttcggtgatgacggtgaaaacctctgacacatgcagctcccggagacggtcacagcttgtctgtaagcggatgccgggagcagacaagcccgtcagggcgcgtcagcgggtgttggcgggtgtcggggcgcagccatgacccagtcacgtagcgatagcggagtgtatactggcttaactatgcggcatcagagcagattgtactgagagtgcaccatatgcggtgtgaaataccgcacagatgcgtaaggagaaaataccgcatcaggcgctcttccgcttcctcgctcactgactcgctgcgctcggtcgttcggctgcggcgagcggtatcagctcactcaaaggcggtaatacggttatccacagaatcaggggataacgcaggaaagaacatgtgagcaaaaggccagcaaaaggccaggaaccgtaaaaaggccgcgttgctggcgtttttccataggctccgcccccctgacgagcatcacaaaaatcgacgctcaagtcagaggtggcgaaacccgacaggactataaagataccaggcgtttccccctggaagctccctcgtgcgctctcctgttccgaccctgccgcttaccggatacctgtccgcctttctcccttcgggaagcgtggcgctttctcatagctcacgctgtaggtatctcagttcggtgtaggtcgttcgctccaagctgggctgtgtgcacgaaccccccgttcagcccgaccgctgcgccttatccggtaactatcgtcttgagtccaacccggtaagacacgacttatcgccactggcagcagccactggtaacaggattagcagagcgaggtatgtaggcggtgctacagagttcttgaagtggtggcctaactacggctacactagaaggacagtatttggtatctgcgctctgctgaagccagttaccttcggaaaaagagttggtagctcttgatccggcaaacaaaccaccgctggtagcggtggtttttttgtttgcaagcagcagattacgcgcagaaaaaaaggatctcaagaagatcctttgatcttttctacggggtctgacgctcagtggaacgaaaactcacgttaagggattttggtcatgcattctaggtactaaaacaattcatccagtaaaatataatattttattttctcccaatcaggcttgatccccagtaagtcaaaaaatagctcgacatactgttcttccccgatatcctccctgatcgaccggacgcagaaggcaatgtcataccacttgtccgccctgccgcttctcccaagatcaataaagccacttactttgccatctttcacaaagatgttgctgtctcccaggtcgccgtgggaaaagacaagttcctcttcgggcttttccgtctttaaaaaatcatacagctcgcgcggatctttaaatggagtgtcttcttcccagttttcgcaatccacatcggccagatcgttattcagtaagtaatccaattcggctaagcggctgtctaagctattcgtatagggacaatccgatatgtcgatggagtgaaagagcctgatgcactccgcatacagctcgataatcttttcagggctttgttcatcttcatactcttccgagcaaaggacgccatcggcctcactcatgagcagattgctccagccatcatgccgttcaaagtgcaggacctttggaacaggcagctttccttccagccatagcatcatgtccttttcccgttccacatcataggtggtccctttataccggctgtccgtcatttttaaatataggttttcattttctcccaccagcttatataccttagcaggagacattccttccgtatcttttacgcagcggtatttttcgatcagttttttcaattccggtgatattctcattttagccatttattatttccttcctcttttctacagtatttaaagataccccaagaagctaattataacaagacgaactccaattcactgttccttgcattctaaaaccttaaataccagaaaacagctttttcaaagttgttttcaaagttggcgtataacatagtatcgacggagccgattttgaaaccgcggtgatcacaggcagcaacgctctgtcatcgttacaatcaacatgctaccctccgcgagatcatccgtgtttcaaacccggcagcttagttgccgttcttccgaatagcatcggtaacatgagcaaagtctgccgccttacaacggctctcccgctgacgccgtcccggactgatgggctgcctgtatcgagtggtgattttgtgccgagctgccggtcggggagctgttggctggctggtggcaggatatattgtggtgtaaacaaattgacgcttagacaacttaataacacattgcggacgtttttaatgtactgaattaacgccgaattaa

SEQ ID NO: 53 - protein, 62 aa, Artificial sequence; identical to SEQ ID NO: 43
  Synthetic Construct

SEQ ID NO: 54 - DNA, 8678 bp, Artificial sequence
  plasmid VC-MME465-1qcz
  transit_peptide (1666)..(1755)
  CDS (1666)..(1755)
  CDS (1756)..(1764): adapter
gctttgggcggatcctctagaggacaatcagtaaattgaacggagaatattattcataaaaatacgatagtaacgggtgatatattcattagaatgaaccgaaaccggcggtaaggatctgagctacacatgctcaggttttttacaacgtgcacaacagaattgaaagcaaatatcatgcgatcataggcgtctcgcatatctcattaaagcagggcatgccggtcgagtcaaatctcggtgacgggcaggaccggacggggcggtaccggcaggctgaagtccagctgccagaaacccacgtcatgccagttcccgtgcttgaagccggccgcccgcagcatgccgcggggggcatatccgagcgcctcgtgcatgcgcacgctcgggtcgttgggcagcccgatgacagcgaccacgctcttgaagccctgtgcctccagggacttcagcaggtgggtgtagagcgtggagcccagtcccgtccgctggtggcggggggagacgtacacggtcgactcggccgtccagtcgtaggcgttgcgtgccttccaggggcccgcgtaggcgatgccggcgacctcgccgtccacctcggcgacgagccagggatagcgctcccgcagacggacgaggtcgtccgtccactcctgcggttcctgcggctcggtacggaagttgaccgtgcttgtctcgatgtagtggttgacgatggtgcagaccgccggcatgtccgcctcggtggcacggcggatgtcggccgggcgtcgttctgggctcatggtagactcgacggatccacgtgtggaagatatgaatttttttgagaaactagataagattaatgaatatcggtgttttggttttttcttgtggccgtctttgtttatattgagatttttcaaatcagtgcgcaagacgtgacgtaagtatccgagtcagtttttatttttctactaatttggtcgaatctagactgcagcaaatttacacattgccactaaacgtctaaacccttgtaatttgtttttgttttactatgtgtgttatgtatttgatttgcgataaatttttatatttggtactaaatttataacaccttttatgctaacgtttgccaacacttagcaatttgcaagttgattaattgattctaaattatttttgtcttctaaatacatatactaatcaactggaaatgtaaatatttgctaatatttctactataggagaattaaagtgagtgaatatggtaccacaaggtttggagatttaattgttgcaatgctgcatggatggcatatacaccaaacattcaataattcttgaggataataatggtaccacacaagatttgaggtgcatgaacgtcacgtggacaaaaggtttagtaatttttcaagacaacaatgttaccacacacaagttttgaggtgcatgcatggatgccctgtggaaagtttaaaaatattttggaaatgatttgcatggaagccatgtgtaaaaccatgacatccacttggaggatgcaataatgaagaaaactacaaatttacatgcaactagttatgcatgtagtctatataatgaggattttgcaatactttcattcatacacactcactaagttttacacgattataatttcttcatagccacccaaacatgcagaggtttttctccgccagatcgattctcggttacgccgtcaagacgcggaggaggtctttctcttctcgttcttcgtctctcctttgctcttccatggcaatgattaattaacgaagagcaagagctcgaatttccccgatcgttcaaacatttggcaataaagtttcttaagattgaatcctgttgccggtcttgcgatgattatcatataatttctgttgaattacgttaagcatgtaataattaacatgtaatgcatgacgttatttatgagatgggtttttatgattagagtcccgcaattatacatttaatacgcgatagaaaacaaaatatagcgcgcaaactaggataaattatcgcgcgcggtgtcatctatgttactagatcgggaattggcatgcaagcttggcactggccgtcgttttacaacgtcgtgactgggaaaaccctggcgttacccaacttaatcgccttgcagcacatccccctttcgccagctggcgtaatagcgaagaggcccgcaccgatcgcccttcccaacagttgcgcagcctgaatggcgaatgctagagcagcttgagcttggatcagattgtcgtttcccgccttcagtttaaactatcagtgtttgacaggatatattggcgggtaaacctaagagaaaagagcgtttattagaataatcggatatttaaaagggcgtgaaaaggtttatccgttcgtccatttgtatgtgcatgccaaccacagggttcccctcgggatcaaagtactttgatccaacccctccgctgctatagtgcagtcggcttctgacgttcagtgcagccgtcttctgaaaacgacatgtcgcacaagtcctaagttacgcgacaggctgccgccctgcccttttcctggcgttttcttgtcgcgtgttttagtcgcataaagtagaatacttgcgactagaaccggagacattacgccatgaacaagagcgccgccgctggcctgctgggctatgcccgcgtcagcaccgacgaccaggacttgaccaaccaacgggccgaactgcacgcggccggctgcaccaagctgttttccgagaagatcaccggcaccaggcgcgaccgcccggagctggccaggatgcttgaccacctacgccctggcgacgttgtgacagtgaccaggctagaccgcctggcccgcagcacccgcgacctactggacattgccgagcgcatccaggaggccggcgcgggcctgcgtagcctggcagagccgtgggccgacaccaccacgccggccggccgcatggtgttgaccgtgttcgccggcattgccgagttcgagcgttccctaatcatcgaccgcacccggagcgggcgcgaggccgccaaggcccgaggcgtgaagtttggcccccgccctaccctcaccccggcacagatcgcgcacgcccgcgagctgatcgaccaggaaggccgcaccgtgaaagaggcggctgcactgcttggcgtgcatcgctcgaccctgtaccgcgcacttgagcgcagcgaggaagtgacgcccaccgaggccaggcggcgcggtgccttccgtgaggacgcattgaccgaggccgacgccctggcggccgccgagaatgaacgccaagaggaacaagcatgaaaccgcaccaggacggccaggacgaaccgtttttcattaccgaagagatcgaggcggagatgatcgcggccgggtacgtgttcgagccgcccgcgcacgtctcaaccgtgcggctgcatgaaatcctggccggtttgtctgatgccaagctggcggcctggccggccagcttggccgctgaagaaaccgagcgccgccgtctaaaaaggtgatgtgtatttgagtaaaacagcttgcgtcatgcggtcgctgcgtatatgatgcgatgagtaaataaacaaatacgcaaggggaacgcatgaaggttatcgctgtacttaaccagaaaggcgggtcaggcaagacgaccatcgcaacccatctagcccgcgccctgcaactcgccggggccgatgttctgttagtcgattccgatccccagggcagtgcccgcgattgggcggccgtgcgggaagatcaaccgctaaccgttgtcggcatcgaccgcccgacgattgaccgcgacgtgaaggccatcggccggcgcgacttcgtagtgatcgacggagcgccccaggcggcggacttggctgtgtccgcgatcaaggcagccgacttcgtgctgattccggtgcagccaagcccttacgacatatgggccaccgccgacctggtggagctggttaagcagcgcattgaggtcacggatggaaggctacaagcggcctttgtcgtgtcgcgggcgatcaaaggcacgcgcatcggcggtgaggttgccgaggcgctggccgggtacgagctgcccattcttgagtcccgtatcacgcagcgcgtgagctacccaggcactgccgccgccggcacaaccgttcttgaatcagaacccgagggcgacgctgcccgcgaggtccaggcgctggccgctgaaattaaatcaaaactcatttgagttaatgaggtaaagagaaaatgagcaaaagcacaaacacgctaagtgccggccgtccgagcgcacgcagcagcaaggctgcaacgttggccagcctggcagacacgccagccatgaagcgggtcaactttcagttgccggcggaggatcacaccaagctgaagatgtacgcggtacgccaaggcaagaccattaccgagctgctatctgaatacatcgcgcagctaccagagtaaatgagcaaatgaataaatgagtagatgaattttagcggctaaaggaggcggcatggaaaatcaagaacaaccaggcaccgacgccgtggaatgccccatgtgtggaggaacgggcggttggccaggcgtaagcggctgggttgcctgccggccctgcaatggcactggaacccccaagcccgaggaatcggcgtgagcggtcgcaaaccatccggcccggtacaaatcggcgcggcgctgggtgatgacctggtggagaagttgaaggccgcgcaggccgcccagcggcaacgcatcgaggcagaagcacgccccggtgaatcgtggcaagcggccgctgatcgaatccgcaaagaatcccggcaaccgccggcagccggtgcgccgtcgattaggaagccgcccaagggcgacgagcaaccagattttttcgttccgatgctctatgacgtgggcacccgcgatagtcgcagcatcatggacgtggccgttttccgtctgtcgaagcgtgaccgacgagctggcgaggtgatccgctacgagcttccagacgggcacgtagaggtttccgcagggccggccggcatggccagtgtgtgggattacgacctggtactgatggcggtttcccatctaaccgaatccatgaaccgataccgggaagggaagggagacaagcccggccgcgtgttccgtccacacgttgcggacgtactcaagttctgccggcgagccgatggcggaaagcagaaagacgacctggtagaaacctgcattcggttaaacaccacgcacgttgccatgcagcgtacgaagaaggccaagaacggccgcctggtgacggtatccgagggtgaagccttgattagccgctacaagatcgtaaagagcgaaaccgggcggccggagtacatcgagatcgagctagctgattggatgtaccgcgagatcacagaaggcaagaacccggacgtgctgacggttcaccccgattactttttgatcgatcccggcatcggccgttttctctaccgcctggcacgccgcgccgcaggcaaggcagaagccagatggttgttcaagacgatctacgaacgcagtggcagcgccggagagttcaagaagttctgtttcaccgtgcgcaagctgatcgggtcaaatgacctgccggagtacgatttgaaggaggaggcggggcaggctggcccgatcctagtcatgcgctaccgcaacctgatcgagggcgaagcatccgccggttcctaatgtacggagcagatgctagggcaaattgccctagcaggggaaaaaggtcgaaaaggtctctttcctgtggatagcacgtacattgggaacccaaagccgtacattgggaaccggaacccgtacattgggaacccaaagccgtacattgggaaccggtcacacatgtaagtgactgatataaaagagaaaaaaggcgatttttccgcctaaaactctttaaaacttattaaaactcttaaaacccgcctggcctgtgcataactgtctggccagcgcacagccgaagagctgcaaaaagcgcctacccttcggtcgctgcgctccctacgccccgccgcttcgcgtcggcctatcgcggccgctggccgctcaaaaatggctggcctacggccaggcaatctaccagggcgcggacaagccgcgccgtcgccactcgaccgccggcgcccacatcaaggcaccctgcctcgcgcgtttcggtgatgacggtgaaaacctctgacacatgcagctcccggagacggtcacagcttgtctgtaagcggatgccgggagcagacaagcccgtcagggcgcgtcagcgggtgttggcgggtgtcggggcgcagccatgacccagtcacgtagcgatagcggagtgtatactggcttaactatgcggcatcagagcagattgtactgagagtgcaccatatgcggtgtgaaataccgcacagatgcgtaaggagaaaataccgcatcaggcgctcttccgcttcctcgctcactgactcgctgcgctcggtcgttcggctgcggcgagcggtatcagctcactcaaaggcggtaatacggttatccacagaatcaggggataacgcaggaaagaacatgtgagcaaaaggccagcaaaaggccaggaaccgtaaaaaggccgcgttgctggcgtttttccataggctccgcccccctgacgagcatcacaaaaatcgacgctcaagtcagaggtggcgaaacccgacaggactataaagataccaggcgtttccccctggaagctccctcgtgcgctctcctgttccgaccctgccgcttaccggatacctgtccgcctttctcccttcgggaagcgtggcgctttctcatagctcacgctgtaggtatctcagttcggtgtaggtcgttcgctccaagctgggctgtgtgcacgaaccccccgttcagcccgaccgctgcgccttatccggtaactatcgtcttgagtccaacccggtaagacacgacttatcgccactggcagcagccactggtaacaggattagcagagcgaggtatgtaggcggtgctacagagttcttgaagtggtggcctaactacggctacactagaaggacagtatttggtatctgcgctctgctgaagccagttaccttcggaaaaagagttggtagctcttgatccggcaaacaaaccaccgctggtagcggtggtttttttgtttgcaagcagcagattacgcgcagaaaaaaaggatctcaagaagatcctttgatcttttctacggggtctgacgctcagtggaacgaaaactcacgttaagggattttggtcatgcattctaggtactaaaacaattcatccagtaaaatataatattttattttctcccaatcaggcttgatccccagtaagtcaaaaaatagctcgacatactgttcttccccgatatcctccctgatcgaccggacgcagaaggcaatgtcataccacttgtccgccctgccgcttctcccaagatcaataaagccacttactttgccatctttcacaaagatgttgctgtctcccaggtcgccgtgggaaaagacaagttcctcttcgggcttttccgtctttaaaaaatcatacagctcgcgcggatctttaaatggagtgtcttcttcccagttttcgcaatccacatcggccagatcgttattcagtaagtaatccaattcggctaagcggctgtctaagctattcgtatagggacaatccgatatgtcgatggagtgaaagagcctgatgcactccgcatacagctcgataatcttttcagggctttgttcatcttcatactcttccgagcaaaggacgccatcggcctcactcatgagcagattgctccagccatcatgccgttcaaagtgcaggacctttggaacaggcagctttccttccagccatagcatcatgtccttttcccgttccacatcataggtggtccctttataccggctgtccgtcatttttaaatataggttttcattttctcccaccagcttatataccttagcaggagacattccttccgtatcttttacgcagcggtatttttcgatcagttttttcaattccggtgatattctcattttagccatttattatttccttcctcttttctacagtatttaaagataccccaagaagctaattataacaagacgaactccaattcactgttccttgcattctaaaaccttaaataccagaaaacagctttttcaaagttgttttcaaagttggcgtataacatagtatcgacggagccgattttgaaaccgcggtgatcacaggcagcaacgctctgtcatcgttacaatcaacatgctaccctccgcgagatcatccgtgtttcaaacccggcagcttagttgccgttcttccgaatagcatcggtaacatgagcaaagtctgccgccttacaacggctctcccgctgacgccgtcccggactgatgggctgcctgtatcgagtggtgattttgtgccgagctgccggtcggggagctgttggctggctggtggcaggatatattgtggtgtaaacaaattgacgcttagacaacttaataacacattgcggacgtttttaatgtactgaattaacgccgaattaa

SEQ ID NO: 55 - protein, 33 aa, Artificial sequence; identical to SEQ ID NO: 45
  Synthetic Construct

SEQ ID NO: 56 - DNA, 9043 bp, Artificial sequence
  plasmid VC-MME489-1QCZ
agctttgggcggatcctctagaggacaatcagtaaattgaacggagaatattattcataaaaatacgatagtaacgggtgatatattcattagaatgaaccgaaaccggcggtaaggatctgagctacacatgctcaggttttttacaacgtgcacaacagaattgaaagcaaatatcatgcgatcataggcgtctcgcatatctcattaaagcagggcatgccggtcgagtcaaatctcggtgacgggcaggaccggacggggcggtaccggcaggctgaagtccagctgccagaaacccacgtcatgccagttcccgtgcttgaagccggccgcccgcagcatgccgcggggggcatatccgagcgcctcgtgcatgcgcacgctcgggtcgttgggcagcccgatgacagcgaccacgctcttgaagccctgtgcctccagggacttcagcaggtgggtgtagagcgtggagcccagtcccgtccgctggtggcggggggagacgtacacggtcgactcggccgtccagtcgtaggcgttgcgtgccttccaggggcccgcgtaggcgatgccggcgacctcgccgtccacctcggcgacgagccagggatagcgctcccgcagacggacgaggtcgtccgtccactcctgcggttcctgcggctcggtacggaagttgaccgtgcttgtctcgatgtagtggttgacgatggtgcagaccgccggcatgtccgcctcggtggcacggcggatgtcggccgggcgtcgttctgggctcatggtagactcgacggatccacgtgtggaagatatgaatttttttgagaaactagataagattaatgaatatcggtgttttggttttttcttgtggccgtctttgtttatattgagatttttcaaatcagtgcgcaagacgtgacgtaagtatccgagtcagtttttatttttctactaatttggtcgaatctagattcgacggtatcgataagctcgcggatccctgaaagcgacgttggatgttaacatctacaaattgccttttcttatcgaccatgtacgtaagcgcttacgtttttggtggacccttgaggaaactggtagctgttgtgggcctgtggtctcaagatggatcattaatttccaccttcacctacgatggggggcatcgcaccggtgagtaatattgtacggctaagagcgaatttggcctgtaggatccctgaaagcgacgttggatgttaacatctacaaattgccttttcttatcgaccatgtacgtaagcgcttacgtttttggtggacccttgaggaaactggtagctgttgtgggcctgtggtctcaagatggatcattaatttccaccttcacctacgatggggggcatcgcaccggtgagtaatattgtacggctaagagcgaatttggcctgtaggatccctgaaagcgacgttggatgttaacatctacaaattgccttttcttatcgaccatgtacgtaagcgcttacgtttttggtggacccttgaggaaactggtagctgttgtgggcctgtggtctcaagatggatcattaatttccaccttcacctacgatggggggcatcgcaccggtgagtaatattgtacggctaagagcgaatttggcctgtaggatccgcgagctggtcaatcccattgcttttgaagcagctcaacattgatctctttctcgatcgagggagatttttcaaatcagtgcgcaagacgtgacgtaagtatccgagtcagtttttatttttctactaatttggtcgtttatttcggcgtgtaggacatggcaaccgggcctgaatttcgcgggtattctgtttctattccaactttttcttgatccgcagccattaacgacttttgaatagatacgctgacacgccaagcctcgctagtcaaaagtgtaccaaacaacgctttacagcaagaacggaatgcgcgtgacgctcgcggtgacgccatttcgccttttcagaaatggataaatagccttgcttcctattatatcttcccaaattaccaatacattacactagcatctgaatttcataaccaatctcgatacaccaaatcgaagatctccctggaattccagctgaccaccatggcaattcccggggatcagctcgaatttccccgatcgttcaaacatttggcaataaagtttcttaagattgaatcctgttgccggtcttgcgatgattatcatataatttctgttgaattacgttaagcatgtaataattaacatgtaatgcatgacgttatttatgagatgggtttttatgattagagtcccgcaattatacatttaatacgcgatagaaaacaaaatatagcgcgcaaactaggataaattatcgcgcgcggtgtcatctatgttactagatcgggaattggcatgcaagcttggcactggccgtcgttttacaacgtcgtgactgggaaaaccctggcgttacccaacttaatcgccttgcagcacatccccctttcgccagctggcgtaatagcgaagaggcccgcaccgatcgcccttcccaacagttgcgcagcctgaatggcgaatgctagagcagcttgagcttggatcagattgtcgtttcccgccttcagtttaaactatcagtgtttgacaggatatattggcgggtaaacctaagagaaaagagcgtttattagaataatcggatatttaaaagggcgtgaaaaggtttatccgttcgtccatttgtatgtgcatgccaaccacagggttcccctcgggatcaaagtactttgatccaacccctccgctgctatagtgcagtcggcttctgacgttcagtgcagccgtcttctgaaaacgacatgtcgcacaagtcctaagttacgcgacaggctgccgccctgcccttttcctggcgttttcttgtcgcgtgttttagtcgcataaagtagaatacttgcgactagaaccggagacattacgccatgaacaagagcgccgccgctggcctgctgggctatgcccgcgtcagcaccgacgaccaggacttgaccaaccaacgggccgaactgcacgcggccggctgcaccaagctgttttccgagaagatcaccggcaccaggcgcgaccgcccggagctggccaggatgcttgaccacctacgccctggcgacgttgtgacagtgaccaggctagaccgcctggcccgcagcacccgcgacctactggacattgccgagcgcatccaggaggccggcgcgggcctgcgtagcctggcagagccgtgggccgacaccaccacgccggccggccgcatggtgttgaccgtgttcgccggcattgccgagttcgagcgttccctaatcatcgaccgcacccggagcgggcgcgaggccgccaaggcccgaggcgtgaagtttggcccccgccctaccctcaccccggcacagatcgcgcacgcccgcgagctgatcgaccaggaaggccgcaccgtgaaagaggcggctgcactgcttggcgtgcatcgctcgaccctgtaccgcgcacttgagcgcagcgaggaagtgacgcccaccgaggccaggcggcgcggtgccttccgtgaggacgcattgaccgaggccgacgccctggcggccgccgagaatgaacgccaagaggaacaagcatgaaaccgcaccaggacggccaggacgaaccgtttttcattaccgaagagatcgaggcggagatgatcgcggccgggtacgtgttcgagccgcccgcgcacgtctcaaccgtgcggctgcatgaaatcctggccggtttgtctgatgccaagctggcggcctggccggccagcttggccgctgaagaaaccgagcgccgccgtctaaaaaggtgatgtgtatttgagtaaaacagcttgcgtcatgcggtcgctgcgtatatgatgcgatgagtaaataaacaaatacgcaaggggaacgcatgaaggttatcgctgtacttaaccagaaaggcgggtcaggcaagacgaccatcgcaacccatctagcccgcgccctgcaactcgccggggccgatgttctgttagtcgattccgatccccagggcagtgcccgcgattgggcggccgtgcgggaagatcaaccgctaaccgttgtcggcatcgaccgcccgacgattgaccgcgacgtgaaggccatcggccggcgcgacttcgtagtgatcgacggagcgccccaggcggcggacttggctgtgtccgcgatcaaggcagccgacttcgtgctgattccggtgcagccaagcccttacgacatatgggccaccgccgacctggtggagctggttaagcagcgcattgaggtcacggatggaaggctacaagcggcctttgtcgtgtcgcgggcgatcaaaggcacgcgcatcggcggtgaggttgccgaggcgctggccgggtacgagctgcccattcttgagtcccgtatcacgcagcgcgtgagctacccaggcactgccgccgccggcacaaccgttcttgaatcagaacccgagggcgacgctgcccgcgaggtccaggcgctggccgctgaaattaaatcaaaactcatttgagttaatgaggtaaagagaaaatgagcaaaagcacaaacacgctaagtgccggccgtccgagcgcacgcagcagcaaggctgcaacgttggccagcctggcagacacgccagccatgaagcgggtcaactttcagttgccggcggaggatcacaccaagctgaagatgtacgcggtacgccaaggcaagaccattaccgagctgctatctgaatacatcgcgcagctaccagagtaaatgagcaaatgaataaatgagtagatgaattttagcggctaaaggaggcggcatggaaaatcaagaacaaccaggcaccgacgccgtggaatgccccatgtgtggaggaacgggcggttggccaggcgtaagcggctgggttgtctgccggccctgcaatggcactggaacccccaagcccgaggaatcggcgtgacggtcgcaaaccatccggcccggtacaaatcggcgcggcgctgggtgatgacctggtggagaagttgaaggccgcgcaggccgcccagcggcaacgcatcgaggcagaagcacgccccggtgaatcgtggcaagcggccgctgatcgaatccgcaaagaatcccggcaaccgccggcagccggtgcgccgtcgattaggaagccgcccaagggcgacgagcaaccagattttttcgttccgatgctctatgacgtgggcacccgcgatagtcgcagcatcatggacgtggccgttttccgtctgtcgaagcgtgaccgacgagctggcgaggtgatccgctacgagcttccagacgggcacgtagaggtttccgcagggccggccggcatggccagtgtgtgggattacgacctggtactgatggcggtttcccatctaaccgaatccatgaaccgataccgggaagggaagggagacaagcccggccgcgtgttccgtccacacgttgcggacgtactcaagttctgccggcgagccgatggcggaaagcagaaagacgacctggtagaaacctgcattcggttaaacaccacgcacgttgccatgcagcgtacgaagaaggccaagaacggccgcctggtgacggtatccgagggtgaagccttgattagccgctacaagatcgtaaagagcgaaaccgggcggccggagtacatcgagatcgagctagctgattggatgtaccgcgagatcacagaaggcaagaacccggacgtgctgacggttcaccccgattactttttgatcgatcccggcatcggccgttttctctaccgcctggcacgccgcgccgcaggcaaggcagaagccagatggttgttcaagacgatctacgaacgcagtggcagcgccggagagttcaagaagttctgtttcaccgtgcgcaagctgatcgggtcaaatgacctgccggagtacgatttgaaggaggaggcggggcaggctggcccgatcctagtcatgcgctaccgcaacctgatcgagggcgaagcatccgccggttcctaatgtacggagcagatgctagggcaaattgccctagcaggggaaaaaggtcgaaaaggtctctttcctgtggatagcacgtacattgggaacccaaagccgtacattgggaaccggaacccgtacattgggaacccaaagccgtacattgggaaccggtcacacatgtaagtgactgatataaaagagaaaaaaggcgatttttccgcctaaaactctttaaaacttattaaaactcttaaaacccgcctggcctgtgcataactgtctggccagcgcacagccgaagagctgcaaaaagcgcctacccttcggtcgctgcgctccctacgccccgccgcttcgcgtcggcctatcgcggccgctggccgctcaaaaatggctggcctacggccaggcaatctaccagggcgcggacaagccgcgccgtcgccactcgaccgccggcgcccacatcaaggcaccctgcctcgcgcgtttcggtgatgacggtgaaaacctctgacacatgcagctcccggagacggtcacagcttgtctgtaagcggatgccgggagcagacaagcccgtcagggcgcgtcagcgggtgttggcgggtgtcggggcgcagccatgacccagtcacgtagcgatagcggagtgtatactggcttaactatgcggcatcagagcagattgtactgagagtgcaccatatgcggtgtgaaataccgcacagatgcgtaaggagaaaataccgcatcaggcgctcttccgcttcctcgctcactgactcgctgcgctcggtcgttcggctgcggcgagcggtatcagctcactcaaaggcggtaatacggttatccacagaatcaggggataacgcaggaaagaacatgtgagcaaaaggccagcaaaaggccaggaaccgtaaaaaggccgcgttgctggcgtttttccataggctccgcccccctgacgagcatcacaaaaatcgacgctcaagtcagaggtggcgaaacccgacaggactataaagataccaggcgtttccccctggaagctccctcgtgcgctctcctgttccgaccctgccgcttaccggatacctgtccgcctttctcccttcgggaagcgtggcgctttctcatagctcacgctgtaggtatctcagttcggtgtaggtcgttcgctccaagctgggctgtgtgcacgaaccccccgttcagcccgaccgctgcgccttatccggtaactatcgtcttgagtccaacccggtaagacacgacttatcgccactggcagcagccactggtaacaggattagcagagcgaggtatgtaggcggtgctacagagttcttgaagtggtggcctaactacggctacactagaaggacagtatttggtatctgcgctctgctgaagccagttaccttcggaaaaagagttggtagctcttgatccggcaaacaaaccaccgctggtagcggtggtttttttgtttgcaagcagcagattacgcgcagaaaaaaaggatctcaagaagatcctttgatcttttctacggggtctgacgctcagtggaacgaaaactcacgttaagggattttggtcatgcattctaggtactaaaacaattcatccagtaaaatataatattttattttctcccaatcaggcttgatccccagtaagtcaaaaaatagctcgacatactgttcttccccgatatcctccctgatcgaccggacgcagaaggcaatgtcataccacttgtccgccctgccgcttctcccaagatcaataaagccacttactttgccatctttcacaaagatgttgctgtctcccaggtcgccgtgggaaaagacaagttcctcttcgggcttttccgtctttaaaaaatcatacagctcgcgcggatctttaaatggagtgtcttcttcccagttttcgcaatccacatcggccagatcgttattcagtaagtaatccaattcggctaagcggctgtctaagctattcgtatagggacaatccgatatgtcgatggagtgaaagagcctgatgcactccgcatacagctcgataatcttttcagggctttgttcatcttcatactcttccgagcaaaggacgccatcggcctcactcatgagcagattgctccagccatcatgccgttcaaagtgcaggacctttggaacaggcagctttccttccagccatagcatcatgtccttttcccgttccacatcataggtggtccctttataccggctgtccgtcatttttaaatataggttttcattttctcccaccagcttatataccttagcaggagacattccttccgtatcttttacgcagcggtatttttcgatcagttttttcaattccggtgatattctcattttagccatttattatttccttcctcttttctacagtatttaaagataccccaagaagctaattataacaagacgaactccaattcactgttccttgcattctaaaaccttaaataccagaaaacagctttttcaaagttgttttcaaagttggcgtataacatagtatcgacggagccgattttgaaaccgcggtgatcacaggcagcaacgctctgtcatcgttacaatcaacatgctaccctccgcgagatcatccgtgtttcaaacccggcagcttagttgccgttcttccgaatagcatcggtaacatgagcaaagtctgccgccttacaacggctctcccgctgacgccgtcccggactgatgggctgcctgtatcgagtggtgattttgtgccgagctgccggtcggggagctgttggctggctggtggcaggatatattgtggtgtaaacaaattgacgcttagacaacttaataacacattgcggacgtttttaatgtactgaattaacgccgaatta

SEQ ID NO: 57 - DNA, 29 bp, Artificial sequence
  amplification of the targeting sequence of the gene IVD from Arabidopsis thaliana to generate targeting vectors
atagaattcatgcagaggtttttctccgc

SEQ ID NO: 58 - DNA, 29 bp, Artificial sequence
  amplification of the targeting sequence of the gene IVD from Arabidopsis thaliana to generate targeting vectors
atagaattccgaagaacgagaagagaaag

SEQ ID NO: 59 - DNA, 31 bp, Artificial sequence
  amplification of the targeting sequence of the gene IVD from Arabidopsis thaliana to generate targeting vectors
atagtttaaacatgcagaggtttttctccgc

SEQ ID NO: 60 - DNA, 36 bp, Artificial sequence
  amplification of the targeting sequence of the gene IVD from Arabidopsis thaliana to generate targeting vectors
ataccatggaagagcaaaggagagacgaagaacgag

SEQ ID NO: 61 - DNA, 81 bp, Arabidopsis thaliana
atgcagaggtttttctccgccagatcgattctcggttacgccgtcaagacgcggaggaggtctttctcttctcgttcttcg

SEQ ID NO: 62 - DNA, 89 bp, Arabidopsis thaliana
atgcagaggtttttctccgccagatcgattctcggttacgccgtcaagacgcggaggaggtctttctcttctcgttcttcgtctctcct

SEQ ID NO: 63 - DNA, 855 bp, Arabidopsis thaliana
  CDS (1)..(855)
atggagtcatcacttccccaagttgctgcacttgatcgttcaactctactcaaagctttcgacgagactaaaaccggcgtgaaaggccttatcgacgccggaatcacagagattccttcgatatttcgtgcacctccggctactttaacaagtccaaaaccaccttcctcctctgatttctccatccccacaatcgatctcaaaggaggtggcacggactcgatcacgcggcggagcttggtggagaagatcggagacgcggcagagaaatggggatttttccaggtgatcaaccacgggatcccgatggatgtgttggagaagatgatagatgggattcgtgagtttcacgagcaagacactgaagtgaagaaagggttttactctcgagatccagctagtaagatggtatacagcagcaacttcgatctgtttagctcaccggcggcgaattggagagatacacttggttgttatacagcaccagatcccccgagaccggaggacttacccgccacttgtggggagatgatgattgagtactcaaaggaagtgatgaaattgggtaaattactcttcgagcttctctcggaagctctagggttaaacactaatcacctcaaggacatggattgcactaactccttgctgttgctcggccattattacccgccatgtccccaacccgaccttactctaggcttaacgaaacactccgacaactcttttctcactattcttcttcaagaccatatcggagggcttcaagttcttcatgaccaatattgggttgatgttcctcctgtccctggagctcttgttgttaacgttggagatcttcttcaggctaactaa

SEQ ID NO: 64 - protein, 284 aa, Arabidopsis thaliana
MESSLPQVAALDRSTLLKAFDETKTGVKGLIDAGITEIPSIFRAPPATLTSPKPPSSSDFSIPTIDLKGGGTDSITRRSLVEKIGDAAEKWGFFQVINHGIPMDVLEKMIDGIREFHEQDTEVKKGFYSRDPASKMVYSSNFDLFSSPAANWRDTLGCYTAPDPPRPEDLPATCGEMMIEYSKEVMKLGKLLFELLSEALGLNTNHLKDMDCTNSLLLLGHYYPPCPQPDLTLGLTKHSDNSFLTILLQDHIGGLQVLHDQYWVDVPPVPGALVVNVGDLLQAN

SEQ ID NO: 65 - DNA, 1315 bp, Zea mays
  CDS (68)..(1219)
cccaaacaaccacactgacatctcatcttgatccatccagctttgcctcgatcgccggccggtagccatgtcccccacggaagaagccgctggtggtggtggcgacgactatgaccgcttgagcgagctgaaggcgttcgacgacagcaaggccggcgtcaagggcctcgtggacgctggcgtcacgaccatccctgccatcttccgcggccatctccttcaggaagggccgaaggtatcgtcctctagcagtagcagcagtactagtcttagcattatcccggtcatcgacctctcggcggcggacgcagtcgcacgggaggaggtggtcgcccagttgaaggctgcagccgagacggtggggttcttccagctggtgaaccacggcgttcccagcgagctcctgtgcgagatgctggcgtcggtgaggcggttcaacgaggagccccacgaggtgaagcggccctactacacgcgggacgcacgtcgcaaggtgcggttcaactccaacttcgatctgttccagtcgccggcggccaactggcgcgacacgctcttctgcgaggcagcgccggagccgccgcgggcggaggagctgccggtcgccgtcaggcacgtgatgctggagtacggcggcgcggtgcgggaggtggcggcgcgcgtgctggggctgctctcggaggccctggggctgagccccgggcacctcgcagggatggggtgcgcggagggcctcagcctggtgtgcaactactacccgccgtgcccggaaccggacctcaccctgggctgcagcaggcactcggaccccagcttcctgaccgtgctgctgcaggactcgcatgcgcagggcggcctgcaggcgctcctcgcatccaggtggctggacgtgcctccggtggccggcgcgctcctggtgaacgtcggagaccttctccagctggtcagcaacgggcggttcaagagcgtggagcaccgggtggtggctaaccggagcagggacacggcgagagtgtcagtggcgtgcttctgcaacgcggacatcgcgagatccacgaggctgtatggacccatcgcggagctcatcgccgcggacgacagcgacggcgcgggaagggcgctgtacaggaacgtgacggtcccggagttcctagcgcactacgacaagaaaggcctcgacggtcgcccggcgctccaccgcttccagctgcttcaataattttacatcacatcagtcctgactctggtgatatcatgtcagtatgtcactgtgggctactccggtactctaatacagttatggatggatcagatc

SEQ ID NO: 66 - protein, 383 aa, Zea mays
MSPTEEAAGGGGDDYDRLSELKAFDDSKAGVKGLVDAGVTTIPAIFRGHLLQEGPKVSSSSSSSSTSLSIIPVIDLSAADAVAREEVVAQLKAAAETVGFFQLVNHGVPSELLCEMLASVRRFNEEPHEVKRPYYTRDARRKVRFNSNFDLFQSPAANWRDTLFCEAAPEPPRAEELPVAVRHVMLEYGGAVREVAARVLGLLSEALGLSPGHLAGMGCAEGLSLVCNYYPPCPEPDLTLGCSRHSDPSFLTVLLQDSHAQGGLQALLASRWLDVPPVAGALLVNVGDLLQLVSNGRFKSVEHRVVANRSRDTARVSVACFCNADIARSTRLYGPIAELIAADDSDGAGRALYRNVTVPEFLAHYDKKGLDGRPALHRFQLLQ

SEQ ID NO: 67 - DNA, 1399 bp, Triticum aestivum
  CDS (72)..(1193)
ccaacacttgccttgcattgttaatgcgtgcggctgcagcgggcatagatcgaatataattgagatcgtcaatgccttccacagaatcggccgccggcgtggcctgggaccgccggcgtgagctgcaggcgtttgacgacaccaaggcgggcgtcaagggcctcgtggacgccggcgtcacggccctcccgcccatcttccgccactcgccggagtccctggagagcatcacgtcctcaaaccatgtcgcgggggccatcccgaccgtcgacctagcggccccgcgacgcgaggacgcggtcgccctggtgcggcacgcggccaggacggtgggcttctttcaggtggtcaaccatggcgtgccggccgagctcatggccggcatgctcgagggggtgcgccggttcaacgagggacccgccgaggcgaagcaggccatctacagcagggaccaagctcgcaaggtgcgtttcgcctccaacttcgacctcttctcgtcggcggcggccaactggcgcgacaccctcttcttccacctcgctccggacccggcaccttccgaagagctgcccgaggctgtcagggatgtggtcacggagtacggccacgcggtgaccaaggtggggctgtccgtgctggagctgctgtcggagtcccttggcctgagcagcgaccacctgcgcgacatggactgcgcggagaacctcaacgccgtgtgccaatactacccaccgtgtccggagccgtatctcacttggggcaccaagaggcacaccgacccgggcttcctcaccgtcctcctgcaagacggcatgggcggcctccaggtgctcgtcgacggcaagacctgggtggatgtccctcccgtgcccggcgctttcatcatcaacatcggcgaccttcttcagctcgtcagcaatgaccagttcaggagcgtggagcaccgagtcctggcgaacaagagcaaagacaccgctagggtctctgtggcgtccttcttcaacaccaacattgagagatcgacgaggttgtatggccccatcaccgatggacgcaaccccccgatctacaggagcgtcaccgctagagagttcatcgcaacgtttaatcgcataggccttgatggtcgctcgctcgaccagtaccggttggaccgggatactcccacacctgccgtggaggggtgtgaatgaagcgggcatttccgtttctttataatttatttgcaagtttaaatttaagcattttcaaataagggaacgtactcgctttctcaactaaagtgtcagaaccgtggacaaaagtctctcgctccaccaaagtatgagcagcaccacaaaagtgagagactgttggaaagatgccccagacgcaataataaagttattaagtattatcc

SEQ ID NO: 68 - protein, 373 aa, Triticum aestivum
MPSTESAAGVAWDRRRELQAFDDTKAGVKGLVDAGVTALPPIFRHSPESLESITSSNHVAGAIPTVDLAAPRREDAVALVRHAARTVGFFQVVNHGVPAELMAGMLEGVRRFNEGPAEAKQAIYSRDQARKVRFASNFDLFSSAAANWRDTLFFHLAPDPAPSEELPEAVRDVVTEYGHAVTKVGLSVLELLSESLGLSSDHLRDMDCAENLNAVCQYYPPCPEPYLTWGTKRHTDPGFLTVLLQDGMGGLQVLVDGKTWVDVPPVPGAFIINIGDLLQLVSNDQFRSVEHRVLANKSKDTARVSVASFFNTNIERSTRLYGPITDGRNPPIYRSVTAREFIATFNRIGLDGRSLDQYRLDRDTPTPAVEGCE

SEQ ID NO: 69 - DNA, 1101 bp, Brassica napus
  CDS (1)..(1101)
atggtgaccaaaaactctgttgaattcgatccgtatatcgaacgaaaggctttcgatgagacgcaagaaggagtcaaagggctggtcgacgccaaaatcgccgaagtccctcgtatcttccacattcctcaagcttccttgaccgaaaagaaaccttctgtctctgtttcagatctagagatccctatcatcgactttgcaagcgtccacgtggacacagcgtcacgtgaagccgtggtagagaaggttaaatacgcggcggagaagtggggattcttccaggtcatcaaccatggtgttcctttgaacgttcttgaagagattcaagatggagttcgtaggtttcacgaggaagatcctgaggtcaagaaacaatacttctcccgtgataacgccaacaaaaagtttgtctacaatagtaactttgatctatacagttcctcgccatctgttaactggagagatactttcacttgttacctagctccagatcctccatctcctgaggaactcccagtgacttgcagggatgctgtgttcgaatactcaaaacatgtgatgagtttaggtggtttactctgcgaacttttttcagaagcactaggtctagaatctgagatacttaagagcaaggggtgcttgaagactttgtttatggtctgccattattacccaccttgtccaaaacctgacctaactttggggataagtaaacactcagacaactccttcctcacggttcttcttcaagacaacatcggtggtctacaaattcttcatcaagactcttgggttgatgtggctcctcttcctggatctctcgtcatcaacattggagatttcttgcagctgataacgaacgataagtttgtaagtttggagcatagagtgcttgcgaatagacaaggaccaaggatttcaattgcatgcttttttagctcaagtaaacatgccaattccacagtttatggaccaatgaaagagcttgtgtctgaagaaaaccctccaaaatacagagacattaccataaaagaatacacagaaggatactttgagaaaggtctggatggaacatcacatctcttgaatttcaggatatga

SEQ ID NO: 70 - protein, 366 aa, Brassica napus
MVTKNSVEFDPYIERKAFDETQEGVKGLVDAKIAEVPRIFHIPQASLTEKKPSVSVSDLEIPIIDFASVHVDTASREAVVEKVKYAAEKWGFFQVINHGVPLNVLEEIQDGVRRFHEEDPEVKKQYFSRDNANKKFVYNSNFDLYSSSPSVNWRDTFTCYLAPDPPSPEELPVTCRDAVFEYSKHVMSLGGLLCELFSEALGLESEILKSKGCLKTLFMVCHYYPPCPKPDLTLGISKHSDNSFLTVLLQDNIGGLQILHQDSWVDVAPLPGSLVINIGDFLQLITNDKFVSLEHRVLANRQGPRISIACFFSSSKHANSTVYGPMKELVSEENPPKYRDITIKEYTEGYFEKGLDGTSHLLNFRI

SEQ ID NO: 71 - DNA, 1164 bp, glycine max
  CDS (1)..(1164)
ttgtgcattttgcatcagaagcaggcactgctgagtcacagtatggaggccaaaagctcaaaccagataaaagaggaaagcaatgattccaattatgataggaaagctgaaataaaagcatttgatgattcaaaaactggtgttaaaggtcttgtagattctggtgtgaaaaagatcccacgcatgttcctttccggcatcgacataactgaaaacgtagccagtgactcgaacttgagtattcctgtcatagacctacaagacatacataacaatcctgcactgcataatgaagttgtcaccaaaattcgaagtgcatgccaggagtggggatttttccaagtgatcaatcatggaattccaattagtgttatggatcaaatgattgatggaatccgaaggtttcatgaacaagatactgatgtcaggaaacagttttactctagagatttgaagaagacaattctatacaattccaatactagcctgtacctagacaagtttgctaactggagagactcacttggatgttctatggctcctaatccacccaaaccagagaatttacctacagtatttagagacataattattgaatactccaaggaaattatggcactgggttgtacaatttttgagttattgtcagaggctcttggccttaatccatcttatctaaaagaaatgaattgtgctgaaggacttttcattcagggtcattactatccaccttgccctgaacctgaattaactttgggcacgtccaagcacactgatagttccttcatgacaatagttctacaaggccaactgggtggtcttcaagttcttcatgaaaaactatggtttaatgttccacctgtgcatggagctcttgttgtaaacgtaggagatattctacaacttataacgaatgacaattttgtcagcgtttatcatcgggttttatcgaatcatggagggccaagagtttcagtagcaagcttcttttcgaattcgcatgatccagcaaaaggtgcatcaatggtttatagtccaattaaggagttattatcagaagaaaacccagcaatctatagggacactaccataggagagatcatggcacaccattttgctaaggggcttgatgggaactctgccttgcagcctttcaggttgtga

SEQ ID NO: 72 - protein, 387 aa, glycine max
LCILHQKQALLSHSMEAKSSNQIKEESNDSNYDRKAEIKAFDDSKTGVKGLVDSGVKKIPRMFLSGIDITENVASDSNLSIPVIDLQDIHNNPALHNEVVTKIRSACQEWGFFQVINHGIPISVMDQMIDGIRRFHEQDTDVRKQFYSRDLKKTILYNSNTSLYLDKFANWRDSLGCSMAPNPPKPENLPTVFRDIIIEYSKEIMALGCTIFELLSEALGLNPSYLKEMNCAEGLFIQGHYYPPCPEPELTLGTSKHTDSSFMTIVLQGQLGGLQVLHEKLWFNVPPVHGALVVNVGDILQLITNDNFVSVYHRVLSNHGGPRVSVASFFSNSHDPAKGASMVYSPIKELLSEENPAIYRDTTIGEIMAHHFAKGLDGNSALQPFRL

SEQ ID NO: 73 - DNA, 1095 bp, Brassica napus
  CDS (1)..(1095)
atggtgaccaaaaaatctgttgaattcgatccttatatcgaacgaaaggctttcgatgagacgaaagaaggagtcaaagggctggtcgacgctaaaatcaccgaagtcccacgtatcttccatgtccctcaagattccttgaccgacaagaaaccctctgtttcagacctagagatccctaccatcgactttgcaagcgtccacgtcgacacagcgtcacgtgaagccgtggtagagaaggtcaaacacgcggcggagaagtggggattcttccaggtgaccaatcatggtattccattgaacgttcttaaagagattgaagacggaagtcgtaggtttcacgaggaagatccagaggtcaagaaacgatatttctcgcgtgatttcaacaacaaaaaatttgtgtacaacagtaacttcgatctatacagtgcttctccatctgttaactggagagatactttctcttgttacatagctccagatcctccacctcctgaggatctcccagtggcttgcagggatgctatgatcgaatacacaaagcatgtgatgagtttaggtgatttgctatttgaacttctttcagaagcactaggtttaaaatctgagaccttgaagagcatggattgcttgaagagtttgcttatgatctgcaattattacccaccttgtccacaacctgacctaacgatggggataagtcaacactcagacaactctttcctcaccattcttcttcaagacaacatcggcggtcttcaaattcttcatcaagattcttgggtcgatgtctctcctattccaggagctcttgtcatcaacatgggagatttcttgcagctgataacgaacgataaatttgtaagcgccaaccatagagtgcctgcgaacagacaaggaccaaggatttcaatagcaagctttttcagctcaagtaaacaccccaattcaacagtttatggaccaatgaaagagcttgtgactgaagaaaaccctccaaaatacaaagacataaccataaaagaatacacagaaggatactttgagaaaggtctggatggaacatcacatctcttgaatttcaggatatga

SEQ ID NO: 74 - protein, 364 aa, Brassica napus
MVTKKSVEFDPYIERKAFDETKEGVKGLVDAKITEVPRIFHVPQDSLTDKKPSVSDLEIPTIDFASVHVDTASREAVVEKVKHAAEKWGFFQVTNHGIPLNVLKEIEDGSRRFHEEDPEVKKRYFSRDFNNKKFVYNSNFDLYSASPSVNWRDTFSCYIAPDPPPPEDLPVACRDAMIEYTKHVMSLGDLLFELLSEALGLKSETLKSMDCLKSLLMICNYYPPCPQPDLTMGISQHSDNSFLTILLQDNIGGLQILHQDSWVDVSPIPGALVINMGDFLQLITNDKFVSANHRVPANRQGPRISIASFFSSSKHPNSTVYGPMKELVTEENPPKYKDITIKEYTEGYFEKGLDGTSHLLNFRI

SEQ ID NO: 75 - DNA, 1116 bp, Glycine max
  CDS (1)..(1116)
atggaggtttctattacagatgaaattgcaggcactatggagctcaaccctgataggctgggtgagctcaaagcatttgatgacacaaaagctggtgtgaaaggccttgttgatgaaggggtcgcaaagatcccaagattatttcatcatccacctgatgaatttgtcatggcttcaaagttaggcaacacagaatacactatacctgttatagaccttgcagaagttggcaaagatccaagttcacgccaagaaattataggcagaataagggaagcttctgagagatggggtttctttcaggtggtcaaccatggcatccctgtgactgttctagaggacttgaaagatggggtgcaaaggtttcatgaacaagatattgaggagaagaaagagctatatacccgtgaccatatgaaacctctggtgtataatagcaattttgatctgtacagttcaccagccctcaattggagggacagtttcatgtgttacctggctcctaatcctcccaaacctgaagacttgccagtagtatgcagggatatacttttggaatatgggacatatgtaatgaagcttggaattgctctatttgaattattatcagaagctcttgggctgcacccagaccatttaaaagacttgggttgtgctgagggacttatttcactttgccattactaccctgcatgccctgaaccagatttaactttgggaaccacaaagcattctgataattgtttcctcacagtgcttctccaggatcatattggtggcctgcaggttctttaccagaacatgtggattgatataaccccagaacctggggctcttgttgttaacattggtgatcttctacagcttataacaaatgacagattcaagagcgtagaacatagagtacaggcaaatctcataggtccaagaatatctgttgcatgctttttcagcgaaggtcttaaatcatcaccaaaaccctatggacctataaaagaattattgacagaagacaatcctcccaaatacagagaaaccacagttgcggagtatgtacggtatttcgaagctaaaggtcttgatggaacctctgcacttcaacacttcaagatttga

SEQ ID NO: 76 - protein, 371 aa, Glycine max
MEVSITDEIAGTMELNPDRLGELKAFDDTKAGVKGLVDEGVAKIPRLFHHPPDEFVMASKLGNTEYTIPVIDLAEVGKDPSSRQEIIGRIREASERWGFFQVVNHGIPVTVLEDLKDGVQRFHEQDIEEKKELYTRDHMKPLVYNSNFDLYSSPALNWRDSFMCYLAPNPPKPEDLPVVCRDILLEYGTYVMKLGIALFELLSEALGLHPDHLKDLGCAEGLISLCHYYPACPEPDLTLGTTKHSDNCFLTVLLQDHIGGLQVLYQNMWIDITPEPGALVVNIGDLLQLITNDRFKSVEHRVQANLIGPRISVACFFSEGLKSSPKPYGPIKELLTEDNPPKYRETTVAEYVRYFEAKGLDGTSALQHFKI

SEQ ID NO: 77 - DNA, 1128 bp, Glycine max
  CDS (1)..(1128)
atggtggccacaagcacaaatcaatccgagttagaaacaagtaagaaggattccacttatgacagaatagctgaagtcaaagcctttgatgaaacaaaacttggtgtgaaaggcctcttcgattctgggatcacaaagataccacgcatgttccatcatgccaaggtggaggaccacactgaaaccatgccaaatgactcaaacttcagtgtccccatcatagatctccaagatatagacacaaactcatcccttcgtgtgaaagcacttgacaagattcgaagtgcatgcaaggagtgggggtttttccaggtggtgaatcatggtattgctgttgatcttttggatgagatgatatgtggaatccgtaggtttcatgaacaagatgctgaggtgagaaaacgcttttactcgagggatatgaataagaaagttagatatttctccaatggtactctttatagagaccctgctgctaactggagagacacaattgctttttttcgtactcctgatcctcctaatccagaagaaataccatcagtatgcagagacattgtgattggttattcagagaaagtaagggcattaggctttacaatctttgagctattctcagaggctcttggccttcattcttcttatcttaaagaattggactccgttgatggacaatttcttttgtgtcactactatcctccatgccctgaacccgaattaactatgggtacttcaaagcacactgatattagcttcatgacaattcttctgcaagaccagatgggtggtcttcaagttcttcatcagaatcaatgggttgatgttcctccagtgcatggatctcttgttgtaaacattggggattttctgcagcttatatcaaatgatatgttcgttagtgtctatcatcgggtcttatcaagtcatacaggccccagaatttcagttgcaagtttctttgcaaactcatttcaacagagttcattgaaggttgttggtccaataaaagagttgttatcagaagacaatccaccaatctatagggacactactgttaaagatgtcaaagcacattattttgagaaaggccttgatgggaacaattccttgcacccctttaggttgtga

SEQ ID NO: 78 - protein, 375 aa, Glycine max
MVATSTNQSELETSKKDSTYDRIAEVKAFDETKLGVKGLFDSGITKIPRMFHHAKVEDHTETMPNDSNFSVPIIDLQDIDTNSSLRVKALDKIRSACKEWGFFQVVNHGIAVDLLDEMICGIRRFHEQDAEVRKRFYSRDMNKKVRYFSNGTLYRDPAANWRDTIAFFRTPDPPNPEEIPSVCRDIVIGYSEKVRALGFTIFELFSEALGLHSSYLKELDSVDGQFLLCHYYPPCPEPELTMGTSKHTDISFMTILLQDQMGGLQVLHQNQWVDVPPVHGSLVVNIGDFLQLISNDMFVSVYHRVLSSHTGPRISVASFFANSFQQSSLKVVGPIKELLSEDNPPIYRDTTVKDVKAHYFEKGLDGNNSLHPFRL

SEQ ID NO: 79 - DNA, 1113 bp, Glycine max
  CDS (1)..(1113)
atggggttcactagtacaagtgaaaaagaagagatgttcatggcggatgcagaaagagcaaaggagctcaaagcttttgatgacacaaaacttggtgtcaaaggacttgttgatgcaggaattaccaagatccctcgcatattctatcatccctctgataatttcaagagggtctcagaatttggccatgaagattacactattccagttatagacctggcaagaattcatgaagatcatagtgaacgcaaaagggttgttgagagagtcaaagaagcatcagagacatggggtttctttcagattgtgaatcatggcatccctgtgagtactctggaggagatgtcagatggggtgctaaggttttttgagcaagatagtgaggtcaagaaggagttttatactcgtgagcaaagaccatttatgtacaatagcaattataacttatataccaaagctccaactacttggaaggactctttctactgcaatttggctcctaatgcccttaagccagaagatttgccagcagtatgcagagacatactggtggaatactcaaatgaagtattgaaattggggactttattatttgagttattatcagaagctcttggtctggatccaacttacttaaccaatattggttgcactgaggggctttttgcttttagccactactatcctgcatgtcctgaaccagaattaactatgggaacagcaaagcattctgatatggattttattacagtgctcttacaaggccatattggtggcctccaagtttttcataaggacatgtggattgatttaccccctctaactggggccctagttgttaacatcggtgattttttgcagcttatctcaaatgacaaattcaagagcgctcagcatagagtactggccaatcctataggtccaagggtgtctattgcatgcttttttagcacaggtcttaatccaacttcaaggatttatggtcccatcaaggaacttttatctgaagacaatcctgcaaaatacagagaatttaccgttcctaaatttttagctcaccacagaacaaaatgtctgtatggtacttctccactactgcatttcaggatttga

SEQ ID NO: 80 - protein, 370 aa, Glycine max
MGFTSTSEKEEMFMADAERAKELKAFDDTKLGVKGLVDAGITKIPRIFYHPSDNFKRVSEFGHEDYTIPVIDLARIHEDHSERKRVVERVKEASETWGFFQIVNHGIPVSTLEEMSDGVLRFFEQDSEVKKEFYTREQRPFMYNSNYNLYTKAPTTWKDSFYCNLAPNALKPEDLPAVCRDILVEYSNEVLKLGTLLFELLSEALGLDPTYLTNIGCTEGLFAFSHYYPACPEPELTMGTAKHSDMDFITVLLQGHIGGLQVFHKDMWIDLPPLTGALVVNIGDFLQLISNDKFKSAQHRVLANPIGPRVSIACFFSTGLNPTSRIYGPIKELLSEDNPAKYREFTVPKFLAHHRTKCLYGTSPLLHFRI

SEQ ID NO: 81 - DNA, 1086 bp, Glycine max
  CDS (1)..(1086)
atggcattacaggcagttaatgacagaaaagctgaagttcaagcatttgatgattctaaaacgggtgtaaaaggtgtcctagattctggggtaacaaagatccctaccatgttccatgtcaagttagactcaactcacacctcaccaactcactccaacttcaccatcccaatcatagatcttcagaacataaacagcaattcaactctgcatgctgaagtggttgaccagcttaggagtgcatctcagaagtggggatttttccaagtgatcaatcatggcgttcctgtggaggttttggatgagatgatcagtggaatccgcaggtttcatgagcaagatgctgaggcaaggaagcccttttactcgagagatagcagtaagaaagtcaggtatttttctaatgggaagctgttcagagacatggctggtacttggagggacacaattgcatttgatgtgaatcctgatcccccaaacccacaagatataccagcagtgtgtagagatattgtggctgaatattcaaaacaagtaaaagcgttaggtaccacgatctttgagctactgtcagaggctcttggccttgatccttcttaccttgaagaaatggactgcactaaagcactttatgttatgggtcagtactatccaaaatgccctgaacctgaattaactatgggaatttcaaagcacactgattgtgacttcataacaatacttttgcaagatcagattggtggtcttcaagttcttcatgagaatcattgggttaatgctcctccagtgcgaggagctcttgttgtcaacattggagatattctgcagcttatgactaatgacaagttcatcagtgtttatcaccgggtcttgttgaggaatatgggccctagaatttctgtagcaaccttcttcatgaattttaccatatctaaatgtacatcgaagagttatggtccaataaaggaattgttatcagaagaaaaccccccagtctatagggacatgaatatgaaagaaatcttgacaaattattatgcaaaaggccttgatgggagctcctacttgctgcctttaaggttgtga

SEQ ID NO: 82 - protein, 361 aa, Glycine max
MALQAVNDRKAEVQAFDDSKTGVKGVLDSGVTKIPTMFHVKLDSTHTSPTHSNFTIPIIDLQNINSNSTLHAEVVDQLRSASQKWGFFQVINHGVPVEVLDEMISGIRRFHEQDAEARKPFYSRDSSKKVRYFSNGKLFRDMAGTWRDTIAFDVNPDPPNPQDIPAVCRDIVAEYSKQVKALGTTIFELLSEALGLDPSYLEEMDCTKALYVMGQYYPKCPEPELTMGISKHTDCDFITILLQDQIGGLQVLHENHWVNAPPVRGALVVNIGDILQLMTNDKFISVYHRVLLRNMGPRISVATFFMNFTISKCTSKSYGPIKELLSEENPPVYRDMNMKEILTNYYAKGLDGSSYLLPLRL

SEQ ID NO: 83 - DNA, 1134 bp, Glycine max
  CDS (1)..(1134)
atggtagtcacaaacacaaaccagttaggggaaaccattgattccacttatgataggaaagctgaaaagaaagcctttgatgattcaaaagctggtgttagaggtcttgtagagtccggagtgacgaagattcctcgcatgtttcatgctggcaagctggatgtcattgaaacctcacctagtcacaccaagttgagtatccccatcatagacctcaaggacatacactctaatccagctctgcatacacaagtaatgggcaaaattcgaagtgcatgccatgagtggggatttttccaggtgattaatcatggaattccaatcagtgtcttggatgagatgattggtggaattcgtagatttcatgaacaagatgctgaggtaaggaaagagttctacactcgggatacaaagaaaaaagttgcgtactattccaaccataacttgcacagtgacaaacctgttaattggagagatacatttggttttgctgttgctcctgatccacccaaacctgaagaaataccatctgtatgcagggatattgtgattgagtatacaaagaaaataagggatgtgggttttacaatctttgagttattgtcagaagctttgggacttaactcttcttaccttaaagaattgaattgtggtgaaggactctttactgtgggtaactactatccagcatgccctgaacctgaattaactatgggcactaccaagcacacagatagtaacttcatgactttacttctacaagaccaaattggtggtcttcaagttcttcatcaaaatcaatgggtcaatgttcctccggtacatggagctcttgttgtaaacataggagatcttctacagcttatcacaaatgacaagtttgtcagtgtgtatcaccgtgtcttatcacagaacacaggcccaagaatatctgtagcaagcttctttggaaccttctttggacattcacatgacccagttgaaggtacacaaaagatatatggtccaattaaggaactaatttcagaagaaaacccaccaatctacagagacacaaccataaaagagttcgtggcatactactatgcaaaggcccttgatggaaaatcttccttgaaccccttcagggtgtga

SEQ ID NO: 84 - protein, 377 aa, Glycine max
MVVTNTNQLGETIDSTYDRKAEKKAFDDSKAGVRGLVESGVTKIPRMFHAGKLDVIETSPSHTKLSIPIIDLKDIHSNPALHTQVMGKIRSACHEWGFFQVINHGIPISVLDEMIGGIRRFHEQDAEVRKEFYTRDTKKKVAYYSNHNLHSDKPVNWRDTFGFAVAPDPPKPEEIPSVCRDIVIEYTKKIRDVGFTIFELLSEALGLNSSYLKELNCGEGLFTVGNYYPACPEPELTMGTTKHTDSNFMTLLLQDQIGGLQVLHQNQWVNVPPVHGALVVNIGDLLQLITNDKFVSVYHRVLSQNTGPRISVASFFGTFFGHSHDPVEGTQKIYGPIKELISEENPPIYRDTTIKEFVAYYYAKALDGKSSLNPFRV

SEQ ID NO: 85 - DNA, 1086 bp, Zea mays
  CDS (1)..(1086)
atgtccgtcgccgccgccttgggccgcgccgatgagctccgcgcgctggacgacaccctcgccggcgtccgcggccttgtagcgtctggtgcgaagcaagttcctcgcatctttcgcgtcccctacccggaggagctactccaccatgaacaaccgccagcggcggcgaccgtcccggtgatcgatctcagcggcgaccgcgcagccgtgatcgacgccgtccgtggggcggcggcggggtgggggttcttccaggtcacgggccacgcggtgcccgagcaggtgatgtcagcagccgtggcggcgatgcgggcgttccacgaagccgacggcggggagggcagcgacaaggcgcggctctactcgcgagagcccgggagggcggtcaagtaccactgcaacttcgacctgtaccagtctcccgtggccaactggcgcgacacggtctacctgcggatggcacctgaccctcccgccgccgacgatctgccggagatctgccgagatgcactgtttgaatacgccaaacaagtgaaagatttggggcagaggttgtttgggctgctctccgaatccctcgggctcaaaccgagctacttgacagatattgagtgcgaccagggacagattatacttgggcactactaccctccatgcccccagcctgaactcgccattgggacaagccggcattcagactccggcttcctgaccatactactgcaggacaaagttggcggcctccagatcctccatgatggtcagtgggtcgacgttgcaccgacgcctggagcattcatcgtcaacataggcgatctcttgcagctggtctctaacgacaagttcagcagcgtcgagcacagggtggtagccaagaatgctgaaccaagagtttcgatcgcgtgctttttcagcacccatttccatcccgcttcgacaagaacgtatggcccaatcaaggagctgctgtccgaggagaaccctcctttgtatagggaaacactcgtgagagagtatgttgcacgttactactctgttggcttggatggaaaacagaagactgctctagctgatttcaggttgtga

SEQ ID NO: 86 - protein, 361 aa, Zea mays
MSVAAALGRADELRALDDTLAGVRGLVASGAKQVPRIFRVPYPEELLHHEQPPAAATVPVIDLSGDRAAVIDAVRGAAAGWGFFQVTGHAVPEQVMSAAVAAMRAFHEADGGEGSDKARLYSREPGRAVKYHCNFDLYQSPVANWRDTVYLRMAPDPPAADDLPEICRDALFEYAKQVKDLGQRLFGLLSESLGLKPSYLTDIECDQGQIILGHYYPPCPQPELAIGTSRHSDSGFLTILLQDKVGGLQILHDGQWVDVAPTPGAFIVNIGDLLQLVSNDKFSSVEHRVVAKNAEPRVSIACFFSTHFHPASTRTYGPIKELLSEENPPLYRETLVREYVARYYSVGLDGKQKTALADFRL

SEQ ID NO: 87 - DNA, 1122 bp, Oryza sativa
  CDS (1)..(1122)
atgccgtccggctacgacgacgaccgcctccgcgagctcaaggccttcgacgacaccaaggccggcgtcaagggcctcgtcgacgccggcgtcaccgccgtcccgcgcatcttccaccaccctcccgaccccacaccggtcgcctccgccgccgacgccgccgacgccgacgccatcccggtcatcgacctcgcgcgcgccgacgccgaccgtgacagggtggtcgcccaggtgaggtcggcggcggagtcggtgggcttcttccaggtggtcaaccacggcgtgccggcgcgcctcacggacgggatgctcgcggcggtgcggcggttcaacgagcggccggcggcggcgaaggcggcgttctacacgcgcgacgcggcgcggcgccgcgtgaggttcaactccaacttcgacctgttcgagtcccccgccgccaactggcgcgacacgctcttctgccaggcggcgccggacccgccggcgccggaggagctccccgccgacgtgaggggcgtgctgccggagtacgccggggcggcgcggcggctggcgtcgtccgtcctggagctcctctcgtcggcgctggggctggagacggggcggctgggggggatgggctgcgccgacggcgtcagcgtggtgagcaactactacccgccgtgcccggagccggaggccaccgtcggcacggcgaggcactccgacccggcgttcctgaccgtgctcctgcaggacggcatgggcggcctccaggcgctcctcggcgggcggtgggtggacgtcccgcccgtcgccggcgcgctcgtcgtcaacgtcggtgacctgctcgagctcgtcagcaacgggaggatgaggagcgtggagcaccgggtggtggccaaccggagcagggacgcggcgcgggtgtccgtggcggcgttctgcaacgtcgacctgggccgcgagagcagccggagcggcaggctgtacggccccatcgccgagctcaccgccggcggcgacccgccgcggtacaggagcaccaccgtcgccgagttcctcgcgcactacgacggcaagggcctcgacggccgccccgccctccaccacttccgtctacctgccgccgctagtctagattag

SEQ ID NO: 88 - protein, 373 aa, Oryza sativa
MPSGYDDDRLRELKAFDDTKAGVKGLVDAGVTAVPRIFHHPPDPTPVASAADAADADAIPVIDLARADADRDRVVAQVRSAAESVGFFQVVNHGVPARLTDGMLAAVRRFNERPAAAKAAFYTRDAARRRVRFNSNFDLFESPAANWRDTLFCQAAPDPPAPEELPADVRGVLPEYAGAARRLASSVLELLSSALGLETGRLGGMGCADGVSVVSNYYPPCPEPEATVGTARHSDPAFLTVLLQDGMGGLQALLGGRWVDVPPVAGALVVNVGDLLELVSNGRMRSVEHRVVANRSRDAARVSVAAFCNVDLGRESSRSGRLYGPIAELTAGGDPPRYRSTTVAEFLAHYDGKGLDGRPALHHFRLPAAASLD

SEQ ID NO: 89 - DNA, 1110 bp, Oryza sativa
  CDS (1)..(1110)
atggatagatcaggtcatcgatcgatgggcagcagctccggctccgaccggctacgcgacctccaggccttcgacgacacaaaggccggcgtgaagggcctcgtcgatgccggcgtcacaaccatccccgccatcttccaccaccacccgctgctactggacgatgcggaggaggatgcggatgttatcccggtgatcgatctgcaggcggacgttgaccgaggccatctggttggtcaggtgagggcggccgcccagtgtgtggggttcttccaggtggtgaaccacggcatccccggcgagctcctggaggagatgctggcggcggtgcggcggttcaacgagcagccggcggagggcaagaaagcctggtacagcagggacagcgggcggagggtgaagttcaactccaatttcgacctgttccagtcgccggccgccaactggcgtgacacgctgttgctggagctgacgccacggccggggccggcagcggaggagatcccaccggcgtgcaggggcgtggtgggggagtacgtggaggcggtgcagaggctgggcggggcgctgttggagctgctgtcggaggcgctggggctcccgccggagtacctcggcggcctcggtggggggctggctaccatggcagcgcactactacccgccatgcccggagccgcacctgacgctgggcaccacacgccactccgaccccagcttcctgacagtgctgctgcaggagagcaagggcctgcaggtgctcatgaggcagcgccagcggtgggtggacgtccctccggtggccggcgctctggtggtcaacatcggcgacctcctccagctagtgtccaacgacctcttccgaagcgtggagcaccgggtgttggcaaccaccgccgccgcggagcctcgcctctccgtcgcctgcttcttccgtcccgactacgcctgcaccagggtgtacgcccccgtcaccaccacgccgccgccaccgctctacaggagcaccaccatgccggagttcctctcgcattacagagccaaaggcctcgacggccgatccgcgctccaccacttcaggatccctcctccttcatctccaccacattaa

SEQ ID NO: 90 - protein, 369 aa, Oryza sativa
MDRSGHRSMGSSSGSDRLRDLQAFDDTKAGVKGLVDAGVTTIPAIFHHHPLLLDDAEEDADVIPVIDLQADVDRGHLVGQVRAAAQCVGFFQVVNHGIPGELLEEMLAAVRRFNEQPAEGKKAWYSRDSGRRVKFNSNFDLFQSPAANWRDTLLLELTPRPGPAAEEIPPACRGVVGEYVEAVQRLGGALLELLSEALGLPPEYLGGLGGGLATMAAHYYPPCPEPHLTLGTTRHSDPSFLTVLLQESKGLQVLMRQRQRWVDVPPVAGALVVNIGDLLQLVSNDLFRSVEHRVLATTAAAEPRLSVACFFRPDYACTRVYAPVTTTPPPPLYRSTTMPEFLSHYRAKGLDGRSALHHFRIPPPSSPPH

SEQ ID NO: 91 - DNA, 1128 bp, Oryza sativa
  CDS (1)..(1128)
atgccggcctccgaccccgcccccgccgccgccgctgccgcctacgaccgcaccgccgagctccgcgcgctcgacgccaccctctccggcgtccgcggcctcgtcgcgtcgggcgccacccacctcccccgcatcttccacaacgtcgtccatggtgatcaagaaccaccggaggcgacggcgccatcgtccgcggccacgaccacgacgaccgtcccggtgatcgacatcagcgggagccgcgcggccgtggtcgacgccgtccggcgggcggcggcggagtgggggttcttccaggtgacggggcacggggttcccctcgccgcgatggacgccgcggcgggcgcggcgcgcgcgttccacgagtccggaggcggcgagggcagcgacaaggcgcggctctactcgcgcgagcccgggagagccgtcaagtaccactgcaacttcgacctgtaccagtcgccggtggccaactggcgcgacacgctctacctccgcatggcgcccgacccgccgcccgccgccgacttgccggagatctgccgggatgcactgtttgaatatgccaaacaagtaaagaatttggggaacacactgttcgagctgctctcggagggccttgggctcaaaccgagctacctgacagacatagaatgcaaccaggggcaaatcatactatgccactactaccctccctgcccccagcctgagctcgccatcgggacaagccggcattcggactccggcttcctcaccatacttctccaggatgacattgggggcctccagatcctccatgaggaccgatgggtcgatgtcacgccaactcctggagcgttcatcgtcaatgttgccgatctcctgcagttgatctccaatgacaattacaagagtgtggagcatagagtggtggcgaagaacactgaaccgagagtctcgattgcctgtttcttcagcacccattttcatccgatttccacgaggatgtatggcccgatcaaggagctgttgtctgatgagaacccgcctttgtacagggaggcactcgtcagagattacaccgcgcgttactactccgttgggctagatggcaagttcaagactactctttctgaattccggttatag

SEQ ID NO: 92 - protein, 375 aa, Oryza sativa
MPASDPAPAAAAAAYDRTAELRALDATLSGVRGLVASGATHLPRIFHNVVHGDQEPPEATAPSSAATTTTTVPVIDISGSRAAVVDAVRRAAAEWGFFQVTGHGVPLAAMDAAAGAARAFHESGGGEGSDKARLYSREPGRAVKYHCNFDLYQSPVANWRDTLYLRMAPDPPPAADLPEICRDALFEYAKQVKNLGNTLFELLSEGLGLKPSYLTDIECNQGQIILCHYYPPCPQPELAIGTSRHSDSGFLTILLQDDIGGLQILHEDRWVDVTPTPGAFIVNVADLLQLISNDNYKSVEHRVVAKNTEPRVSIACFFSTHFHPISTRMYGPIKELLSDENPPLYREALVRDYTARYYSVGLDGKFKTTLSEFRL

SEQ ID NO: 93 - DNA, 1191 bp, Oryza sativa
  CDS (1)..(1191)
atggccaccttctccggcaccgaccgcctccgcgacctccacgccttcgacgacaccaaggccggcgtcaagggcctcgtcgacgccggcgtcaccaccgtcccctacttcttccgccaccaccccgacccactccccgtcgccgcgccgtcggaggccgccgcggccatccctctcatcgacctcgccaaggccgacgtcgaccgtggccacgtcgtctcccaggtgaggtccgccgccgagtcggccgggcttttccaggtggtgaaccacggcgtcgccggggagctcatggacgcgatgctcgcggcggcgcggcggttcaacgagcagcccgcggaggcgaaggcgccctactacaccagggacctcggcagcaaggtccggttcttctgcaacttcgacctgttccagtcgccggcggcgcagtggcgcgacacgctgtacgtggagatggtgcccgacgcgccctcgccggaggagatcccgccgccgctcaggggcgtcgcggaggagttcgccgcggcggtgtggcggctcggcgagcgggtgaccgagctgctctcggaggcgctgggccttccccccgggtacctcgccgagcacgccgggtgcatggacggcatgagcatggtggcgcagtactacccgccgtgcccggagccggagaagacgatgggcacgacgcggcactccgacccgagcttcctcaccgtgctgctgcaggacgagtccggcgggctccaggcggtgctcccgcggcccccggaggagcggtgggtggacgtgcccccggtggccggcgcgctggtggtgaacgtcggcgacctcctccagctggtgtcgaacggccggctccggagcatggagcaccgggtgctgcccaccgccgccagcgcggcgcgggcccgcgtggcggtggcgtgcttcttccggctcgagtactcggcgtcgttgacgaggccgaggtcgtacggcccgatcgtggattccggcgaaggcggcgcgcggcgggcggcggcggtgtacaggagcacgacgccgagggatttcctggcgtacttcaacggcaaggggctcgacgggcggtcggcgctggagcatttcaggattccggaggcggctgcggcttcttccgccgtcgacgtcgtctcctcctccaccaccgccgccgcatccattccacggtag

SEQ ID NO: 94 - protein, 396 aa, Oryza sativa
MATFSGTDRLRDLHAFDDTKAGVKGLVDAGVTTVPYFFRHHPDPLPVAAPSEAAAAIPLIDLAKADVDRGHVVSQVRSAAESAGLFQVVNHGVAGELMDAMLAAARRFNEQPAEAKAPYYTRDLGSKVRFFCNFDLFQSPAAQWRDTLYVEMVPDAPSPEEIPPPLRGVAEEFAAAVWRLGERVTELLSEALGLPPGYLAEHAGCMDGMSMVAQYYPPCPEPEKTMGTTRHSDPSFLTVLLQDESGGLQAVLPRPPEERWVDVPPVAGALVVNVGDLLQLVSNGRLRSMEHRVLPTAASAARARVAVACFFRLEYSASLTRPRSYGPIVDSGEGGARRAAAVYRSTTPRDFLAYFNGKGLDGRSALEHFRIPEAAAASSAVDVVSSSTTAAASIPR

SEQ ID NO: 95 - DNA, 1125 bp, Oryza sativa
  CDS (1)..(1125)
atggccaccgtctccggcaccgaccgcctccgcgacctccacgccttcgacgacaccaaggccggcgtcaagggcctcgtcgacgccggcgtcaccaccatcccctacttcttccgccacccgcccgacccactccccgtcgcctcgccgtccgaggccgccgcggccatcccgctcatcgacctcgccaaggccgacgtcgaccgtgaccacgtcgtctcacaggtgacggcggcagccgagacggtcggcttcttccaggttgtcaaccatggcgtcgccggggagctgatggaggcgatgctcgcggcggtgcggcgcttcaacgaggagcccctggaggcgaaggtgccctactacaccagggacgtcgccagcaaggtccggttcagctccaacttcgacctgttccgttcgccggcggccaactggcgcgacacgttggtgatcgagatgtggccggagccgccgtcgccggaggagatcccgccgccgtgcaggggcgtgttggaggagtacgccgcggcggcgcggcggctcggggaacggctgctcgagctgctgtcggaggggctgggcctccccgcggggtacctcggccgcgaagccgggtgcacggacgggctgagcgtggcggcgaactactacccggcgtgcccggagccggaggcgacgatgggcgcgaccaagcacgccgaccccagcttcctcaccgtgctgctgcaggacacctccggcggcctgcaggcgctgctggaccagccgcggcgtcggtgggtggacgtgcccccggtggccggcgcgctggtggtgaacgtcggcgacttcctccagctggtgtcgaacgaccggctccggagcgtggagcaccgggtgctgcccaccggcgctgccgggccggctcgcgtgtcggtggcgtgcttcttccgcgtcgagtacgcgtcgacgaggccgtacgtcccggtcgtcgtcggcggcggcggggcgcgggcggcggcggtgtacaggggcacgacggcgggggagttcctggcgcacttcaacggcaaggggctcgacgggcggtcggcgctggaccacttcaggattccggcggcggcgtcgtctcctcctcctccactgtag

SEQ ID NO: 96 - protein, 374 aa, Oryza sativa
MATVSGTDRLRDLHAFDDTKAGVKGLVDAGVTTIPYFFRHPPDPLPVASPSEAAAAIPLIDLAKADVDRDHVVSQVTAAAETVGFFQVVNHGVAGELMEAMLAAVRRFNEEPLEAKVPYYTRDVASKVRFSSNFDLFRSPAANWRDTLVIEMWPEPPSPEEIPPPCRGVLEEYAAAARRLGERLLELLSEGLGLPAGYLGREAGCTDGLSVAANYYPACPEPEATMGATKHADPSFLTVLLQDTSGGLQALLDQPRRRWVDVPPVAGALVVNVGDFLQLVSNDRLRSVEHRVLPTGAAGPARVSVACFFRVEYASTRPYVPVVVGGGGARAAAVYRGTTAGEFLAHFNGKGLDGRSALDHFRIPAAASSPPPPL

SEQ ID NO: 97 - DNA, 1131 bp, Oryza sativa
  CDS (1)..(1131)
atggccaccgtctccggcaccgaccgcctccgtgacctccacgccttcgacgacaccaaggccggcgtcaagggcctcgtcgacgccggcgtcaccaccgtcccctacttcttccgccaccaccccgaccccctccccgtcgccgcgccgtcggaggccgcctcggccatcccgctcatcgacctcgccaaggccgacgtcgaccggggacgggtggtcgccgaggtgaggacggccgccgagacggtcggcttcttccaggtggtcaaccatggcgtcgccggggagctcatggacgagatgctcgcggcggtgcggcgcttcaacgaggagcccctggaggcgaaggtgccctactacaccagggacgtcgccagcaaggtccggttcaactccaacttcgacctcttccgttcgccggcggccaactggcgggacacgatgttcgtcgagatgttcccggaggtgccctcgccggaggagatcccgccgccgtgcaggggcgtgctggaggagtacgccgcggcggtgcggcggctcggggaacggctgttcgagctgctgtcggaggcgctgggcctccctgcggggtacctcggccgcgacgccgggggcacggacgggctgagcgtggcggcgcactactacccggcgtgcccggagccggaggcgacgatgggcgcgaccaagcactccgacccgaccttcctcaccgtgctgctgcaggacgagtccggcgggctccaggcggtgctcccgcggcccccggaggagcggtgggtggatgtgcccccggtggccggcgcgctggtggtgaacgtcggcgacctcctccagctggtgtcgaacgagaggctccggagcgtggagcaccgggtgctgcccaccggcgccgccgggccggctcgcgtgtcggtggcgtgcttcttccgcctcgcgtactcgtcgacgaggccgtgcgtcccggtcgtcggcggcggcagcggggcgcgggcggcggcggtgtacaggagcacgacggcgggggagttcctggcgcactacaacgggaaggggctcgacgggcggtcggcgctggaccacttcaggattccggcggcggcggcgtctcctcctcctccaccacagtag

SEQ ID NO: 98 - protein, 376 aa, Oryza sativa
MATVSGTDRLRDLHAFDDTKAGVKGLVDAGVTTVPYFFRHHPDPLPVAAPSEAASAIPLIDLAKADVDRGRVVAEVRTAAETVGFFQVVNHGVAGELMDEMLAAVRRFNEEPLEAKVPYYTRDVASKVRFNSNFDLFRSPAANWRDTMFVEMFPEVPSPEEIPPPCRGVLEEYAAAVRRLGERLFELLSEALGLPAGYLGRDAGGTDGLSVAAHYYPACPEPEATMGATKHSDPTFLTVLLQDESGGLQAVLPRPPEERWVDVPPVAGALVVNVGDLLQLVSNERLRSVEHRVLPTGAAGPARVSVACFFRLAYSSTRPCVPVVGGGSGARAAAVYRSTTAGEFLAHYNGKGLDGRSALDHFRIPAAAASPPPPPQ

SEQ ID NO: 99 - DNA, 1128 bp, Glycine max
  CDS (1)..(1128)
atggtggccacaagcacaaatcaatccgagttagaaacaagtaagaaggattccacttatgacagaatagctgaagtcaaagcctttgatgaaacaaaacttggtgtgaaaggcctcttcgattctgggatcacaaagataccacgcatgttccatcatgccaaggtggaggaccacactgaaaccatgccaaatgactcaaacttcagtgtccccatcatagatctccaagatatagacacaaactcatcccttcgtgtgaaagcacttgacaagattcgaagtgcatgcaaggagtgggggtttttccaggtggtgaatcatggtattgctgttgatcttttggatgagatgatatgtggaatccgtaggtttcatgaacaagatgttgaggtgagaaaaagcttttactcgagggatatgaataagaaagttagatatttctccaatggtactctttatagagaccctgctgctaactggagagacacaattgctttttttcgtactcctgatcctcctaatccagaagaaataccatcagtatgcagagacattgtgattggttattcagagaaagtaagggcattaggctttacaatctttgagctattctcagaggctcttggccttcattcttcttatcttaaagaattggactccgttgatggacaatttcttttgtgtcactactatcctccatgccctgaacccgaattaactatgggtacttcaaagcacactgatattagcttcatgacaattcttctgcaagaccagatgggtggtcttcaagttcttcatcagaatcaatgggttgatgttcctccagtgcatggatctcttgttgtaaacattggggattttctgcagcttatatcaaatgatatgttcgttagtgtctatcatcgggtcttatcaagtcatacaggccccagaatttcagttgcaagtttctttgcaaactcatttcaacagagttcattgaaggttgttggtccaataaaagagttgttatcagaagacaatccaccaatctatagggacactactgttaaagatgtcaaagcacattattttgagaaaggccttgatgggaacaattccttgcacccctttaggttgtga

SEQ ID NO: 100 - protein, 375 aa, Glycine max
MVATSTNQSELETSKKDSTYDRIAEVKAFDETKLGVKGLFDSGITKIPRMFHHAKVEDHTETMPNDSNFSVPIIDLQDIDTNSSLRVKALDKIRSACKEWGFFQVVNHGIAVDLLDEMICGIRRFHEQDVEVRKSFYSRDMNKKVRYFSNGTLYRDPAANWRDTIAFFRTPDPPNPEEIPSVCRDIVIGYSEKVRALGFTIFELFSEALGLHSSYLKELDSVDGQFLLCHYYPPCPEPELTMGTSKHTDISFMTILLQDQMGGLQVLHQNQWVDVPPVHGSLVVNIGDFLQLISNDMFVSVYHRVLSSHTGPRISVASFFANSFQQSSLKVVGPIKELLSEDNPPIYRDTTVKDVKAHYFEKGLDGNNSLHPFRL

SEQ ID NO: 101 - DNA, 1116 bp, Glycine max
  CDS (1)..(1116)
atggtggccacaagcacaaatcaatcagagttagaaacaagtaagaaggattccacttatgacagaatagctgaagtcaaagcctttgatgaaacaaaacttggtgtgaaaggcctcttcgattctgggatcacaaagataccacgcatgttccatcatgccaaggtggaggaccacactgaaaccacgccaaatgactcgaacttcagtatccccatcatagatctccaagatatagacacaaactcatcccttcgtgtgaaagcacttgacaagattcgaagtgcatgcaaggagtgggggtttttccaggtggtgaatcatggtattgctgttgatcttttggatgagatgatatgtggaatccgtaggtttcatgaacaagatgctgaggtgagaaaaagcttttactcgagggatatgaataagaaagttagatatttctccaatggtactctttatagagaccctgctgcaaactggagggactcaattgtttttttgttactcctgatcctccgtatcccgaagaaataccagcaagacattgtgattggatattcagagaaagtaagggcattaggctttacaatctttgagctattctcagaggctcttggccttcattcttcttatcttaatgaattggactccgttgatggacaatatcttttgtgtcactactatcctccatgccctgaacctgaattgactatgggtacttcaaagcacactgatattagcttcatgacaattcttctgcaagaccagatgggtggtcttcaagttcttcatcagaatcaatgggttgatgttcctccggtgcatggatctcttgttgtaaacattggggatcttctgcagcttataacaaatgacatgtttgtcagtgtctatcatcgggtcttatcgaggtatacaggccccagaatttcagttgcaagtttctttgcaaactcatctccacagagttcatcgaaggtagttggtccaataaaagaactgttatcagaagataatccacctgtctatagggacactactgtaaaagatgtcgcagcacattattttgagaaaggccttgatgggaactatttgcaaccctttaggttgtga

SEQ ID NO: 102 - protein, 371 aa, Glycine max
MVATSTNQSELETSKKDSTYDRIAEVKAFDETKLGVKGLFDSGITKIPRMFHHAKVEDHTETTPNDSNFSIPIIDLQDIDTNSSLRVKALDKIRSACKEWGFFQVVNHGIAVDLLDEMICGIRRFHEQDAEVRKSFYSRDMNKKVRYFSNGTLYRDPAANWRDSIVFLLLLILRIPKKYQQDIVIGYSEKVRALGFTIFELFSEALGLHSSYLNELDSVDGQYLLCHYYPPCPEPELTMGTSKHTDISFMTILLQDQMGGLQVLHQNQWVDVPPVHGSLVVNIGDLLQLITNDMFVSVYHRVLSRYTGPRISVASFFANSSPQSSSKVVGPIKELLSEDNPPVYRDTTVKDVAAHYFEKGLDGNYLQPFRL

SEQ ID NO: 103 - DNA, 1086 bp, Glycine max
  CDS (1)..(1086)
atggcattagaggcagttaatgacagaaaagctgaagttcaagcatttgatgattctaaaacgggtgtaaaaggtgtcctagattctggggtaacaaagatccctaccatgttccatgtcaagttagactcaactcacacctcaccaactcactccaacttcaccatcccaatcatagatcttcagaacataaacagcaattcaactctgcatgctgaagtggttgaccagcttaggagtgcatctcagaagtggggatttttccaagtgatcaatcatggcgttcctgtggaggttttggatgagatgatcagtggaatccgcaggtttcatgagcaagatgctgaggcaaggaagcccttttactcgagagatagcagtaagaaagtcaggtatttttctaatgggaagctgttcagagacatggctggtacttggagggacacaattgcatttgatgtgaatcctgatcccccaaacccacaagatataccagcagtgtgtagagatattgtggctgaatattcaaaacaagtaaaagcgttaggtaccacgatctttgagctactgtcagaggctcttggccttgatccttcttaccttgaagaaatggactgcactaaagcactttatgttatgggtcagtactatccaaaatgccctgaaccagaattaactatgggaatttcaaagcacactgattgtgacttcataacaatacttttgcaagatcagattggtggtcttcaagttcttcatgagaatcattgggttaatgctcctccagtgcgaggagctcttgttgtcaacattggagatattctgcagcttatgactaatgacaagttcatcagtgtttatcaccgggtcttgttgaggaatatgggccctagaatttctgtagcaaccttcttcatgaattttaccatatctaaatgtacatcgaagagttatggtccaataaaggaattgttatcagaagaaaaccccccagtctatagggacatgaatatgaaagaaatcttgacaaattattatgcaaaaggccttgatgggagctcctacttgctgcctttaaggttgtga

SEQ ID NO: 104 - protein, 361 aa, Glycine max
MALEAVNDRKAEVQAFDDSKTGVKGVLDSGVTKIPTMFHVKLDSTHTSPTHSNFTIPIIDLQNINSNSTLHAEVVDQLRSASQKWGFFQVINHGVPVEVLDEMISGIRRFHEQDAEARKPFYSRDSSKKVRYFSNGKLFRDMAGTWRDTIAFDVNPDPPNPQDIPAVCRDIVAEYSKQVKALGTTIFELLSEALGLDPSYLEEMDCTKALYVMGQYYPKCPEPELTMGISKHTDCDFITILLQDQIGGLQVLHENHWVNAPPVRGALVVNIGDILQLMTNDKFISVYHRVLLRNMGPRISVATFFMNFTISKCTSKSYGPIKELLSEENPPVYRDMNMKEILTNYYAKGLDGSSYLLPLRL

SEQ ID NO: 105 - DNA, 903 bp, Glycine max
  CDS (1)..(903)
atgactatggtgttcaaaaacacaaaccagttagaggaaagtatggattccacttatgacaggaaggctgaagtgaaagcctttgatgattcaaaagctggtgttaaaggtcttgtagagtctggattgacaaagatccctcgcatgttccattctggcaggttggatatcattgaaacctcagtcagtgactctaagttcggtatccccatcatagacctccaaaatatccactcctatcctgctctgcattcagaagtaattggcaaggttcgaagtgcatgccatgactggggatttttccaggtgattaatcatggaattcctatcagtgtgttggatgagatgattgatggaattcgtagatttcatgaacaagacactaaggtaaggaaagagttctactctcgggatataaagaaaaaagtttcgtattattctaactataacttgtaccatgacaatcctgctaattggagagatacatttggttttgttgttgctcctgatccacccaaacctgaagaaatatcatctgtgtgtagggatattgtgattgaatattcaaagaaaataagggatttgggttttacaatctttgagttgttgtctgaagctttgggacttaatccttcttaccttaaagaatttaactgtggtgaaggactctttattttgggtcactactatccaacatgccctgaacctggattaactatgggcactaccaagcacacagatagtaacttcatgactttacttctacaagaccaaattggtggtcttcaagttcttcatcaaaatcaatgggtcaatgttcctccgttacatggagctcttgttgtaaacataggagatcttctacaggtaaaatactctggaataatttttgtcaaattttag

SEQ ID NO: 106 - protein, 300 aa, Glycine max
MTMVFKNTNQLEESMDSTYDRKAEVKAFDDSKAGVKGLVESGLTKIPRMFHSGRLDIIETSVSDSKFGIPIIDLQNIHSYPALHSEVIGKVRSACHDWGFFQVINHGIPISVLDEMIDGIRRFHEQDTKVRKEFYSRDIKKKVSYYSNYNLYHDNPANWRDTFGFVVAPDPPKPEEISSVCRDIVIEYSKKIRDLGFTIFELLSEALGLNPSYLKEFNCGEGLFILGHYYPTCPEPGLTMGTTKHTDSNFMTLLLQDQIGGLQVLHQNQWVNVPPLHGALVVNIGDLLQVKYSGIIFVKF

SEQ ID NO: 107 - DNA, 1197 bp, Glycine max
  CDS (1)..(1197)
atgcactatcttgctttcaatccaagttcactttggtggcagttgaacgagtttgcaaccccacacacaaaaaccaaacccttaaaaatgtcatccccctcgccggtggccacggtggtctccgccgccgcgctgtacgaccgcgccaaagccgtgaaagaattcgacgaaaccaaggtcggagtcaaaggtttgatcgattcgggaatcagaaccatcccccctttcttcgtccacccgcccgaaaccctagcggacctcaagcgcggaaccaaacccgggtccgcgccggagatccccacggtggacctcgccgccgaggagagctcccgcgccgccgtggtggagcaggtccggcgggcggcgagcaccgtgggattcttccaggtggtcaaccacggcgtcccggaggagctgctattgcgaacgctggcggcggtgaaggcgttccacgagcagcccgcggaggagagggcgcgggtgtaccgtagggagatggggaagggtgtgtcgtatatttccaacgtggatctcttccaatcaaaagccgccagctggcgcgacaccatccagattaggatggggccaaccgcagtggattcgagcgagattccagaagtgtgtaggaaagaggtaatggagtgggacaaggaggtggcgcgtgtggctcgtgtgttatacggtttactgagtgaagggctgggattgggtacggagaggctcacggagatgggtttggtggaagggagggttatggtggggcactattacccgttttgtcctcaacctgatctaacggtggggcttaactcgcatgcggatccaggggctcttacggtgttgctgcaggaccatattggggggttgcaggttgagactgaacagggttggatccatgtcaagcctcagcctaacgccttggttattaacattggagatttccttcagataatttctaatgaaacatacaagagtgctcatcatcgggtgttagccaattattctaacgagccacgagtctctattgccgttttcctcaacccaagtgatagggagaaacattttggaccattaccagagctaacatcaacagagaaaccagctctttataggaacttcacgttccatgaatttatgacaaggttcttcacgaaagagttggacggtaaatcattgacaaatttcttcaggcagtga

SEQ ID NO: 108 - protein, 398 aa, Glycine max
MHYLAFNPSSLWWQLNEFATPHTKTKPLKMSSPSPVATVVSAAALYDRAKAVKEFDETKVGVKGLIDSGIRTIPPFFVHPPETLADLKRGTKPGSAPEIPTVDLAAEESSRAAVVEQVRRAASTVGFFQVVNHGVPEELLLRTLAAVKAFHEQPAEERARVYRREMGKGVSYISNVDLFQSKAASWRDTIQIRMGPTAVDSSEIPEVCRKEVMEWDKEVARVARVLYGLLSEGLGLGTERLTEMGLVEGRVMVGHYYPFCPQPDLTVGLNSHADPGALTVLLQDHIGGLQVETEQGWIHVKPQPNALVINIGDFLQIISNETYKSAHHRVLANYSNEPRVSIAVFLNPSDREKHFGPLPELTSTEKPALYRNFTFHEFMTRFFTKELDGKSLTNFFRQ

SEQ ID NO: 109 - DNA, 1107 bp, Glycine max
  CDS (1)..(1107)
atggcagccacaagcacggataagttggaggcaggaacagtttcaagttatgacaggaaaagtgaaatcaaggcatttgatgattcaaagactggtgtccaaggactggtagaaaatggtgtaacaaaagttccacttatgttctatagtgaaaactctaatctcaatgatggcgtaaccggtgcatcatattcaaagatcagcatccccataattgacctcacaggcatccatgatgatcctattttgagagatcatgttgtgggaaaagttagatatgcatgtgagaagtggggcttctttcaggttataaatcatggaattccaactcatgttttggatgagatgatcaaaggaacttgcaggtttcaccaacaagatgcaaaggtgaggaaagagtactacactcgcgaagtaagccgaaaagttgcttatctttccaattatactctttttgaagacccttctgctgattggagggatacacttgcattttccttggcacctcatccacccgaagctgaagaatttcctgcagtttgtagagatattgtgaatgaatactcaaagaaaataatggctcttgcttatgctttgtttgagttactgtcagaggctcttggccttaatcgcttttaccttaaagaaatggattgtgctgaagggcaacttcttctctgtcactattacccagcatgtcctgagcctgaattaacaatgggaaataccaagcactcagatggtaacaccataacaatacttttgcaagaccagattggtggccttcaagttcttcatgacagtcaatggattgatgtacctcccatgcatggggctctagtagtgaacattggggatattatgcagctcatgactaatgacaagttcattagtgttcaacatagagttttagcaaaggatcaaggtcctagaatttcggttgcatcctttttcagaacaggtatatcaagagtctttggtccaatcaaagaattgttatctgaagaacatccaccagtatacagagacatttctttaaaagattacatggcgcatcgttatacaagtggcagtggaacttctgcactgttacacttcaagttgtga

SEQ ID NO: 110 - protein, 368 aa, Glycine max
MAATSTDKLEAGTVSSYDRKSEIKAFDDSKTGVQGLVENGVTKVPLMFYSENSNLNDGVTGASYSKISIPIIDLTGIHDDPILRDHVVGKVRYACEKWGFFQVINHGIPTHVLDEMIKGTCRFHQQDAKVRKEYYTREVSRKVAYLSNYTLFEDPSADWRDTLAFSLAPHPPEAEEFPAVCRDIVNEYSKKIMALAYALFELLSEALGLNRFYLKEMDCAEGQLLLCHYYPACPEPELTMGNTKHSDGNTITILLQDQIGGLQVLHDSQWIDVPPMHGALVVNIGDIMQLMTNDKFISVQHRVLAKDQGPRISVASFFRTGISRVFGPIKELLSEEHPPVYRDISLKDYMAHRYTSGSGTSALLHFKL

SEQ ID NO: 111 - DNA, 891 bp, Glycine max
  CDS (1)..(891)
atggcagccacaagcacggataagttggaggcaggaacagtttcaagttatgacaggaaaagtgaaatcaaggcatttgatgattcaaagactggtgtccaaggactggtagaaaatggtgtaacaaaagttccacttatgttctatagtgaaaactctaatctcaatgatggcgtaaccggtgcatcatattcaaagatcagcatccccataattgacctcacaggcatccatgatgatcctattttgagagatcatgttgtgggaaaagttagatatgcatgtgagaagtggggcttctttcaggttataaatcatggaattccaactcatgttttggatgagatgatcaaaggaacttgcaggtttcaccaacaagatgcaaaggtgaggaaagagtactacactcgcgaagtaagccgaaaagttgcttatctttccaattatactctttttgaagacccttctgctgattggagggatacacttgcattttccttggcacctcatccacccgaagctgaagaatttcctgcagtttgtagagatattgtgaatgaatactcaaagaaaataatggctcttgcttatgctttgtttgagttactgtcagaggctcttggccttaatcgcttttaccttaaagaaatggattgtgctgaagggcaacttcttctctgtcactattacccagcatgtcctgagcctgaattaacaatgggaaataccaagcactcagatggtaacaccataacaatacttttgcaagaccagattggtggccttcaagttcttcatgacagtcaatggattgatgtacctcccatgcatggggctctagtagtgaacattggggatattatgcaggtgggttcatcatgcatgaaataa

SEQ ID NO: 112 - protein, 296 aa, Glycine max
MAATSTDKLEAGTVSSYDRKSEIKAFDDSKTGVQGLVENGVTKVPLMFYSENSNLNDGVTGASYSKISIPIIDLTGIHDDPILRDHVVGKVRYACEKWGFFQVINHGIPTHVLDEMIKGTCRFHQQDAKVRKEYYTREVSRKVAYLSNYTLFEDPSADWRDTLAFSLAPHPPEAEEFPAVCRDIVNEYSKKIMALAYALFELLSEALGLNRFYLKEMDCAEGQLLLCHYYPACPEPELTMGNTKHSDGNTITILLQDQIGGLQVLHDSQWIDVPPMHGALVVNIGDIMQVGSSCMK

SEQ ID NO: 113 - DNA, 1125 bp, Glycine max
  CDS (1)..(1125)
atggtggccacaagcacaaatgagttggaggcaggaactgtttctaggtatgacaggaaaagtgaaatcaaggtattcgatgaatcaaaaactggggtccaaggactggtagaaaatggtgtgacaaaggttccacggatgttctattgtgaacactctaatctcagtgatggattaaccacagaatcaaattcaaacttcactatcccctccatagacctcactggcatcaatgatgaccctattttgagagatgctgttgtgggaaaagttagatatgcatgtgaaaagtggggcttctttcaggttacaaaccatggaattccaactcaagttttggatgagatgatcaaaggaactggcaggtttcatgaacaagatgccaaggtgaggaaagagtactacacccgtgatatgagcaggaaagttatttatctttccaactttagtctttatcaagatccatctgctgattggagggatacacttgcatttttttgggcgcctaattcacccaatgatgaagaattgcctgcagtttgtagagatattgtgcctgagtactcaacaaaagtaatggcacttgcttctactttgtttgagttactgtcagaggctcttggccttgatcgctttcaccttaaagaaatgggttgtgatgaagggcttcttcatctgtgtcactattacccagcatgccctgagccagaattaactatgggcactagcaggcacacagacggtaacttcatgacaatacttttgcaagaccaaatgggtggccttcaaattcttcatgaaaatcaatggattgatgtgcctgcagcacatggagctcttgtagtgaacattggagatcttctgcagctagtgactaatgaaaaattcatcagtgttcaacatagagttctagcaaaccatcaaggcccaagaacatcaattgcatccttttttagaattggtgatcagtcaccagagggactctcaagagtctttggtcccatcaaggaactgttatctgaacacaatccaccagtgtacagagaaacttctttaaaagactacttggcacatcaatacgcaaagagcatcggagcttcttcactgtcattattcaagttgtga

SEQ ID NO: 114 - protein, 374 aa, Glycine max
MVATSTNELEAGTVSRYDRKSEIKVFDESKTGVQGLVENGVTKVPRMFYCEHSNLSDGLTTESNSNFTIPSIDLTGINDDPILRDAVVGKVRYACEKWGFFQVTNHGIPTQVLDEMIKGTGRFHEQDAKVRKEYYTRDMSRKVIYLSNFSLYQDPSADWRDTLAFFWAPNSPNDEELPAVCRDIVPEYSTKVMALASTLFELLSEALGLDRFHLKEMGCDEGLLHLCHYYPACPEPELTMGTSRHTDGNFMTILLQDQMGGLQILHENQWIDVPAAHGALVVNIGDLLQLVTNEKFISVQHRVLANHQGPRTSIASFFRIGDQSPEGLSRVFGPIKELLSEHNPPVYRETSLKDYLAHQYAKSIGASSLSLFKL

SEQ ID NO: 115 - DNA, 1116 bp, Glycine max
  CDS (1)..(1116)
atggaggtttctattacagatgaaattgcaggcactatggagctcaaccctgataggctgggtgagctcaaagcatttgatgacacaaaagctggtgtgaaaggccttgttgatgaaggggtcgcaaagatcccaagattatttcatcatccacctgatgaatttgtcagggcttcaaagttaggcaacacagaatacactatacctgttatagaccttgaagaagttggcaaagatccaagttcacgccaagaaattataggcagaataagggaagcatctgagagatggggtttctttcaggtggtcaaccatggcatccctgtgactgttctagaggacttgaaagatggggtgcaaaggtttcatgaacaagatattgaggagaagaaagagctatatacccgtgaccatatgaaacctctggtgtataatagcaattttgatctgtacagttcaccagccctcaattggagggacagtttcatgtgttacctggctcctaatcctcccaaacctgaagacttgccagtagtatgcagggatatacttttggaatatgggacatatgtaatgaagcttggaattgctctatttgaattattatcagaagctcttgggctgcacccagaccatttaaaagacttgggttgtgctgagggacttatttcactttgccattactaccctgcatgccctgaaccagatttaactttgggaaccacaaagcattctgataattgtttcctcacagtgcttctccaggatcatattggtggcctgcaggttctttaccagaacatgtggattgatataaccccagaacctggggctcttgttgttaacattggtgatcttctacagcttataacaaatgacagattcaagagcgtagaacatagagtacaggcaaatctcataggtccaagaatatctgttgcatgctttttcagcgaaggtcttaaatcatcaccaaaaccctatggacctataaaagaattattgacagaagacaatcctcccaaatacagagaaaccacagttgcggagtatgtacggtatttcgaagctaaaggtcttgatggaacctctgcacttcaacacttcaagatttga

SEQ ID NO: 116 - protein, 371 aa, Glycine max
MEVSITDEIAGTMELNPDRLGELKAFDDTKAGVKGLVDEGVAKIPRLFHHPPDEFVRASKLGNTEYTIPVIDLEEVGKDPSSRQEIIGRIREASERWGFFQVVNHGIPVTVLEDLKDGVQRFHEQDIEEKKELYTRDHMKPLVYNSNFDLYSSPALNWRDSFMCYLAPNPPKPEDLPVVCRDILLEYGTYVMKLGIALFELLSEALGLHPDHLKDLGCAEGLISLCHYYPACPEPDLTLGTTKHSDNCFLTVLLQDHIGGLQVLYQNMWIDITPEPGALVVNIGDLLQLITNDRFKSVEHRVQANLIGPRISVACFFSEGLKSSPKPYGPIKELLTEDNPPKYRETTVAEYVRYFEAKGLDGTSALQHFKI

SEQ ID NO: 117 - DNA, 1137 bp, Glycine max
  CDS (1)..(1137)
atgggagtctcaggcaacaatgaagttttagtgacaacaaaggtagttgttgactatgatagagcaagtgagctcaaagcttttgatgacacacaagatggtgttatgggacttactgatgctggtgtcacaaagatccctcttatattccataaccccaaaaattctcatcatgatgaatctgatgatggttcaggtagcacacaactcagtgttccttcaatagatcttgttggtgttgctgaagatccagctacaaggaaagtggtggttgagaaaatcagacaagcatgtgagacatggggtttcttccaagttgttaatcatggaataccattgagtgttttggaggagatgaagagtggagtgaataggttctatgagcaagactctgaggtgaaaagggaactatacacacgtgaccctttgaggcctttggtgtataatagcaactttgatctttttacttcaccagctgctaattggagggataccttttactgcttcatggctcctcatccaccaaaacccgaagacttgccatcagtgtgcagagacatactgctggaatatgcaaaagaagttaagaagctggggagtgtgttgtttgagttattatcagaagcccttgagctgaatccaaactatttgaatgacattggttgcaatgagggacttacacttgtttgccattgctaccctgcatgtccagaaccagaattgactttaggtgcaaccaagcacactgataatgacttcatcactgtgcttctgcaagatcatattggtggcctccaagttcttcatgaaaacaggtgggtggatgtgtcccctgtaccaggtgctctagtgatcaacattggtgatcttcttcagcttataacaaatgacaaattcaagagtgttgagcacagagtggtggcaaaccgtgtaggtccaagagtatcagttgcaagcttttttagcacaagtcttcagccatcaacaaagctttatggccccataaaggatttagtatcagaagataatcctccgaagtacagggaaactacagtgcaaggctatgtttcctattccctgggaagaggccttgatgggacttctcctctgccacacttcaggattaaagatttctga

SEQ ID NO: 118 - protein, 378 aa, Glycine max
MGVSGNNEVLVTTKVVVDYDRASELKAFDDTQDGVMGLTDAGVTKIPLIFHNPKNSHHDESDDGSGSTQLSVPSIDLVGVAEDPATRKVVVEKIRQACETWGFFQVVNHGIPLSVLEEMKSGVNRFYEQDSEVKRELYTRDPLRPLVYNSNFDLFTSPAANWRDTFYCFMAPHPPKPEDLPSVCRDILLEYAKEVKKLGSVLFELLSEALELNPNYLNDIGCNEGLTLVCHCYPACPEPELTLGATKHTDNDFITVLLQDHIGGLQVLHENRWVDVSPVPGALVINIGDLLQLITNDKFKSVEHRVVANRVGPRVSVASFFSTSLQPSTKLYGPIKDLVSEDNPPKYRETTVQGYVSYSLGRGLDGTSPLPHFRIKDF

SEQ ID NO: 119 - DNA, 1122 bp, Glycine max
  CDS (1)..(1122)
atggaggccaaaagctcaaaccagataaaagaggaaagcaatgattccaattatgataggaaagctgaaataaaagcatttgatgattcaaaaactggtgttaaaggtcttgtagattctggtgtgaaaaagatcccacgcatgttcctttccggcatcgacataactgaaaacgtagccagtgactcgaacttgagtattcctgtcatagacctacaagacatacataacaatcctgcactgcataatgaagttgtcaccaaaattcgaagtgcatgccaggagtggggatttttccaagtgatcaatcatggaattccaattagtgttatggatcaaatgattgatggaatccgaaggtttcatgaacaagatactgatgtcaggaaacagttttactctagagatttgaagaagacaattctatacaattccaatactagcctgtacctagacaagtttgctaactggagagactcacttggatgttctatggctcctaatccacccaaaccagagaatttacctacagtatttagagacataattattgaatactccaaggaaattatggcactgggttgtacaatttttgagttattgtcagaggctcttggccttaatccatcttatctaaaagaaatgaattgtgctgaaggacttttcattcagggtcattactatccaccttgccctgaacctgaattaactttgggcacgtccaagcacactgatagttccttcatgacaatagttctacaaggccaactgggtggtcttcaagttcttcatgaaaaactatggtttaatgttccacctgtgcatggagctcttgttgtaaacgtaggagatattctacaacttataacgaatgacaattttgtcagcgtttatcatcgggttttatcgaatcatggagggccaagagtttcagtagcaagcttcttttcgaattcgcatgatccagcaaaaggtgcatcaatggtttatagtccaattaaggagttattatcagaagaaaacccagcaatctatagggacactaccataggagagatcatggcacaccattttgctaaggggcttgatgggaactctgccttgcagcctttcaggttgtga

SEQ ID NO: 120 - protein, 373 aa, Glycine max
MEAKSSNQIKEESNDSNYDRKAEIKAFDDSKTGVKGLVDSGVKKIPRMFLSGIDITENVASDSNLSIPVIDLQDIHNNPALHNEVVTKIRSACQEWGFFQVINHGIPISVMDQMIDGIRRFHEQDTDVRKQFYSRDLKKTILYNSNTSLYLDKFANWRDSLGCSMAPNPPKPENLPTVFRDIIIEYSKEIMALGCTIFELLSEALGLNPSYLKEMNCAEGLFIQGHYYPPCPEPELTLGTSKHTDSSFMTIVLQGQLGGLQVLHEKLWFNVPPVHGALVVNVGDILQLITNDNFVSVYHRVLSNHGGPRVSVASFFSNSHDPAKGASMVYSPIKELLSEENPAIYRDTTIGEIMAHHFAKGLDGNSALQPFRL

SEQ ID NO: 121 - DNA, 1104 bp, Glycine max
  CDS (1)..(1104)
atggattccacttatgataggaaagctgaagtgaaagcctttgatgattcaaaagctggtgttaagggtcttgtagagtctggagtcacaaagatcccacgtatgttccattctggaaagttggatttggatatcattgaaacctcaggtggtgactccaagttgattatccccatcatagacttcaaagacatacattctaatccagctctgcgttcagaagtaattggcaaaattcgaagtgcatgccatgagtggggatttttccaggtgattaatcatggaattccaatcagtgtcttggatgagatgattgatggaattcgtagatttcatgaacaagacactgaggcaaggaaggagttctatactcgggattctaagaaaaaagttgtgtacttttccaaccttggcttgcacagtggcaaccctgttaattggagagatacaattggttttgctgtttctcctgatccgcccaaacctgagcatataccatctgtatgcagggatattgtgattgagtatacaaagaaaataagggatgtgggttttacaatctttgagttattgtcagaagctttgggacttaactcttcttaccttaacgaattgagttgtggtgaaggactctttactgtgggtaactactatccagcatgccctgaacctgaattaactatgggcgctgccaagcacacagatggtaacttcatgactttacttctacaagaccaaattggtggtcttcaagttcttcatcagaatcaatgggtcaatcttcctccagtacatggagctcttgttgtaaacgtaggagaccttctacagctcatcacaaatgacaagtttgtcagtgtgtgccaccgggtcttatcaaagaagacatgcccaagaatttctgtagcaagcttctttgggaccttctttggacattcggatgacccagttgaaggtttacagaagttatatggtccaattaaggaactaatttcagaagaaaatccaccaatctacagagacactaccataaaagatttcgtggcatactactatgcaaaggcccttgatggaaaatcttccttgaaccgcttcaggttgtga

SEQ ID NO: 122 - protein, 367 aa, Glycine max
MDSTYDRKAEVKAFDDSKAGVKGLVESGVTKIPRMFHSGKLDLDIIETSGGDSKLIIPIIDFKDIHSNPALRSEVIGKIRSACHEWGFFQVINHGIPISVLDEMIDGIRRFHEQDTEARKEFYTRDSKKKVVYFSNLGLHSGNPVNWRDTIGFAVSPDPPKPEHIPSVCRDIVIEYTKKIRDVGFTIFELLSEALGLNSSYLNELSCGEGLFTVGNYYPACPEPELTMGAAKHTDGNFMTLLLQDQIGGLQVLHQNQWVNLPPVHGALVVNVGDLLQLITNDKFVSVCHRVLSKKTCPRISVASFFGTFFGHSDDPVEGLQKLYGPIKELISEENPPIYRDTTIKDFVAYYYAKALDGKSSLNRFRL

SEQ ID NO: 123 - DNA, 1122 bp, Glycine max
  CDS (1)..(1122)
atggtagtcacaaacacaaaccagttaggggaaaccattgattccacttatgataggaaagctgaaaagaaagcctttgatgattcaaaagctggtgttagaggtcttgtagagtccggagtgacgaagattcctcgcatgtttcatgctggcaagctggatgtcattgaaacctcacctagtcacaccaagttgagtatccccatcatagacctcaaggacatacactctaatccagctctgcatacacaagtaatgggcaaaattcgaagtgcatgccatgagtggggatttttccaggtgattaatcatggaattccaatcagtgtcttggatgagatgattggtggaattcgtagatttcatgaacaagatgctgaggtaaggaaagagttctatactcgagatttgaagaaaaaagttttgtattactccaacattagcttgtacagtgaccaacctgttaattggagagatacatttggttttggtgttgctcctgatccagccaagcctgaagaaataccatctgtatgcagggacattgtgattgaatattcaaagaaaataagggatttgggttttacaatgtttgagttattgtcagaggctttgggacttaatccttcttaccttaaagaattgaattgtgctgagggactctttattttgggtcactactatccagcatgccctgaacctgaattaactatgggcactaccaagcacacagatagtaacttcatgactttacttttacaagaccaacttggtggtcttcaagttcttcatcagaatcaatgggtcaatgttcctcctgtacatggagctctggttgtaaacataggagatcttctacagcttatcacaaatgacaagtttgttagtgtgtatcaccgtgtcttatcacaaaacacaggcccaagaatatctgtagcaagcttctttgtaaattcacatgacccagttgagggtacatcaaagatgtatggtccaattaaggaactgctttcagaagaaaacccaccaatctacagagacacaaccttgaaagagtttttggcatattattatgcaaagggccttgatggaaattcttctttggaccccttcagggtgtga

SEQ ID NO: 124 - protein, 373 aa, Glycine max
MVVTNTNQLGETIDSTYDRKAEKKAFDDSKAGVRGLVESGVTKIPRMFHAGKLDVIETSPSHTKLSIPIIDLKDIHSNPALHTQVMGKIRSACHEWGFFQVINHGIPISVLDEMIGGIRRFHEQDAEVRKEFYTRDLKKKVLYYSNISLYSDQPVNWRDTFGFGVAPDPAKPEEIPSVCRDIVIEYSKKIRDLGFTMFELLSEALGLNPSYLKELNCAEGLFILGHYYPACPEPELTMGTTKHTDSNFMTLLLQDQLGGLQVLHQNQWVNVPPVHGALVVNIGDLLQLITNDKFVSVYHRVLSQNTGPRISVASFFVNSHDPVEGTSKMYGPIKELLSEENPPIYRDTTLKEFLAYYYAKGLDGNSSLDPFRV

SEQ ID NO: 125 - DNA, 1113 bp, Glycine max
  CDS (1)..(1113)
atggggttcactagtacaagtgaaaaagaagagatgttcatggcggatgcagaaagagcaaaggagctcaaagcttttgatgacacaaaacttggtgtcaaaggacttgttgatgcaggaattaccaagatccctcgcatattctatcatccctctgataatttcaagagggtctcagaatttggccatgaagattacactattccagttatagacctggcaagaattcatgaagatcctagtgaacgcaaaagggttgttgagagagtcaaagaagcatcagagacatggggtttctttcagattgtgaatcatggcatccctgtgagtactctggaggagatgtcagatggggtgctaaggttttttgagcaagatagtgaggtcaagaaggagttttatactcgtgatcaaagaccctttatgtataatagcaattttaatttatataccaaagctccaactagttggaaggactctttcttctgtgatcttgcccctattgcccctaaaccagaggactttccatctgtttgcagagacatactggtgggttactcaaatcaagtaatgaaactagggactttgctgtttgagttactatcagaagctcttggtctgaactcaacctacttaagagatatcggttgcaatgtgggacaatttgcttttggccattactatccttcctgtcctgaatcagaattaactttgggaacgataaagcatgctgacgttgatttcattacagtgcttctacaagaccatataggtggcctccaagttcttcatcaggacacgtggatcgatgtaacccctgtgcctggggctctagttgttaacattggtgattttctacagctaatctcaaatgacaaattcaagagtgctcaacacagagtactggccaaaactgttggtccaagagtctctattgcatgcttttttagtccagcattccatccatcttcaaggacttatgctcccattaaggaacttttatctgaagacaatcctgcaaaatacagagaattttcaattccagaatttacagctcactacagaacaaaatgcatgaagggtacttctcctctactacatttcaagatttga

SEQ ID NO: 126 - protein, 370 aa, Glycine max
MGFTSTSEKEEMFMADAERAKELKAFDDTKLGVKGLVDAGITKIPRIFYHPSDNFKRVSEFGHEDYTIPVIDLARIHEDPSERKRVVERVKEASETWGFFQIVNHGIPVSTLEEMSDGVLRFFEQDSEVKKEFYTRDQRPFMYNSNFNLYTKAPTSWKDSFFCDLAPIAPKPEDFPSVCRDILVGYSNQVMKLGTLLFELLSEALGLNSTYLRDIGCNVGQFAFGHYYPSCPESELTLGTIKHADVDFITVLLQDHIGGLQVLHQDTWIDVTPVPGALVVNIGDFLQLISNDKFKSAQHRVLAKTVGPRVSIACFFSPAFHPSSRTYAPIKELLSEDNPAKYREFSIPEFTAHYRTKCMKGTSPLLHFKI

SEQ ID NO: 127 - DNA, 1074 bp, Glycine max
  CDS (1)..(1074)
atggctgattcagatagagaaaaggagctcaaggcttttgatgacacaaaacttggtgtgaaaggacttgttgatgcaggcatcaccaagatacctcgcattttccatcatccaccagataacttcaagaaggcctcagatttaggctataaagattacactattcctgttatagacctcgcaagcattcgtgaagatctgagagaacgcgaaagggttgttgagagaatcaaagaagcatcagagacatggggtttctttcagattgtgaatcatggcatccctgtgagtactcttgaggagatggtagatggggtgctaaggttttttgagcaagatagtgaggtcaagaaggagttttatactcgtgagctaagaccatttttttacactagcaattataacttatatactactgctccaactacttggaaggactctttctactgcaatttggctcctaatgcccctaagccagaagatttgccagcagtatgcagagacatactggtggaatactcaaatgaagtattgaaattggggactttattatttgagttattatcagaagctcttggtctggatccaacttacttaaccaatattggttgcactgaggggctttttgcttttagccactactatcctgcatgtcctgaaccagaattaactatgggaacagcaaagcattctgatatggattttattacagtgctcttacaaggccatattggtggcctccaagtttttcataaggacatgtggattgatttaccccctctaactggggccctagttgttaacatcggtgattttttgcagcttatctcaaatgacaaattcaagagcgctcagcatagagtactggccaatcctataggtccaagggtgtctattgcatgcttttttagcacaggtcttaatccaacttcaaggatttatggtcccatcaaggaacttttatctgaagacaatcctgcaaaatacagagaatttaccgttcctaaatttttagctcaccacagaacaaaatgtctgaatggtacttctccactactgcatttcaggatttga

SEQ ID NO: 128 - protein, 357 aa, Glycine max
MADSDREKELKAFDDTKLGVKGLVDAGITKIPRIFHHPPDNFKKASDLGYKDYTIPVIDLASIREDLRERERVVERIKEASETWGFFQIVNHGIPVSTLEEMVDGVLRFFEQDSEVKKEFYTRELRPFFYTSNYNLYTTAPTTWKDSFYCNLAPNAPKPEDLPAVCRDILVEYSNEVLKLGTLLFELLSEALGLDPTYLTNIGCTEGLFAFSHYYPACPEPELTMGTAKHSDMDFITVLLQGHIGGLQVFHKDMWIDLPPLTGALVVNIGDFLQLISNDKFKSAQHRVLANPIGPRVSIACFFSTGLNPTSRIYGPIKELLSEDNPAKYREFTVPKFLAHHRTKCLNGTSPLLHFRI

SEQ ID NO: 129 - DNA, 1104 bp, Glycine max
  CDS (1)..(1104)
atggcctctgcagcttccatttcctcatcacaaccagaagcaccaaaggttcatgcatctgatatttctagcatcaaagcctttgcagaatcaaagggagcctctctgatcccttacacctaccactccatcacagagcaccatgatgatgatgtagcagatgagcttgctgcttccatcccagtcatcgacttgtctctcctcacttcgcatgaccctcaaatccacgccaaagccgtgcaccaactcggcaaggcctgtgcagagtggagtttcttcatgctcacaaatcatggaattcccgagagcctggtggaggagttgatgaaaaagtctcgcgagtttcatgatttgccgatggaagaaaagaaggagtttggtaataaaggaccctttgaaccgatcaggcatggcaccagcttctgtccagaagcagagaatgttcattattggagagattatctcaaggccatcacgtttcctgaattcaacttcccctacaagccaccaggttacagggaagttgcttatgattacagcaaaaaaatcagaggtgtgacaaggaagttgcttgaaggaatatcagagagtttgggattagaatccaattccataatcgagtccactgattttgactctggccatcagctgtttgttgtgaacctgtatccaccatgtccacaaccgcaccttgctctggggctgccttctcattctgacgtaggtttattgaccttgctcacgcagaatggaattggagggcttcaggttaagcacaatggcaaatgggtcaatgtcaatccccttcccaactgcctaattgttttgctttcagatcaactcgaggttgtgagtaatgggaagtacgctagggtgatgcaccgagcaatactcaacaatgcagacactaggatcagtgttgtgctggcgaatggacctgcgctagataaggaaattggacctttgccggagctactgcagaattataagccattgttcagaagcattaaataccgagattacttccaaattcagcagaagtcacgattacaagataaaagtgggacttatggtcctatatatgaatggtcgaagcatttatag

SEQ ID NO: 130 - protein, 367 aa, Glycine max
MASAASISSSQPEAPKVHASDISSIKAFAESKGASLIPYTYHSITEHHDDDVADELAASIPVIDLSLLTSHDPQIHAKAVHQLGKACAEWSFFMLTNHGIPESLVEELMKKSREFHDLPMEEKKEFGNKGPFEPIRHGTSFCPEAENVHYWRDYLKAITFPEFNFPYKPPGYREVAYDYSKKIRGVTRKLLEGISESLGLESNSIIESTDFDSGHQLFVVNLYPPCPQPHLALGLPSHSDVGLLTLLTQNGIGGLQVKHNGKWVNVNPLPNCLIVLLSDQLEVVSNGKYARVMHRAILNNADTRISVVLANGPALDKEIGPLPELLQNYKPLFRSIKYRDYFQIQQKSRLQDKSGTYGPIYEWSKHL

SEQ ID NO: 131 - DNA, 1110 bp, Glycine max
  CDS (1)..(1110)
atggatgtcgccgtcgccggaaactccacaccctataaccgtttgcaagaactaaaggccttcgacgaatccaaagctggagttaaaggcctggtcgactccggcatcaccaaactcccaaaaattttcgtccggccgccggaggacctcgccgccgccgacccagtatccgacaaccctgccggtgcccagttcacgatccccgtaattgacctcgacggccttaccggcgagcgctccggcgtggtggctggagtccggcgggcggcggagacaatggggttcttccaggtggtgaatcacggaattccgctgaaggtgctggaggagacgatggcggcggtccatgagttccacgagctgccacaagagttgaaggctgagtattatagcagggagcagatgaagaaggtgaagtatgggagcaactttgatttgtatcagtcaaagtatgctaattggagggacactcttttctgtgtgatgggtcctgaccctcttgatcctcaagaactgcctccgatctgtagggatgtagcaatggaatactctaggcaagttcagttgttggggagagttttatttgggttactatcagaagcacttggactcgaccctgaccatcttgaaggcatggattgtgcaaagggccactcaattttgtttcactattatccatcatgtcctgagcctgaactcactatgggcactaccaggcactctgatcctgatttcctcacaattctgcttcaagatcacattggagggctccaagttttgggcccttatggatgggttgatgttccccctgttcctggagctctagtagtaaacattggagatctgctacagctaatatccaatgacaaattcaaaagtgtggagcaccgtgtgcttgcaaaccgcatagggcctagagtatcagtggcatgttttttcactcttcatctctacccaacaacaagaatatatgggcccatcaaggaactattgtcagaagaaaaacccccggtttacagggaaacatcactgaaagatttcattgcttactatgataataagggacttgatgggaattcagctcttgaccattttatgatatcgcgttaa

SEQ ID NO: 132 - protein, 369 aa, Glycine max
MDVAVAGNSTPYNRLQELKAFDESKAGVKGLVDSGITKLPKIFVRPPEDLAAADPVSDNPAGAQFTIPVIDLDGLTGERSGVVAGVRRAAETMGFFQVVNHGIPLKVLEETMAAVHEFHELPQELKAEYYSREQMKKVKYGSNFDLYQSKYANWRDTLFCVMGPDPLDPQELPPICRDVAMEYSRQVQLLGRVLFGLLSEALGLDPDHLEGMDCAKGHSILFHYYPSCPEPELTMGTTRHSDPDFLTILLQDHIGGLQVLGPYGWVDVPPVPGALVVNIGDLLQLISNDKFKSVEHRVLANRIGPRVSVACFFTLHLYPTTRIYGPIKELLSEEKPPVYRETSLKDFIAYYDNKGLDGNSALDHFMISR

SEQ ID NO: 133 - DNA, 1086 bp, Glycine max
  CDS (1)..(1086)
atggatgtcgccgtctccggaaactctctcgccggaacttccacaccctataaccgtttgcaagaactaaaggccttcgacgaatccaaagctggagttaaaggcctggtcgactccggcatcaccaaactcccaaaaattttcgtccggccgccagaggacctcgccgccgccgacccagtatccggcaaccctgccggtgcccagttcacgatccccataattgacctcgacggccttaccggcgagcgctccggcgtggtggctggagtccggcgggcggcggagacggtggggttcttccaggtggtgaatcacggaattccggtgaaggtgctggaggagacgatggcggcggtgcatgagttccacgagctgccacaagagttgaaggctgagtactatagcagggagcagatgaagaaggtgaagtatgggagcaactttgatttgtatcagtcaaagtatgctaattggagggacactcttttctgtgtgatgggtcctgaccctcttgatcctcaagaactgcctccaatctgtatggatgtagcaatggaatactctaggcaagttaagttgttggggagagttttatttgggttactatcagaagcacttggactcgaccctgaccatcttgaaggcatggattgtgcaaagggccactcaattttgtttcactattatccatcatgtcctgagcctgaactcactatgggcactaccaggcactctgatcctgatttcctcacaattctgcttcaagatcacattggagggctccaagttttgagccataatggatgggttgatgttccccctgttccaggagctctagtagtaaacattggagatctgctacagctaatatccaatgacaaattcaaaagtagtatcagtggcatgttttttcaccattcatttctacccatcaacaagaatatatgggcccatcaaggaactattgtcagaagaaaacccccggtttacagggaaacatcactgaaagatttcattgcttactattataataagggacttgatgggaattcagctcttgaccattttatgatatcgcgttaa

SEQ ID NO: 134 - protein, 361 aa, Glycine max
MDVAVSGNSLAGTSTPYNRLQELKAFDESKAGVKGLVDSGITKLPKIFVRPPEDLAAADPVSGNPAGAQFTIPIIDLDGLTGERSGVVAGVRRAAETVGFFQVVNHGIPVKVLEETMAAVHEFHELPQELKAEYYSREQMKKVKYGSNFDLYQSKYANWRDTLFCVMGPDPLDPQELPPICMDVAMEYSRQVKLLGRVLFGLLSEALGLDPDHLEGMDCAKGHSILFHYYPSCPEPELTMGTTRHSDPDFLTILLQDHIGGLQVLSHNGWVDVPPVPGALVVNIGDLLQLISNDKFKSSISGMFFHHSFLPINKNIWAHQGTIVRRKPPVYRETSLKDFIAYYYNKGLDGNSALDHFMISR

SEQ ID NO: 135 - DNA, 1378 bp, Glycine max
  CDS (74)..(1183)
  misc_feature (671)..(671): b is g, c or t
  misc_feature (878)..(878): m is a or c
  misc_feature (926)..(926): h is a, c or t
  misc_feature (933)..(933): y is t or c
aacaaaagcgcacacacagcgacattaacttccacgagaaagttgggttgtagcgtagcacaccgaaccaaaaatggatgtcgccgtcgccggaaactccacaccctataaccgtttgcaagaactaaaggccttcgacgaatccaaagctggagttaaaggcctggtcgactccggcatcaccaaactcccaaaaattttcgtccggccgccggaggacctcgccgccgccgacccagtatccgacaaccctgccggtgcccagttcacgatccccgtaattgacctcgacggccttaccggcgagcgctccggcgtggtggctggagtccggcgggcggcggagacaatggggttcttccaggtggtgaatcacggaattccgctgaaggtgctggaggagacgatggcggcggtccatgagttccacgagctgccacaagagttgaaggctgagtattatagcagggagcagatgaagaaggtgaagtatgggagcaactttgatttgtatcagtcaaagtatgctaattggagggacactcttttctgtgtgatgggtcctgaccctcttgatcctcaagaactgcctccgatctgtagggatgtagcaatggaatactctaggcaagttcagttgttggggagagttttatttgggttactatcabaagcacttggactcgaccctgaccatcttgaaggcatggattgtgcaaagggccactcaattttgtttcactattatccatcatgtcctgagcctgaactcactatgggcactaccaggcactctgatcctgatttcctcacaattctgcttcaagatcacattggagggctccaagttttgggcccttatggatgggttgatgttmcccctgttcctggagctctagtagtaaacattggagatctgctacaghtaatatycaatgacaaattcaaaagtgtggagcaccgtgtgcttgcaaaccgcatagggcctagagtatcagtggcatgttttttcactcttcatctctacccaacaacaagaatatatgggcccatcaaggaactattgtcagaagaaaaacccccggtttacagggaaacatcactgaaagatttcattgcttactatgataataagggacttgatgggaattcagctcttgaccattttatgatatcgcgttaaatatggaagtgtaagtctgattattcattggctttcacaatcagttattaagttgtcttaaattgcaatgatcatgcttcttatgagcaacatcaaccggttacagacataattttgaatgtaaatttgtgcacactttgacatacaaagtatcttctaaatgagaaatccaatccagctcaaactttcggctcc

SEQ ID NO: 136 - protein, 369 aa, Glycine max
  misc_feature (200)..(200): The Xaa at location 200 stands for Stop, Gln, or Glu.
  misc_feature (269)..(269): The Xaa at location 269 stands for Pro, or Thr.
  misc_feature (285)..(285): The Xaa at location 285 stands for Ile, or Leu.
  misc_feature (287)..(287): The Xaa at location 287 stands for Phe, or Ser.
MDVAVAGNSTPYNRLQELKAFDESKAGVKGLVDSGITKLPKIFVRPPEDLAAADPVSDNPAGAQFTIPVIDLDGLTGERSGVVAGVRRAAETMGFFQVVNHGIPLKVLEETMAAVHEFHELPQELKAEYYSREQMKKVKYGSNFDLYQSKYANWRDTLFCVMGPDPLDPQELPPICRDVAMEYSRQVQLLGRVLFGLLSXALGLDPDHLEGMDCAKGHSILFHYYPSCPEPELTMGTTRHSDPDFLTILLQDHIGGLQVLGPYGWVDVXPVPGALVVNIGDLLQXIXNDKFKSVEHRVLANRIGPRVSVACFFTLHLYPTTRIYGPIKELLSEEKPPVYRETSLKDFIAYYDNKGLDGNSALDHFMISR

SEQ ID NO: 137 - DNA, 1438 bp, Glycine max
  CDS (26)..(1111)
gtttccagtttccaactttcctggtatggcattagaggcagttaatgacagaaaagctgaagttcaagcatttgatgattctaaaacgggtgtaaaaggtgtcctagattctggggtaacaaagatccctaccatgttccatgtcaagttagactcaactcacacctcaccaactcactccaacttcaccatcccaatcatagatcttcagaacataaacagcaattcaactctgcatgctgaagtggttgaccagcttaggagtgcatctcagaagtggggatttttccaagtgatcaatcatggcgttcctgtggaggttttggatgagatgatcagtggaaattgcaggtttcatgagcaagatgctgaggcaaggaagcccttttactcgagagatagcagtaagaaagtcaggtatttttctaatgggaagctgttcagagacatggctggtacttggagggacacaattgcatttgatgtgaatcctgatcccccaaacccacaagatataccagcagtgtgtagagatattgtggctgaatattcaaaacaagtaaaagcgttaggtaccacgatctttgagctactgtcagaggctcttggccttgatccttcttaccttgaagaaatggactgcactaaagcactttatgttatgggtcagtactatccaaaatgccctgaaccagaattaactatgggaatttcaaagcacactgattgtgacttcataacaatacttttgcaagatcagattggtggtcttcaagttcttcatgagaatcattgggttaatgctcctccagtgcgaggagctcttgttgtcaacattggagatattctgcagcttatgactaatgacaagttcatcagtgtttatcaccgggtcttgttgaggaatatgggccctagaatttctgtagcaaccttcttcatgaattttaccatatctaaatgtacatcgaagagttatggtccaataaaggaattgttatcagaagaaaaccccccagtctatagggacatgaatatgaaagaaatcttgacaaattattatgcaaaaggccttgatgggagctcctacttgctgcctttaaggttgtgaagcaaataaaagtattagatcgatcttttcttgattctcatggagttggctagtctgcatcaatttatcgtagttaactggtggctggtgcctataggctttatctgagattttcaatgtccataggaatttaaataaactgtacaagttctagaagaataaagttttggcatatttagttcattgtactatagaagagcataactttcaattttctgtattatgacaattgcgtgatatgttcttgtggttgtcaataaatttttcaactttgttgctgtgaattacaaatttgctttcagttagttacttagttgacactctatg

SEQ ID NO: 138 - protein, 361 aa, Glycine max
MALEAVNDRKAEVQAFDDSKTGVKGVLDSGVTKIPTMFHVKLDSTHTSPTHSNFTIPIIDLQNINSNSTLHAEVVDQLRSASQKWGFFQVINHGVPVEVLDEMISGNCRFHEQDAEARKPFYSRDSSKKVRYFSNGKLFRDMAGTWRDTIAFDVNPDPPNPQDIPAVCRDIVAEYSKQVKALGTTIFELLSEALGLDPSYLEEMDCTKALYVMGQYYPKCPEPELTMGISKHTDCDFITILLQDQIGGLQVLHENHWVNAPPVRGALVVNIGDILQLMTNDKFISVYHRVLLRNMGPRISVATFFMNFTISKCTSKSYGPIKELLSEENPPVYRDMNMKEILTNYYAKGLDGSSYLLPLRL

SEQ ID NO: 139 - DNA, 1418 bp, Glycine max
  CDS (49)..(1170)
  misc_feature (1407)..(1407): n is a, g, c or t
  misc_feature (1408)..(1408): n is a, g, c or t
  misc_feature (1409)..(1409): n is a, g, c or t
aattcggctcgagggtagccactgcatttctgcttgttttctctgaacatggtagtcacaaacacaaaccagttaggggaaaccattgattccacttatgataggaaagctgaaaagaaagcctttgatgattcaaaagctggtgttaaaggtcttgtagagtccggagtgacaaagattcctcgcatgtttcatgctggcaagctggatgtcattgaaacctcacctagtcactccaagttgagtatccccatcatagacctcaaggacatacactctaatccagctctgcatacacaagtaatgggcaaaattcgaagtgcatgccatgagtggggatttttccaggtgattaatcatggaattccaatcagtgtcttggatgagatgattgatggaattcgtagatttcatgaacaagatgctgaggtaaggaaagagttctatactcgagatttgaagaaaaaagttttgtattactccaacattagcttgtacagtgaccaacctgttaattggagagatacatttggttttggtgttgctcctgatccagccaagcctgaagaaataccatctgtatgcagggacattgtgattgaatattcaaagaaaataagggatttgggttttacaatgtttgagttattgtcagaggctttgggacttaatccttcttaccttaaagaattgaattgtgctgagggactctttattttgggtcactactatccagcatgccctgaacctgaattaactatgggcactaccaagcacacagatagtaacttcatgactttacttttacaagaccaacttggtggtcttcaagttcttcatcagaatcaatgggtcaatgttcctcctgtacatggagctctggttgtaaacataggagatcttctacagcttatcacaaatgacaagtttgttagtgtgtatcaccgtgtcttatcacaaaacacaggcccaagaatatctgtagcaagcttctttgtaaattcacatgacccagttgagggtacatcaaagatgtatggtccaattaaggaactgctttcagaagaaaacccaccaatctacagagacacaaccttgaaagagtttttggcatattattatgcaaagggccttgatggaaattcttctttggaccccttcagggtgtgaatcaaacatgggaaagcactcttaattctcttggatctggctgtaattcatctaaataagaagccactttctagttttccagaatgacctttgtataaacagcagcaacaagttctccagattgaaaataaatgaattatctatgttcacattttccaatgtgtgcttattgagtttaacaataaaatttattaaataatgtaaattcatatgaatgatgatttgaaatgtaatttnnnttataattt

SEQ ID NO: 140 - protein, 373 aa, Glycine max
MVVTNTNQLGETIDSTYDRKAEKKAFDDSKAGVKGLVESGVTKIPRMFHAGKLDVIETSPSHSKLSIPIIDLKDIHSNPALHTQVMGKIRSACHEWGFFQVINHGIPISVLDEMIDGIRRFHEQDAEVRKEFYTRDLKKKVLYYSNISLYSDQPVNWRDTFGFGVAPDPAKPEEIPSVCRDIVIEYSKKIRDLGFTMFELLSEALGLNPSYLKELNCAEGLFILGHYYPACPEPELTMGTTKHTDSNFMTLLLQDQLGGLQVLHQNQWVNVPPVHGALVVNIGDLLQLITNDKFVSVYHRVLSQNTGPRISVASFFVNSHDPVEGTSKMYGPIKELLSEENPPIYRDTTLKEFLAYYYAKGLDGNSSLDPFRV

SEQ ID NO: 141 - DNA, 858 bp, Arabidopsis thaliana
  CDS (1)..(858)
atgatgaccaaaaactctatcgaattcgatccttacatcgagcgtaaagctttcgacgaaacaaaacaaggtgtgaaaggcctcgtcgacgctaaaatcactgaagttcctcgtatcttccaccaccgtcaagatatcttaaccaacaagaaaccttctgcttcggtatcagacctagagatccctatcatcgactttgcaagcgtccacgcggacacagcctcacgtgaagccatcgtagagaaagtcaaatatgcggtggagaattggggattcttccaggttatcaatcatagtattcctttaaacgttcttgaagagattaaagatggggttcgtaggtttcacgaggaagatcctgaggtcaagaaatcattcttctcgcgtgatgccggcaacaaaaaatttgtatacaacagtaacttcgatctatacagttcttcgccgtctgttaattggagagattctttctcttgttacatagctccagatcctccagctcctgaggagatccctgagacttgcagggatgctatgtttgaatactcaaagcatgtgttgagtttcggtggtttactatttgagcttctctcagaagcacttggtttgaaatctcagacccttgagagcatggattgcgtgaagactttgcttatgatctgccattattacccaccttgtccacaacctgacctaacgttagggataacgaaacactcagataactccttcctcacgcttcttctccaagacaacattggtggtcttcaaattcttcatcaagactcttgggttgatgtctctcctatccatggagctcttgtcgtcaacattggagattttttgcaggtaaagtaa

SEQ ID NO: 142 - protein, 285 aa, Arabidopsis thaliana
MMTKNSIEFDPYIERKAFDETKQGVKGLVDAKITEVPRIFHHRQDILTNKKPSASVSDLEIPIIDFASVHADTASREAIVEKVKYAVENWGFFQVINHSIPLNVLEEIKDGVRRFHEEDPEVKKSFFSRDAGNKKFVYNSNFDLYSSSPSVNWRDSFSCYIAPDPPAPEEIPETCRDAMFEYSKHVLSFGGLLFELLSEALGLKSQTLESMDCVKTLLMICHYYPPCPQPDLTLGITKHSDNSFLTLLLQDNIGGLQILHQDSWVDVSPIHGALVVNIGDFLQVK

SEQ ID NO: 143 - DNA, 1086 bp, Oryza sativa Japonica Group
  CDS (1)..(1086)
atgggcagcagctccggctccgaccggctacgcgacctccaggccttcgacgacacaaaggccggcgtgaagggcctcgtcgatgccggcgtcacaaccatccccgccatcttccaccaccacccgctgctactggacgatgcggaggaggatgcggatgttatcccggtgatcgatctgcaggcggacgttgaccgaggccatctggttggtcaggtgagggcggccgcccagtgtgtggggttcttccaggtggtgaaccacggcatccccggcgagctcctggaggagatgctggcggcggtgcggcggttcaacgagcagccggcggagggcaagaaagcctggtacagcagggacagcgggcggagggtgaagttcaactccaatttcgacctgttccagtcgccggccgccaactggcgtgacacgctgttgctggagctgacgccacggccggggccggcagcggaggagatcccaccggcgtgcaggggcgtggtgggggagtacgtggaggcggtgcagaggctgggcggggcgctgttggagctgctgtcggaggcgctggggctcccgccggagtacctcggcggcctcggtggggggctggctaccatggcagcgcactactacccgccatgcccggagccgcacctgacgctgggcaccacacgccactccgaccccagcttcctgacagtgctgctgcaggagagcaagggcctgcaggtgctcatgaggcagcgccagcggtgggtggacgtccctccggtggccggcgctctggtggtcaacatcggcgacctcctccagctagtgtccaacgacctcttccgaagcgtggagcaccgggtgttggcaaccaccgccgccgcggagcctcgcctctccgtcgcctgcttcttccgtcccgactacgcctgcaccagggtgtacgcccccgtcaccaccacgccgccgccaccgctctacaggagcaccaccatgccggagttcctctcgcattacagagccaaaggcctcgacggccgatccgcgctccaccacttcaggatccctcctccttcatctccaccacattaa

SEQ ID NO: 144 - protein, 361 aa, Oryza sativa Japonica Group
MGSSSGSDRLRDLQAFDDTKAGVKGLVDAGVTTIPAIFHHHPLLLDDAEEDADVIPVIDLQADVDRGHLVGQVRAAAQCVGFFQVVNHGIPGELLEEMLAAVRRFNEQPAEGKKAWYSRDSGRRVKFNSNFDLFQSPAANWRDTLLLELTPRPGPAAEEIPPACRGVVGEYVEAVQRLGGALLELLSEALGLPPEYLGGLGGGLATMAAHYYPPCPEPHLTLGTTRHSDPSFLTVLLQESKGLQVLMRQRQRWVDVPPVAGALVVNIGDLLQLVSNDLFRSVEHRVLATTAAAEPRLSVACFFRPDYACTRVYAPVTTTPPPPLYRSTTMPEFLSHYRAKGLDGRSALHHFRIPPPSSPPH

SEQ ID NO: 145 - DNA, 1098 bp, Oryza sativa Japonica Group
  CDS (1)..(1098)
atggcgtcctccgccgccgccgccgcggcaacggaccgcatcgccctcgtcaaggccttcgacgagacacgcaccggcgtccgcggcctcgtcgagtccggcgtctctgccgtcccggtcatcttccgccaccccgacccctacgcctccgtccccctcgctccacccggcgtctccatccccgtcgtcaacctctccctccccgcgccgctcgccgccgaggccgcggcgggagccgcgcgcgactgggggttcttctacctcgtcaaccaccacgcccttgtcccctccggcttcaccgccgggctcctcgccgccgtccgcgccttcaacgagctccccgccgcggagcgcgccgcgcactacggccgctccgtggacggcggggtcagctactcctccaacgtcgacctgtaccggtcgggcgccgcgagctggcgcgacacgatccaggtcgtgctcgggccctcgcggcccgacgcggagcgcatcccggcggcgtgccgcgccgaggtcgtcggctgggacgcgcacgccaccgccgtggcccgcgccgtcatggcgctgctctgcgaggggctcggcctccggggcgagacgctggaggaggcctcctgcctcgaggggaaattgatggtgtgccactactacccggtgtgccctgagcccgagcgcaccatggggatcgtcccgcacacggaccccggcgtgctcaccgtcctcgcgcaggacggcgtcggtggcctgcaggtgaagcacacgaacgaggatggggagagctactgggtggataccaagcctgtgcctggcgctcttgtgatcaatgtcggggacctattgcagatcatgtctaatgataagtacaagagtgtggaacaccgggtagtaatgaagtcgcatgaagaagccagagtttcaagcgccatcttttacaatcctggcaagagaggcgactctgttttttatggaccattgccagatctgatttcttcgggaaacccaccaaagtacaggaattttactatgtctgagtttctgggggccttctttaaacgagaccttgcgagcaaagctctcatcgagcacttcaaaatataa

SEQ ID NO: 146 - protein, 365 aa, Oryza sativa Japonica Group
MASSAAAAAATDRIALVKAFDETRTGVRGLVESGVSAVPVIFRHPDPYASVPLAPPGVSIPVVNLSLPAPLAAEAAAGAARDWGFFYLVNHHALVPSGFTAGLLAAVRAFNELPAAERAAHYGRSVDGGVSYSSNVDLYRSGAASWRDTIQVVLGPSRPDAERIPAACRAEVVGWDAHATAVARAVMALLCEGLGLRGETLEEASCLEGKLMVCHYYPVCPEPERTMGIVPHTDPGVLTVLAQDGVGGLQVKHTNEDGESYWVDTKPVPGALVINVGDLLQIMSNDKYKSVEHRVVMKSHEEARVSSAIFYNPGKRGDSVFYGPLPDLISSGNPPKYRNFTMSEFLGAFFKRDLASKALIEHFKI

SEQ ID NO: 147 - DNA, 1257 bp, Oryza sativa Japonica Group
  CDS (1)..(1257)
atggcgcagctgcttaatagagaagaggaggaaagattgatggagaagaagggtgcgccgttccaagcctcgttcagtcgttcctgcgagccctaccgtgtgctcacgacgccaccagtgctcacgacgcgcgcgcgtccgcatatggccaccgtctccggcaccgaccgcctccgtgacctccacgccttcgacgacaccaaggccggcgtcaagggcctcgtcgacgccggcgtcaccaccgtcccctacttcttccgccaccaccccgaccccctccccgccgacgtcgacctcgccaaggccgacgtcgaccggggacgggtggtcgccgaggtcagggcggccgcggagacggtcggcttcttccaggtggtcaaccatggcgtcgccggggagctgatggaggagatgctcgcggcggtgcggcgcttccacgaggagcccctggaggcgaaggtgccgtactacaccagggacgtcgccagcaaggtctggttcaactccaacttcggcctcttccgtaacgggttccgttcgccggaggccaactggcgcgacacgatgttcgttgagatgttcccggaggcgccctcgccggaagagatcccgccgccgtgcaggggcgtgctggaggtgtacgccgcggcggtgcggcggctcggggaacggctgttcgagctgctgtcggaggcgctgggcctccccgtggggtaccttggccgcgacgccgggtgcatggacgggctgagcctgagcgtggcggcgcactactacccggcgtgcccggagccggaggcgacgatgggcgcgaccaagcactccgaccccagcttcctcacagtgctgctgcaggacacctccggcggcctgcaggcggtgctcccgcggcctccggaggagcggtgggtggacgtgcccccggtggccggcgcgctggtggtgaacgtcggcgacctcctccagctggtgtcgaacgacaggctccggagcgtggagcaccgggtgctgcccaccggcgccgcggggccggcccgcgtgtcggtggcgtgcttcttccgccacgcgtacgcgtcgacgaggccgtgtgtcccggtcgtcgtcggcggcggcggggcacgggcggcggcggtgtacaggagcacgacggcgggggagttcctggcgcactacaacggcaaggggctcgacgggcggtcggcgctggaccacttcaggcttccggcggcggcgtcgtctcctcctcctccgctgtag

SEQ ID NO: 148 - protein, 418 aa, Oryza sativa Japonica Group
MAQLLNREEEERLMEKKGAPFQASFSRSCEPYRVLTTPPVLTTRARPHMATVSGTDRLRDLHAFDDTKAGVKGLVDAGVTTVPYFFRHHPDPLPADVDLAKADVDRGRVVAEVRAAAETVGFFQVVNHGVAGELMEEMLAAVRRFHEEPLEAKVPYYTRDVASKVWFNSNFGLFRNGFRSPEANWRDTMFVEMFPEAPSPEEIPPPCRGVLEVYAAAVRRLGERLFELLSEALGLPVGYLGRDAGCMDGLSLSVAAHYYPACPEPEATMGATKHSDPSFLTVLLQDTSGGLQAVLPRPPEERWVDVPPVAGALVVNVGDLLQLVSNDRLRSVEHRVLPTGAAGPARVSVACFFRHAYASTRPCVPVVVGGGGARAAAVYRSTTAGEFLAHYNGKGLDGRSALDHFRLPAAASSPPPPL

SEQ ID NO: 149 - DNA, 873 bp, Arabidopsis thaliana
  CDS (1)..(873)
atgacagaaaaatctgcagaactcgttcgtttgaacgaactcaaggcttttgtatcgacaaaagcaggtgtgaaaggacttgtcgataccaaaataaccgaagttcctcgaatcttccatatcccttcttcttcaactttatctaacaacaaaccttctgatatctttggcttaaacctcactgtcccaatcattgacctcggagatggtaacacatctgctgcaagaaacgtcctcgtttccaagattaaagaagcagctgagaattggggatttttccaagtaatcaatcatggtattcctttaactgttcttaaagatatcaaacaaggtgttcgaagatttcatgaggaagatccagaggtcaagaaacagtattttgctacagatttcaatacaagatttgcttacaacaccaacttcgatattcattattcttctcctatgaattggaaagactctttcacttgctacacttgtcctcaagatcctctaaagccagaggaaatcccactagcttgcagggatgttgtgattgaatactcgaagcatgtaatggaattaggaggtttactcttccaacttctctcagaagctttaggtttagactctgagattcttaagaacatggattgtctcaagggtttgcttatgctctgccattattatccaccttgtccacaacctgacctaactttgggcataagtaaacacaccgacaattccttcataacaattcttcttcaagatcaaatcggtggtcttcaagttcttcatcaagattcttgggttgatgtaactcctgttcctggagctcttgtcatcagtatcggtgatttcatgcaggcaagctcgattgatgcttccttttaa

SEQ ID NO: 150 - protein, 290 aa, Arabidopsis thaliana
MTEKSAELVRLNELKAFVSTKAGVKGLVDTKITEVPRIFHIPSSSTLSNNKPSDIFGLNLTVPIIDLGDGNTSAARNVLVSKIKEAAENWGFFQVINHGIPLTVLKDIKQGVRRFHEEDPEVKKQYFATDFNTRFAYNTNFDIHYSSPMNWKDSFTCYTCPQDPLKPEEIPLACRDVVIEYSKHVMELGGLLFQLLSEALGLDSEILKNMDCLKGLLMLCHYYPPCPQPDLTLGISKHTDNSFITILLQDQIGGLQVLHQDSWVDVTPVPGALVISIGDFMQASSIDASF

SEQ ID NO: 151 - DNA, 1125 bp, Zea mays
  CDS (1)..(1125)
atggctccaacgaccgccaccaaggacgacagtggctacggcgacgagcgccggcgcgagctgcaggcgttcgacgacacgaagctgggggtgaaaggtctggtggactccggcgtcaagtccatcccgtccatcttccaccacccgccggaagccctgagcgacataatttctccggcgcctctgccgtcgtcgccaccctccggcgccgccatcccggtggtggacctctcggtgacgcggcgcgaggacctagtcgagcaggtgaggcacgcggccgggacggtgggcttcttctggctggtgaaccacggcgtggcggaggagctgatgggcggcatgctccgcggggtgcgccagttcaacgagggccccgtggaggcgaagcaggcgctctactccagggacctggctcgcaacctgcgcttcgcctccaacttcgacctcttcaaggccgctgcggccgactggcgcgacacgctcttctgcgaggtggctccgaacccgccgccgcgggaggagctgccggagccactgaggaacgtgatgctggagtacggcgcggcggtgacgaagctggcgcggttcgtgttcgagctgctgtccgagtccctcggcatgcccagcgaccacctgtacgagatggagtgcatgcagaacctgaacgtggtgtgccagtactacccgccgtgcccggagccgcaccgcaccgtgggcgtcaagaggcacacggaccctggcttcttcaccatcctcctgcaggacggcatgggcggcctgcaggtgcgcctcggcaacaacgggcagagcggcggctgctgggtggacatcgctccccggcctggggcgctcatggtcaacatcggtgatcttctgcagctcgtgaccaatgaccggttcaggagcgtggagcaccgggtgccagccaacaagagcagcgacacggcgagggtctccgtggcgtccttcttcaacacggacgtgaggaggtccgagaggatgtacggccccattccagaccccagcaagcccccgctgtacaggagcgtcagggcccgagacttcatcgcaaagttcaacaccataggactcgatggccgcgcgctcgaccacttcaggctctag

SEQ ID NO: 152 - protein, 374 aa, Zea mays
MAPTTATKDDSGYGDERRRELQAFDDTKLGVKGLVDSGVKSIPSIFHHPPEALSDIISPAPLPSSPPSGAAIPVVDLSVTRREDLVEQVRHAAGTVGFFWLVNHGVAEELMGGMLRGVRQFNEGPVEAKQALYSRDLARNLRFASNFDLFKAAAADWRDTLFCEVAPNPPPREELPEPLRNVMLEYGAAVTKLARFVFELLSESLGMPSDHLYEMECMQNLNVVCQYYPPCPEPHRTVGVKRHTDPGFFTILLQDGMGGLQVRLGNNGQSGGCWVDIAPRPGALMVNIGDLLQLVTNDRFRSVEHRVPANKSSDTARVSVASFFNTDVRRSERMYGPIPDPSKPPLYRSVRARDFIAKFNTIGLDGRALDHFRL

SEQ ID NO: 153 - DNA, 1155 bp, Zea mays
  CDS (1)..(1155)
atggctccgaccgccgccaaggacagtggctccgccgatcgctggcgcgaggtgcaggcgttcgaggacagcaagctgggtgtgaagggcctggtcgactccggcgtcaagtccatcccggccatgttccaccacccgccggagtccctcaaggatgtcatttctccaccagctctgccctcctccgacgatgcgccggccatcccagtggtggacctgtccgtggcgcggcgcgaggatctggtggcccaggtgaagcacgcggccgggacggtgggcttcttctgggtggtgaaccacggcgtgccggaggagctgatggccagcatgctcagcggggtgcgccagttcaacgagggctctctggaggccaagcaggcgctctactcacgggaccccgctcgcaacgtgcgcttcgcttccaacttcgacctcttcgagtccgcggcggccgactggcgcgacacgctctactgcaagattgcgccggatccggcgccgcgggagctcgtgccggagcctctccggaacgtgatgatggaatacggcgaggaactgacgaagctggcgcggtccatgttcgagctgctgtcggagtccctcggcatgcccagcgaccacctgcacaagatggagtgcatgcagcagctccacatcgtgtgccagtactacccgccatgcccggagccgcacctcaccatcggcgtcaggaagcactcggacaccggtttcttcaccatcctcctgcaggacggcatgggcggcctgcaggtgctagtcgatcgcggaggcggccgccagacgtgggtggacgtcactccccgacctggggcactcatggtcaacatgggcagctttcttcagcttgtgacgaatgaccggtacaagagcgtggatcaccgggtgccggctaacaagagcagtgacacggcgagggtctcggtagctgccttcttcaaccccgacgagaagagaaccgagaggctgtatggccccattccagaccccagcaagcctccgctgtacaggagcgtcacgttcccggacttcatcgccaagttcaacagcatcggactggacggtcgcgtgctcgaccacttccggttggaggacgacggccctactcgtcttgctgctcctgcacaccacgtctag

SEQ ID NO: 154 - protein, 384 aa, Zea mays
MAPTAAKDSGSADRWREVQAFEDSKLGVKGLVDSGVKSIPAMFHHPPESLKDVISPPALPSSDDAPAIPVVDLSVARREDLVAQVKHAAGTVGFFWVVNHGVPEELMASMLSGVRQFNEGSLEAKQALYSRDPARNVRFASNFDLFESAAADWRDTLYCKIAPDPAPRELVPEPLRNVMMEYGEELTKLARSMFELLSESLGMPSDHLHKMECMQQLHIVCQYYPPCPEPHLTIGVRKHSDTGFFTILLQDGMGGLQVLVDRGGGRQTWVDVTPRPGALMVNMGSFLQLVTNDRYKSVDHRVPANKSSDTARVSVAAFFNPDEKRTERLYGPIPDPSKPPLYRSVTFPDFIAKFNSIGLDGRVLDHFRLEDDGPTRLAAPAHHV

SEQ ID NO: 155 - DNA, 1056 bp, Arabidopsis thaliana
  CDS (1)..(1056)
atggagtcaactgatcgttcaagtcaagcaaaagctttcgacgaggccaaaatcggtgtgaaagggcttgtggattcaggaatcacagagattccggccctgttccgtgcaacgccggctactcttgcaagcctgaagtcgccaccacctccaaagcatctcaccatccctaccgttgatctcaaaggagcaagcgtggtggagaagatcggagaagctgctgagaaatggggattattccatttggtgaatcacggcatcccggtggaggttctggagaggatgattcaagggattcgcgggtttcacgagcaagaacctgaagccaagaaacgcttctactctagggatcacactagagacgtgctttactttagcaatcatgatctccaaaactccgaggccgccagttggagagacactctcggttgttataccgcacccgagcctcccagattagaggatttgcccgcggtttgcggggagattatgctggagtactcaaaggaaataatgagtttaggtgaaaggctatttgagcttctatcagaggctttggggttgaactctcatcatctcaaggacatggactgtgccaagtctcaatatatggttggccaacactacccaccttgccctcagcctgaccttactataggcataaacaagcacaccgatatttcctttctcaccgttcttcttcaagacaatgttggagggcttcaagttttccatgaacagtattggattgatgttactcctgtccctggggctctagtcattaacattggagattttcttcagcttataaccaatgataagttcataagcgcggagcatagggtgatagccaatggatcttctgaaccgcggacttccgtggcaattgttttcagcacgttcatgagggcgtattctcgagtatatgggccaatcaaagatctcctgtctgcagaaaaccctgctaagtatagagactgcaccctcaccgaattttcaaccatcttcagctcaaaaacgctcgatgctcctaagttacaccatttcaaaatctaa

SEQ ID NO: 156 - protein, 351 aa, Arabidopsis thaliana
MESTDRSSQAKAFDEAKIGVKGLVDSGITEIPALFRATPATLASLKSPPPPKHLTIPTVDLKGASVVEKIGEAAEKWGLFHLVNHGIPVEVLERMIQGIRGFHEQEPEAKKRFYSRDHTRDVLYFSNHDLQNSEAASWRDTLGCYTAPEPPRLEDLPAVCGEIMLEYSKEIMSLGERLFELLSEALGLNSHHLKDMDCAKSQYMVGQHYPPCPQPDLTIGINKHTDISFLTVLLQDNVGGLQVFHEQYWIDVTPVPGALVINIGDFLQLITNDKFISAEHRVIANGSSEPRTSVAIVFSTFMRAYSRVYGPIKDLLSAENPAKYRDCTLTEFSTIFSSKTLDAPKLHHFKI

SEQ ID NO: 157 - DNA, 1197 bp, Arabidopsis thaliana
  CDS (1)..(1197)
atgggtcacgattccttttgttatttaattgtattaagatgtgcattaagatgtggaataatagcacttatgcaaatctgtgcattgcaaaaaaaagaaagaagaagcaagatggagtcaagtgatcgttcaagtcaagcaaaagctttcgacgagacaaaaaccggcgtgaaagggcttgtggcttcgggaatcaaagagattccagccatgttccatacacctccggatactctaacaagcctgaaacaaacagcaccaccttcgcagcagctgacgatccccacggtggatctgaaaggaggaagcatggatttgatatcgcggcggagcgtggtggagaagattggagacgctgcggagagatggggattcttccaggtggtgaatcatgggatctcggtggaggtgatggagaggatgaaagaagggattcgcaggtttcacgagcaggacccggaagtgaagaaacggttctactctagggatcacactagagatgtgctttactacagcaacatcgatctccacacttgtaataaggctgcaaattggagagatacgctcgcctgttacatggcccccgatcctcccaagttacaggacttgcccgcggtttgcggggagattatgatggagtactcaaagcaactaatgactttaggtgaatttctctttgagcttctatctgaggctttgggattaaaccctaatcacctcaaggacatgggctgtgccaagtctcatatcatgtttggccaatactatccaccttgccctcagcctgaccttactttaggcataagcaagcacaccgatttctcgtttatcaccattcttcttcaggacaatatcggagggcttcaagttatccatgaccaatgctgggttgatgtttctcctgtccctggcgcccttgtcattaacatcggagatcttctccagcttataagcaatgacaaattcattagcgcggagcatagggtgatagcaaatggatcttctgaaccgcggatttcaatgccatgtttcgtcagcacgttcatgaagccgaatccacgaatatatggacccatcaaagaacttttgtcagaacaaaaccctgccaagtatagagacttaaccatcaccgagttttcaaacaccttcaggtcccaaacgatcagtcaccctgcgttacaccatttcaggatctga

SEQ ID NO: 158 - protein, 398 aa, Arabidopsis thaliana
MGHDSFCYLIVLRCALRCGIIALMQICALQKKERRSKMESSDRSSQAKAFDETKTGVKGLVASGIKEIPAMFHTPPDTLTSLKQTAPPSQQLTIPTVDLKGGSMDLISRRSVVEKIGDAAERWGFFQVVNHGISVEVMERMKEGIRRFHEQDPEVKKRFYSRDHTRDVLYYSNIDLHTCNKAANWRDTLACYMAPDPPKLQDLPAVCGEIMMEYSKQLMTLGEFLFELLSEALGLNPNHLKDMGCAKSHIMFGQYYPPCPQPDLTLGISKHTDFSFITILLQDNIGGLQVIHDQCWVDVSPVPGALVINIGDLLQLISNDKFISAEHRVIANGSSEPRISMPCFVSTFMKPNPRIYGPIKELLSEQNPAKYRDLTITEFSNTFRSQTISHPALHHFRI

SEQ ID NO: 159 - DNA, 1083 bp, Arabidopsis thaliana
  CDS (1)..(1083)
atggagaccaaagaattcgactcttacagtgagcgcaaagctttcgacgagacgaaaacaggtgtgaaaggtctcattgatgctcacatcactgagattcctcgaattttctgtctccctcaaggttccttatccgacaagaaaccttttgtttctaccactgattttgcgatccctatcatcgacttcgaaggcctccacgtctcccgtgaagatatcgttgggaagatcaaagacgctgcatcgaattggggattcttccaggtgatcaatcatggtgttcctttaaacgttcttcaagagattcaagatggagttcgtaggtttcatgaggaagctcctgaggttaagaaaacctacttcactcgtgacgccactaaaagatttgtctacaatagtaatttcgatctctatagttcttcttcatgtgttaactggagagactctttcgcttgttacatggctcctgatcctccaaaccctgaggatctccctgtggcttgcagggttgctatgttcgaatactcaaagcatatgatgagattaggtgatttgctctttgagcttctctcagaagctcttggtttgagatctgataagcttaaaagcatggattgcatgaagggtttgcttttgctctgccattattatcctccatgtccacaacctgatctaaccatcggcacaaataatcattcagacaactccttcctcaccattcttctccaggaccaaatcggtggtcttcaaatctttcatcaagactgttgggtcgatgtctctcctattccaggggctctagtcatcaacatgggagatttcttgcagctaataacgaatgacaaagtcataagtgtggagcacagggtgctagcgaacagggcagctacaccgaggatatcagtagctagctttttcagcacaagtatgcgtccgaattcaactgtttatggaccaatcaaagagcttctctctgaagaaaacccttcaaaatacagagtcatcgacttgaaagaatacacagagggatacttcaagaaaggcctcgatggaacatcgtatctgtcgcattacaagatatga

SEQ ID NO: 160 - protein, 360 aa, Arabidopsis thaliana
METKEFDSYSERKAFDETKTGVKGLIDAHITEIPRIFCLPQGSLSDKKPFVSTTDFAIPIIDFEGLHVSREDIVGKIKDAASNWGFFQVINHGVPLNVLQEIQDGVRRFHEEAPEVKKTYFTRDATKRFVYNSNFDLYSSSSCVNWRDSFACYMAPDPPNPEDLPVACRVAMFEYSKHMMRLGDLLFELLSEALGLRSDKLKSMDCMKGLLLLCHYYPPCPQPDLTIGTNNHSDNSFLTILLQDQIGGLQIFHQDCWVDVSPIPGALVINMGDFLQLITNDKVISVEHRVLANRAATPRISVASFFSTSMRPNSTVYGPIKELLSEENPSKYRVIDLKEYTEGYFKKGLDGTSYLSHYKI

SEQ ID NO: 161 - DNA, 1038 bp, Arabidopsis thaliana
  CDS (1)..(1038)
atggtggtgaaaaactcgatcaaattcaactctcagagtgagcgcaagtctttggaagagaccaaggttcctcctatctttggccttcctccagatgccttagacgacaagaaacctacctcggattttgcagtacctatcatcgactttgcaggcgtccacaagtcgcgtgaagccgttgtggagaagatcaaagccgctgcagagaattggggaattttccaggtgatcaaccatggtgttcctttaagtgttcttgaagagattcaaaatggagttgttaggtttcatgaggaagatccggaggttaagaaatcttacttctcgcttgacctcaccaaaacatttatctaccacaataatttcgaactttacagttcgtctgctggtaactggagagactctttcgtttgttacatggatcccgatccttcaaaccctgaagatctcccagtggcttgcagagatgctatgatcggatactcgaagcatgtgatgagtttaggtggcttgctctttgaacttctctcagaagctcttggtttgaactctgatactcttaagagtatgggttgcatgaagggtttgcatatgatctgccattattaccctccctgtccacaacctgaccaaaccttaggcacaagtaagcattccgacaacacttttatcactattcttcttcaggacaacatcggtggtcttcaaattcttcatcaagactgttgggttgatgtctcgcctcttcccggggcacttatcatcaacatcggagatttcttgcagctaatgacgaacgacaagttcataagcgttgatcatagggtgcttacaaacagagttggaccgaggatttcaatcgcatgctttttcagctcgagtatgaatccaaattccacagtttacggaccaatcaaagagcttctctctgaagaaaaccctccaaaatacagagacttcactataccagagtactcaaagggatacattgagaaaggtctcgatggaacatcgcatctgtcacattacaggatttga

SEQ ID NO: 162 - protein, 345 aa, Arabidopsis thaliana
MVVKNSIKFNSQSERKSLEETKVPPIFGLPPDALDDKKPTSDFAVPIIDFAGVHKSREAVVEKIKAAAENWGIFQVINHGVPLSVLEEIQNGVVRFHEEDPEVKKSYFSLDLTKTFIYHNNFELYSSSAGNWRDSFVCYMDPDPSNPEDLPVACRDAMIGYSKHVMSLGGLLFELLSEALGLNSDTLKSMGCMKGLHMICHYYPPCPQPDQTLGTSKHSDNTFITILLQDNIGGLQILHQDCWVDVSPLPGALIINIGDFLQLMTNDKFISVDHRVLTNRVGPRISIACFFSSSMNPNSTVYGPIKELLSEENPPKYRDFTIPEYSKGYIEKGLDGTSHLSHYRI

SEQ ID NO: 163 - DNA, 1098 bp, Arabidopsis thaliana
  CDS (1)..(1098)
atggagtcatcacttccccaagttgctgcacttgatcgttcaactctactcaaagctttcgacgagactaaaaccggcgtgaaaggccttatcgacgccggaatcacagagattccttcgatatttcgtgcacctccggctactttaacaagtccaaaaccaccttcctcctctgatttctccatccccacaatcgatctcaaaggaggtggcacggactcgatcacgcggcggagcttggtggagaagatcggagacgcggcagagaaatggggatttttccaggtgatcaaccacgggatcccgatggatgtgttggagaagatgatagatgggattcgtgagtttcacgagcaagacactgaagtgaagaaagggttttactctcgagatccagctagtaagatggtatacagcagcaacttcgatctgtttagctcaccggcggcgaattggagagatacacttggttgttatacagcaccagatcccccgagaccggaggacttacccgccacttgtggggagatgatgattgagtactcaaaggaagtgatgaaattgggtaaattactcttcgagcttctctcggaagctctagggttaaacactaatcacctcaaggacatggattgcactaactccttgctgttgctcggccattattacccgccatgtccccaacccgaccttactctaggcttaacgaaacactccgacaactcttttctcactattcttcttcaagaccatatcggagggcttcaagttcttcatgaccaatattgggttgatgttcctcctgtccctggagctcttgttgttaacgttggagatcttcttcagcttataacaaacgacaagttcataagcgtggagcatagggttttggccaatgtagctggaccgagaatttcagtggcatgtttcttcagctcgtatttgatggcgaatcctcgagtttatggacccatcaaagagattttgtctgaagaaaaccctcctaattatagagacactactattacagagtatgcaaagttctacagatccaaaggattcgatggtacctctggattactctatctcaagatctga

SEQ ID NO: 164 - protein, 365 aa, Arabidopsis thaliana
MESSLPQVAALDRSTLLKAFDETKTGVKGLIDAGITEIPSIFRAPPATLTSPKPPSSSDFSIPTIDLKGGGTDSITRRSLVEKIGDAAEKWGFFQVINHGIPMDVLEKMIDGIREFHEQDTEVKKGFYSRDPASKMVYSSNFDLFSSPAANWRDTLGCYTAPDPPRPEDLPATCGEMMIEYSKEVMKLGKLLFELLSEALGLNTNHLKDMDCTNSLLLLGHYYPPCPQPDLTLGLTKHSDNSFLTILLQDHIGGLQVLHDQYWVDVPPVPGALVVNVGDLLQLITNDKFISVEHRVLANVAGPRISVACFFSSYLMANPRVYGPIKEILSEENPPNYRDTTITEYAKFYRSKGFDGTSGLLYLKI

SEQ ID NO: 165 - DNA, 1110 bp, Arabidopsis thaliana
  CDS (1)..(1110)
atggagagcacgaagattgctccttcattcgatcgtgccagtgagcttaaagctttcgatgagacgaagactggtgtgaaaggactcgttgactctggaatctcaaagattccacgcattttccatcactcatctgtcgaactagcaaaccctaaaccacttccctcggacctgctacatctcaagacgatcccaacgatcgatctcggaggacgggacttccaggacgcgattaagcacaagaacgcgattgaagggattaaagaagcagctgccaagtggggtttcttccaagtgatcaaccatggagtttcgctcgagcttcttgagaagatgaaagatggagttcgtgactttcatgagcaacctcctgaagtgaggaaagatttgtacagccgcgatttcggcagaaagtttatctatttaagtaatttcgatctctacactgctgcagctgcgaattggagagacacattctattgttacatggctccagatcctccagaaccacaggatctgccagagatttgtagggatgttatgatggaatactcaaagcaagtgatgattttgggtgaatttctgtttgagcttttgtcagaagcactagggttgaaccctaatcacctcaaggacatggagtgcttaaagggtttgcgcatgctttgccactacttcccaccgtgtccggagcctgacctaacttttggcacaagtaagcactccgacggctcttttcttaccgtccttctaccagataacatagaagggcttcaggtttgtcgtgagggatactggttcgatgttcctcatgttcccggcgctctcatcatcaacatcggagatcttctgcagcttataacaaacgacaagttcatcagtttgaagcatagagtattggcgaacagagccacaagagctcgagtctctgtcgcatgtttcttccatacccacgtaaaaccaaatcctagagtgtacggacccattaaagagcttgtgtccgaagaaaatcctccaaagtacagagagaccaccatcagagattacgctacttacttcaatggcaaaggacttggcgggacctctgctttgctggattttaaagtatga

SEQ ID NO: 166 - protein, 369 aa, Arabidopsis thaliana
MESTKIAPSFDRASELKAFDETKTGVKGLVDSGISKIPRIFHHSSVELANPKPLPSDLLHLKTIPTIDLGGRDFQDAIKHKNAIEGIKEAAAKWGFFQVINHGVSLELLEKMKDGVRDFHEQPPEVRKDLYSRDFGRKFIYLSNFDLYTAAAANWRDTFYCYMAPDPPEPQDLPEICRDVMMEYSKQVMILGEFLFELLSEALGLNPNHLKDMECLKGLRMLCHYFPPCPEPDLTFGTSKHSDGSFLTVLLPDNIEGLQVCREGYWFDVPHVPGALIINIGDLLQLITNDKFISLKHRVLANRATRARVSVACFFHTHVKPNPRVYGPIKELVSEENPPKYRETTIRDYATYFNGKGLGGTSALLDFKV

SEQ ID NO: 167 - DNA, 1110 bp, Arabidopsis thaliana
  CDS (1)..(1110)
atggagatgatgaagattgatcctttattcgatcgtgccagtgagcttaaagctttcgatgaaacgaaaacgggtgtgaaaggactcgtcgactccggagtttcacaagttccacgcatctttcatcatccaactgtcaaattatcaaccccaaaaccacttccctcggacctgctacatctcaagacgatcccaacgatcgatctcggaggacgggacttccaggacgcgattaagcgcaataacgcgattgaagagattaaagaagcagcagcgaagtggggtttcttccaggtgatcaaccatggagtttcgcttgaacttcttgagaagatgaaaaaaggagttcgtgacttccacgagcaatcacaagaagtgaggaaagaattctacagtcgcgatttcagcagaaggtttctgtatttaagtaatttcgatctctttagttctccagcagcaaattggagagacactttctcttgtaccatggctccagatactccaaaaccacaggatcttccggagatttgtagggatattatgatggaatattcaaagcaagtgatgaatttgggtaaatttctcttcgagcttttatcagaagctctagggttggaacctaatcacctcaatgacatggattgctctaagggtttgctcatgctctcccactactacccaccgtgtccagagcctgacctaactttaggcacaagtcagcactccgacaactcttttctcactgtccttcttcccgatcagatcgaagggcttcaggttcgtcgtgaagggcactggttcgatgttcctcatgtttccggcgctctcatcatcaacatcggagatcttttacagcttataacaaacgacaaattcatcagtttggagcacagagtattggcgaacagagcaacaagagctcgagtgtctgtcgcatgtttctttaccactggagtaagaccgaatcctagaatgtacggaccgattagagagcttgtgtctgaagaaaatcctccaaagtacagagagaccacaattaaagactacgctacttacttcaatgccaaaggacttgacgggacctctgctttgctccattttaagatatga

SEQ ID NO: 168 - protein, 369 aa, Arabidopsis thaliana
MEMMKIDPLFDRASELKAFDETKTGVKGLVDSGVSQVPRIFHHPTVKLSTPKPLPSDLLHLKTIPTIDLGGRDFQDAIKRNNAIEEIKEAAAKWGFFQVINHGVSLELLEKMKKGVRDFHEQSQEVRKEFYSRDFSRRFLYLSNFDLFSSPAANWRDTFSCTMAPDTPKPQDLPEICRDIMMEYSKQVMNLGKFLFELLSEALGLEPNHLNDMDCSKGLLMLSHYYPPCPEPDLTLGTSQHSDNSFLTVLLPDQIEGLQVRREGHWFDVPHVSGALIINIGDLLQLITNDKFISLEHRVLANRATRARVSVACFFTTGVRPNPRMYGPIRELVSEENPPKYRETTIKDYATYFNAKGLDGTSALLHFKI

SEQ ID NO: 169 - DNA, 1080 bp, Arabidopsis thaliana
  CDS (1)..(1080)
atggcggaaaactacgaccgtgccagtgagttaaaagcattcgacgagatgaagattggcgtgaaaggactcgtcgacgccggagtcacaaaagtcccgcgcattttccataacccgcatgttaacgtagcaaaccctaagcctacatcgacggtggtgatgattccaacaatcgatctaggtggcgtgttcgaatccacggtcgtgcgagagagtgtagttgcgaaggttaaagacgcaatggagaagtttggatttttccaggcgattaaccatggggttccacttgatgtgatggagaagatgataaatggtattcgtcggtttcacgaccaagatccagaagtgaggaaaatgttctatacccgagacaaaaccaaaaagcttaaatatcactctaatgctgatctctatgagtctcctgctgcgagttggagagataccttaagttgtgtcatggctcctgatgttccaaaagcacaggacttacctgaggtttgtggggagatcatgttggagtactcaaaggaagtgatgaagttagcggagttaatgtttgaaattttatcagaagctttagggttgagtcctaaccacctcaaagaaatggattgcgcaaaaggtttatggatgctctgtcattgttttccaccctgtcctgagccaaaccgaacattcggcggcgctcagcacacagacagatctttccttactattcttcttaacgacaacaatggaggacttcaagttctctacgatggatactggatcgatgttcctcctaatcccgaagcacttatctttaacgtaggagatttcctccagcttatctcgaatgacaagtttgtaagcatggagcatagaattttggcaaatggaggtgaagagccgcgcatttcggtcgcttgtttctttgtgcatacttttacttcaccaagttcgagagtatatggacccattaaagagcttctgtctgagctaaaccctccaaaatacagagacaccacctcggaatcctccaatcactatgtggctagaaaacctaatgggaattcttcgttggaccatttaaggatctga

SEQ ID NO: 170 - protein, 359 aa, Arabidopsis thaliana
MAENYDRASELKAFDEMKIGVKGLVDAGVTKVPRIFHNPHVNVANPKPTSTVVMIPTIDLGGVFESTVVRESVVAKVKDAMEKFGFFQAINHGVPLDVMEKMINGIRRFHDQDPEVRKMFYTRDKTKKLKYHSNADLYESPAASWRDTLSCVMAPDVPKAQDLPEVCGEIMLEYSKEVMKLAELMFEILSEALGLSPNHLKEMDCAKGLWMLCHCFPPCPEPNRTFGGAQHTDRSFLTILLNDNNGGLQVLYDGYWIDVPPNPEALIFNVGDFLQLISNDKFVSMEHRILANGGEEPRISVACFFVHTFTSPSSRVYGPIKELLSELNPPKYRDTTSESSNHYVARKPNGNSSLDHLRI

SEQ ID NO: 171 - DNA, 1077 bp, Arabidopsis thaliana
  CDS (1)..(1077)
atggcgggcaactatgatcgtgctggtgaggtaaaagcattcgaccagatgaagatcggcgtgaagggtcttgtcgacgccggaatcacaaaagttcctcgcattttccatcaccaagatgtggccgttacaaaccctaaaccttcctcaacgttagaaattccaacaatcgatgttggaggtggcgtgttcgagtccacggtcacgcgaaagagcgtgatcgcgaaagtgagagctgcggttgagaagttcgggttctttcaggtgattaaccatgggattccactcgaggtgatggagagtatgaaagatgggattcgtgggtttcatgagcaggactcagaagttaagaaaacgttctatagtcgtgacatcactaaaaaggttaagtataacactaatttcgatctctatagctctcaagctgcgaattggagagatactttaactatggttatggctcctgatgttccacaagcaggggacttacccgtgatttgtcgagaaatcatgttggagtactccaagcgaatgatgaagttaggggagctaatctttgagcttttatcagaagctcttggtttaaaacctaaccaccttaaagagctaaattgcgcaaagagtttgtcgttgctctcccattactacccgccttgtccagagcctgaccgaacctttggtatcagttcacatacagatatctcttttatcactattcttcttcaagaccacattggaggacttcaagttctccatgatggttactggatcgatgttcctcctaatcccgaagctctaatcgttaaccttggagatcttttacagcttataacaaacgataagtttgtaagtgtggagcacagggttttggcaaatagaggcgaagaacctcgcatttcaagcgcatctttcttcatgcacaccataccaaatgagcaagtatatggacctatgaaagagcttctatctaaacaaaaccctcccaagtacagaaacacaaccacgaccgagatggcgaggcattacttggctagaggactcgatgggacctcaccgttgctccatttcaggatctga

SEQ ID NO: 172 - protein, 358 aa, Arabidopsis thaliana
MAGNYDRAGEVKAFDQMKIGVKGLVDAGITKVPRIFHHQDVAVTNPKPSSTLEIPTIDVGGGVFESTVTRKSVIAKVRAAVEKFGFFQVINHGIPLEVMESMKDGIRGFHEQDSEVKKTFYSRDITKKVKYNTNFDLYSSQAANWRDTLTMVMAPDVPQAGDLPVICREIMLEYSKRMMKLGELIFELLSEALGLKPNHLKELNCAKSLSLLSHYYPPCPEPDRTFGISSHTDISFITILLQDHIGGLQVLHDGYWIDVPPNPEALIVNLGDLLQLITNDKFVSVEHRVLANRGEEPRISSASFFMHTIPNEQVYGPMKELLSKQNPPKYRNTTTTEMARHYLARGLDGTSPLLHFRI

SEQ ID NO: 173 - DNA, 1089 bp, Arabidopsis thaliana
  CDS (1)..(1089)
atggaagcaacatacgatcgtgctagtgaggtaaaagcttttgacgagttgaagatcggcgtaaaaggtctcctagacgccggagttactcagatcccacgtatcttccatcatccacatcttaatttaaccgactcaaatctacttctttcctctacaacgatggttataccaacaatcgatcttaaaggaggcgtgttcgacgagtacacagtcacgcgagagagcgtcatcgcgatgatcagagacgcggttgagagattcgggtttttccaggtgattaaccatgggattagtaatgatgttatggagaagatgaaagatgggattcgtgggtttcatgagcaagactcagacgttaggaaaaagttttatactcgtgacgtcaccaaaacagttaagtataacagtaattttgatctttatagctctccttcagcgaactggagagataccttgagttgctttatggctcctgatgttccagaaacagaggacttaccagatatttgtggggaaatcatgttggaatatgcgaaacgagtgatgaaactaggggaactaatctttgagcttttatcagaagctttagggctgaatcctaaccacttgaaagaaatggattgcacaaaaggtttattgatgctttctcattactacccgccttgtcctgagcctggtttaacttttggcacaagtccgcattcagacagatcttttctcactattcttcttcaagatcacattggtgggcttcaagttcgtcagaatggttattgggttgatgttcctcctgttccgggagctcttctcgttaacctcggagatcttttacagcttatgaccaatgatcagtttgtgagcgtagagcatagagttctggctaataaaggtgaaaagccgcggatctcagtagcatctttctttgtgcatcctttaccgagtttacgagtttatggaccgataaaagaacttttgtctgagcaaaaccttcccaagtatagagacactaccgtcactgagtacacgagtcattacatggcaagaggactttatggaaattctgtgttgcttgatttcaagatctga

SEQ ID NO: 174 - protein, 362 aa, Arabidopsis thaliana
MEATYDRASEVKAFDELKIGVKGLLDAGVTQIPRIFHHPHLNLTDSNLLLSSTTMVIPTIDLKGGVFDEYTVTRESVIAMIRDAVERFGFFQVINHGISNDVMEKMKDGIRGFHEQDSDVRKKFYTRDVTKTVKYNSNFDLYSSPSANWRDTLSCFMAPDVPETEDLPDICGEIMLEYAKRVMKLGELIFELLSEALGLNPNHLKEMDCTKGLLMLSHYYPPCPEPGLTFGTSPHSDRSFLTILLQDHIGGLQVRQNGYWVDVPPVPGALLVNLGDLLQLMTNDQFVSVEHRVLANKGEKPRISVASFFVHPLPSLRVYGPIKELLSEQNLPKYRDTTVTEYTSHYMARGLYGNSVLLDFKI

SEQ ID NO: 175 - DNA, 1113 bp, Arabidopsis thaliana
  CDS (1)..(1113)
atggattcaacagccaccgttgcaagtgatcgtcttagtcaactaaactctttcgaggagactatgacaggcgtgaaaggccttgttgattccggaatcaaagaggttccagctatgttccgtgagcctccagctattttagcaagccgaaaaccaccactagctttgcagttcacgatcccaaccatcgatctgaacggaggagtagtgtactacaagaatcaagattcagttacacggagaagcatggttgagaagataggagatgcagcggagaaatggggtttcttccaggtggttaaccacgggatcccgctcgacgtgctggagaaggtgaaagaagggattcgcgcgtttcacgagcaggatgctgaattgaagaaacggttctactctcgtgatcacactcgaaaaatggtttactatagtaacttggatctcttcaccgctatgaaagcgagttggagagataccatgtgtgcctatatggccccggatcctcccacatcggaggacttgcccgaggtttgtggggagattatgatggagtatgcaaaggaaataatgaatttaggtgaattgatctttgagcttctatcagaggctctagggttgaataattctaatcacctcaaagacatggattgcagcaagtctttggtcttgttcggccagtactatccaccttgtccgcagcctgaccatactttaggcttaagcaagcacaccgatttttcttttctcaccattgttcttcaggggaatctcggtgggcttcaagttctccatgataaacaatattggatcgatattcctcccgtccctggggctcttgtcgttaacctcggagatcttctccagcttataagcaatggcaagttcataagcgtggagcacagggtgatagcaaatagagcggctgaaccgcggatttcagtgccatgtttcttcagcaccgtgatgagggagagccatcgagtatatggacccataaaagagcttctgtcagaacaaaaccctcccaagtatagggacaccaccatctccgagttcgcaagcatgtacgcgtctaaagagatcaatacctctgcgttactccgtttagagatctga

SEQ ID NO: 176 - protein, 370 aa, Arabidopsis thaliana
MDSTATVASDRLSQLNSFEETMTGVKGLVDSGIKEVPAMFREPPAILASRKPPLALQFTIPTIDLNGGVVYYKNQDSVTRRSMVEKIGDAAEKWGFFQVVNHGIPLDVLEKVKEGIRAFHEQDAELKKRFYSRDHTRKMVYYSNLDLFTAMKASWRDTMCAYMAPDPPTSEDLPEVCGEIMMEYAKEIMNLGELIFELLSEALGLNNSNHLKDMDCSKSLVLFGQYYPPCPQPDHTLGLSKHTDFSFLTIVLQGNLGGLQVLHDKQYWIDIPPVPGALVVNLGDLLQLISNGKFISVEHRVIANRAAEPRISVPCFFSTVMRESHRVYGPIKELLSEQNPPKYRDTTISEFASMYASKEINTSALLRLEI

SEQ ID NO: 177 - DNA, 1098 bp, Arabidopsis thaliana
  CDS (1)..(1098)
atgacagaaaaatctgcagaactcgttcgtttgaacgaactcaaggcttttgtatcgacaaaagcaggtgtgaaaggacttgtcgataccaaaataaccgaagttcctcgaatcttccatatcccttcttcttcaactttatctaacaacaaaccttctgatatctttggcttaaacctcactgtcccaatcattgacctcggagatggtaacacatctgctgcaagaaacgtcctcgtttccaagattaaagaagcagctgagaattggggatttttccaagtaatcaatcatggtattcctttaactgttcttaaagatatcaaacaaggtgttcgaagatttcatgaggaagatccagaggtcaagaaacagtattttgctacagatttcaatacaagatttgcttacaacaccaacttcgatattcattattcttctcctatgaattggaaagactctttcacttgctacacttgtcctcaagatcctctaaagccagaggaaatcccactagcttgcagggatgttgtgattgaatactcgaagcatgtaatggaattaggaggtttactcttccaacttctctcagaagctttaggtttagactctgagattcttaagaacatggattgtctcaagggtttgcttatgctctgccattattatccaccttgtccacaacctgacctaactttgggcataagtaaacacaccgacaattccttcataacaattcttcttcaagatcaaatcggtggtcttcaagttcttcatcaagattcttgggttgatgtaactcctgttcctggagctcttgtcatcagtatcggtgatttcatgcagctgatcacaaacgataagttcttaagtatggagcatagggtacgggcaaacagagatggaccgcggatttcagttgcttgcttcgttagctcgggagtgtttccaaattccactgtttatggaccgataaaagagcttctttctgatgaaaaccctgcaaagtacagagacatcactataccagaatacactgtaggatacctagcaagcatcttcgatggaaaatcgcatttgtctaagttccggatatga

SEQ ID NO: 178 - protein, 365 aa, Arabidopsis thaliana
MTEKSAELVRLNELKAFVSTKAGVKGLVDTKITEVPRIFHIPSSSTLSNNKPSDIFGLNLTVPIIDLGDGNTSAARNVLVSKIKEAAENWGFFQVINHGIPLTVLKDIKQGVRRFHEEDPEVKKQYFATDFNTRFAYNTNFDIHYSSPMNWKDSFTCYTCPQDPLKPEEIPLACRDVVIEYSKHVMELGGLLFQLLSEALGLDSEILKNMDCLKGLLMLCHYYPPCPQPDLTLGISKHTDNSFITILLQDQIGGLQVLHQDSWVDVTPVPGALVISIGDFMQLITNDKFLSMEHRVRANRDGPRISVACFVSSGVFPNSTVYGPIKELLSDENPAKYRDITIPEYTVGYLASIFDGKSHLSKFRI

SEQ ID NO: 179 - DNA, 1089 bp, Arabidopsis thaliana
  CDS (1)..(1089)
atgacagagaattctgaaaaaatcgatcgtttaaacgatctcacgacttttatctcgacgaagacaggagtgaaaggactcgtcgatgccgaaataaccgaagttcctagcatgtttcatgtcccttcttctattttatcaaacaacagaccttctgatatctccggcttaaacctcaccgtcccaatcatcgacctcggagatcgtaacacatcttcaagaaacgttgtcatttcgaagatcaaagacgcagctgagaattggggatttttccaagtgatcaatcatgatgttcctttaactgttcttgaagagatcaaagagagtgttcgaaggtttcatgaacaagatccagttgtcaagaaccaatatcttcctaccgataacaacaagagatttgtttataacaatgatttcgatctctatcattcttctcctttgaattggagagactctttcacttgttatattgctccagatcctccgaatccagaggaaatcccactagcttgcaggagtgcggtgatcgaatacacgaagcatgtaatggaattaggagctgtgctcttccaacttctctcagaagctttaggtttagactctgagacacttaagaggattgattgtcttaagggtttgtttatgctctgccattactatccaccttgcccacaacctgacctaactttaggtataagtaaacacaccgacaactctttcctcacgcttcttcttcaagaccaaatcggtggtcttcaagttcttcatgaagattattgggtcgatgtccctcctgtacctggagctcttgttgtcaacattggtgatttcatgcagctgataacgaacgataagttcttgagcgtggagcatagggtacgaccgaacaaagatagaccgcggatttcagttgcgtgcttctttagctcgagtctttctccaaattccacggtttatggaccgattaaagatcttttgtctgatgaaaaccctgctaagtacaaagatatcaccataccagagtacactgcaggatttcttgcgagcatttttgatgaaaagtcgtatttgactaattacatgatatga

SEQ ID NO: 180 - protein, 362 aa, Arabidopsis thaliana
MTENSEKIDRLNDLTTFISTKTGVKGLVDAEITEVPSMFHVPSSILSNNRPSDISGLNLTVPIIDLGDRNTSSRNVVISKIKDAAENWGFFQVINHDVPLTVLEEIKESVRRFHEQDPVVKNQYLPTDNNKRFVYNNDFDLYHSSPLNWRDSFTCYIAPDPPNPEEIPLACRSAVIEYTKHVMELGAVLFQLLSEALGLDSETLKRIDCLKGLFMLCHYYPPCPQPDLTLGISKHTDNSFLTLLLQDQIGGLQVLHEDYWVDVPPVPGALVVNIGDFMQLITNDKFLSVEHRVRPNKDRPRISVACFFSSSLSPNSTVYGPIKDLLSDENPAKYKDITIPEYTAGFLASIFDEKSYLTNYMI

SEQ ID NO: 181 - DNA, 1095 bp, Arabidopsis thaliana
  CDS (1)..(1095)
atggccaaaaactctgtcgaattcgatcgttacatcgagcgcaaagctttcgacaatacaaaagaaggtgttaaagggctcatcgatgctaaaatcaccgagatccctcgaattttccacgtccctcaagataccttaccagacaagaaacgctctgtttcagacctagagatccctaccatcgactttgcaagcgtcaacgtggacacaccctcacgtgaagccatcgtggagaaagtcaaatatgcggtggagaattggggattcttccaggtgattaatcatggtgttcctttaaacgttcttgaagagattaaagatggggttcgtaggtttcacgaggaagaagatcctgaggtcaagaaatcatactactcgcttgatttcaccaagaacaaatttgcatacagtagtaatttcgatctatatagttcttcgccgtctcttacttggagagattctatctcttgttacatggctcctgatcctccaactcctgaggagctccctgagacttgcagggatgctatgattgaatactcaaagcatgtactgagcttaggtgatttgctctttgagcttctctcagaagcactaggtttgaaatctgagatccttaagagcatggattgcttgaagagtttgcttatgatctgccattattatccaccttgtccacaacctgacctaactttaggaataagtaaacactcagacaactctttcctcacagttcttcttcaagacaacattggtggtcttcaaattcttcatcaagactcttgggtcgatgtctctcctcttcctggagctctggtagtcaacgtcggagatttcttgcagctgataaccaacgataagtttataagtgtagagcatagggtactagcgaatacacgaggcccacggatttctgtagcgagctttttcagctcaagtatacgtgagaattcaacagtttatggaccgatgaaagagcttgtgtctgaagaaaaccctccaaaatacagagacacaaccttgagagaatactcagaaggatactttaagaaaggtcttgatggaacatcgcatctgtcaaatttcagaatatga

SEQ ID NO: 182 - protein, 364 aa, Arabidopsis thaliana
MAKNSVEFDRYIERKAFDNTKEGVKGLIDAKITEIPRIFHVPQDTLPDKKRSVSDLEIPTIDFASVNVDTPSREAIVEKVKYAVENWGFFQVINHGVPLNVLEEIKDGVRRFHEEEDPEVKKSYYSLDFTKNKFAYSSNFDLYSSSPSLTWRDSISCYMAPDPPTPEELPETCRDAMIEYSKHVLSLGDLLFELLSEALGLKSEILKSMDCLKSLLMICHYYPPCPQPDLTLGISKHSDNSFLTVLLQDNIGGLQILHQDSWVDVSPLPGALVVNVGDFLQLITNDKFISVEHRVLANTRGPRISVASFFSSSIRENSTVYGPMKELVSEENPPKYRDTTLREYSEGYFKKGLDGTSHLSNFRI

SEQ ID NO: 183 - DNA, 1101 bp, Arabidopsis thaliana
  CDS (1)..(1101)
atgatgaccaaaaactctatcgaattcgatccttacatcgagcgtaaagctttcgacgaaacaaaacaaggtgtgaaaggcctcgtcgacgctaaaatcactgaagttcctcgtatcttccaccaccgtcaagatatcttaaccaacaagaaaccttctgcttcggtatcagacctagagatccctatcatcgactttgcaagcgtccacgcggacacagcctcacgtgaagccatcgtagagaaagtcaaatatgcggtggagaattggggattcttccaggttatcaatcatagtattcctttaaacgttcttgaagagattaaagatggggttcgtaggtttcacgaggaagatcctgaggtcaagaaatcattcttctcgcgtgatgccggcaacaaaaaatttgtatacaacagtaacttcgatctatacagttcttcgccgtctgttaattggagagattctttctcttgttacatagctccagatcctccagctcctgaggagatccctgagacttgcagggatgctatgtttgaatactcaaagcatgtgttgagtttcggtggtttactatttgagcttctctcagaagcacttggtttgaaatctcagacccttgagagcatggattgcgtgaagactttgcttatgatctgccattattacccaccttgtccacaacctgacctaacgttagggataacgaaacactcagataactccttcctcacgcttcttctccaagacaacattggtggtcttcaaattcttcatcaagactcttgggttgatgtctctcctatccatggagctcttgtcgtcaacattggagattttttgcagctgataacgaacgataagtttgtaagtgtggagcatagagtgcttgcaaatagacaaggaccaaggatttcagtagctagctttttcagctcaagtatgcgtccaaattccagagtttacggaccgatgaaagagcttgtgtctgaagaaaaccctccaaaatacagagacataaccataaaagagtattcaaaaatattttttgagaaaggtctcgatggaacgtcgcatctctcgaatatcaggatatga

SEQ ID NO: 184 - protein, 366 aa, Arabidopsis thaliana
MMTKNSIEFDPYIERKAFDETKQGVKGLVDAKITEVPRIFHHRQDILTNKKPSASVSDLEIPIIDFASVHADTASREAIVEKVKYAVENWGFFQVINHSIPLNVLEEIKDGVRRFHEEDPEVKKSFFSRDAGNKKFVYNSNFDLYSSSPSVNWRDSFSCYIAPDPPAPEEIPETCRDAMFEYSKHVLSFGGLLFELLSEALGLKSQTLESMDCVKTLLMICHYYPPCPQPDLTLGITKHSDNSFLTLLLQDNIGGLQILHQDSWVDVSPIHGALVVNIGDFLQLITNDKFVSVEHRVLANRQGPRISVASFFSSSMRPNSRVYGPMKELVSEENPPKYRDITIKEYSKIFFEKGLDGTSHLSNIRI

SEQ ID NO: 185 - DNA, 945 bp, Arabidopsis thaliana
  CDS (1)..(945)
atggagatgatgaagattgatcctttattcgatcgtgccagtgagcttaaagctttcgatgaaacgaaaacgggtgtgaaaggactcgtcgactccggagtttcacaagttccacgcatctttcatcatccaactgtcaaattatcaaccccaaaaccacttccctcggacctgctacatctcaagacgatcccaacgatcgatctcggaggacgggacttccaggacgcgattaagcgcaataacgcgattgaagagattaaagaagcagcagcgaagtggggtttcttccaggtgatcaaccatggagtttcgcttgaacttcttgagaagatgaaaaaaggagttcgtgacttccacgagcaatcacaagaagtgaggaaagaattctacagtcgcgatttcagcagaaggtttctgtatttaagtaatttcgatctctttagttctccagcagcaaattggagagacactttctcttgtaccatggctccagatactccaaaaccacaggatcttccggagatttgtagggatattatgatggaatattcaaagcaagtgatgaatttgggtaaatttctcttcgagcttttatcagaagctctagggttggaacctaatcacctcaatgacatggattgctctaagggtttgctcatgctctcccactactacccaccgtgtccagagcctgacctaactttaggcacaagtcagcactccgacaactcttttctcactgtccttcttcccgatcagatcgaagggcttcaggttcgtcgtgaagggcactggttcgatgttcctcatgtttccggcgctctcatcatcaacatcggagatcttttacagtttggagcacagagtattggcgaacagagcaacaagagctcgagtgtctgtcgcatgtttctttaccactggagtaagaccgaatcctag

SEQ ID NO: 186 - protein, 314 aa, Arabidopsis thaliana
MEMMKIDPLFDRASELKAFDETKTGVKGLVDSGVSQVPRIFHHPTVKLSTPKPLPSDLLHLKTIPTIDLGGRDFQDAIKRNNAIEEIKEAAAKWGFFQVINHGVSLELLEKMKKGVRDFHEQSQEVRKEFYSRDFSRRFLYLSNFDLFSSPAANWRDTFSCTMAPDTPKPQDLPEICRDIMMEYSKQVMNLGKFLFELLSEALGLEPNHLNDMDCSKGLLMLSHYYPPCPEPDLTLGTSQHSDNSFLTVLLPDQIEGLQVRREGHWFDVPHVSGALIINIGDLLQFGAQSIGEQSNKSSSVCRMFLYHWSKTES

SEQ ID NO: 187 - DNA, 969 bp, Arabidopsis thaliana
  CDS (1)..(969)
atggagagcacgaagattgctccttcattcgatcgtgccagtgagcttaaagctttcgatgagacgaagactggtgtgaaaggactcgttgactctggaatctcaaagattccacgcattttccatcactcatctgtcgaactagcaaaccctaaaccacttccctcggacctgctacatctcaagacgatcccaacgatcgatctcggaggacgggacttccaggacgcgattaagcacaagaacgcgattgaagggattaaagaagcagctgccaagtggggtttcttccaagtgatcaaccatggagtttcgctcgagcttcttgagaagatgaaagatggagttcgtgactttcatgagcaacctcctgaagtgaggaaagatttgtacagccgcgatttcggcagaaagtttatctatttaagtaatttcgatctctacactgctgcagctgcgaattggagagacacattctattgttacatggctccagatcctccagaaccacaggatctgccagagatttgtagggatgttatgatggaatactcaaagcaagtgatgattttgggtgaatttctgtttgagcttttgtcagaagcactagggttgaaccctaatcacctcaaggacatggagtgcttaaagggtttgcgcatgctttgccactacttcccaccgtgtccggagcctgacctaacttttggcacaagtaagcactccgacggctcttttcttaccgtccttctaccagataacatagaagggcttcaggtttgtcgtgagggatactggttcgatgttcctcatgttcccggcgctctcatcatcaacatcggagatcttctgcaggcaagtttgcgcaatcaatacatgtttgctagctcagatttcacaagtttatttacaatgctagatttgtttaagaaatcttcctcttggttcaaagtttttttttttttttaa

SEQ ID NO: 188 - protein, 322 aa, Arabidopsis thaliana
MESTKIAPSFDRASELKAFDETKTGVKGLVDSGISKIPRIFHHSSVELANPKPLPSDLLHLKTIPTIDLGGRDFQDAIKHKNAIEGIKEAAAKWGFFQVINHGVSLELLEKMKDGVRDFHEQPPEVRKDLYSRDFGRKFIYLSNFDLYTAAAANWRDTFYCYMAPDPPEPQDLPEICRDVMMEYSKQVMILGEFLFELLSEALGLNPNHLKDMECLKGLRMLCHYFPPCPEPDLTFGTSKHSDGSFLTVLLPDNIEGLQVCREGYWFDVPHVPGALIINIGDLLQASLRNQYMFASSDFTSLFTMLDLFKKSSSWFKVFFFF

SEQ ID NO: 189 - DNA, 1230 bp, Vitis vinifera
  CDS (1)..(1230)
atggtcgccaagaagagactccatacaatggaagttgctggagaatctctcattgagaatggagcatattttaatagagctatagaagtgaagaagtttgatgaaaccaaagctggagttaaagggcttgtggactctggtgtggagaagattcccagattcttcatccacccaccggagaacttgcagaggtctctgtctgaaactggtgggactagttttcaggttccagtgatagatttcaggggcctggatatgggtcaaagagcagagattgtgagagcaattcgcaaagcttcagagacatggggcttcttccagatggtcaatcatggaattccaattaccatcatagaagaggtgttggaaggagtgagacgattccatgagcagccgcaggagatgaagatggagtggtactcacgggactcgaagcaaccagtgaagtattactgcaacggggacctccatgtatcaaatgctgcaaactggagggactccatatcctgtgagttcccggatggaactctggaccccgaagctttgcctcgtgtatgcagaaaggagataacagcgtacatcaaatgcatggctgaactgaaggagatggtgggtgaattactatctgaggctctggggctgagcagtgaccaccttaagcagatgggatgtacggagactcaaacattggtgtgccactattacccaggttgtccccagccaaacttgactctaggtgctaccaagcattcagacccgagttttataactattcttctgcaagacaacattggtggcctacaggttcttcatcagaatcagtgggtggatgtacctcctgtacatggagctctggtggcaaaccttggggatttcatgcagcttatcaccaatgacaagttcaagagcgtggagcatagagtactggctagacaggttggaccgaggatatcagctgcatgttttttctatccgagtactatcaatacgtataagccttatgggccaataaaggagtttctatcggacaataatcagccaatctacagggaaactcatgtcaatgaatatttagcctattacaggtccaaaggattggatggtacatcagcccttcctcattttaagctaccgtcggcaggagcagccgatccatcacccccctccctccttccccccctctacccaaaaacccaaactcaattcactcaaagtcgctcaaacaactga

SEQ ID NO: 190 - protein, 409 aa, Vitis vinifera
MVAKKRLHTMEVAGESLIENGAYFNRAIEVKKFDETKAGVKGLVDSGVEKIPRFFIHPPENLQRSLSETGGTSFQVPVIDFRGLDMGQRAEIVRAIRKASETWGFFQMVNHGIPITIIEEVLEGVRRFHEQPQEMKMEWYSRDSKQPVKYYCNGDLHVSNAANWRDSISCEFPDGTLDPEALPRVCRKEITAYIKCMAELKEMVGELLSEALGLSSDHLKQMGCTETQTLVCHYYPGCPQPNLTLGATKHSDPSFITILLQDNIGGLQVLHQNQWVDVPPVHGALVANLGDFMQLITNDKFKSVEHRVLARQVGPRISAACFFYPSTINTYKPYGPIKEFLSDNNQPIYRETHVNEYLAYYRSKGLDGTSALPHFKLPSAGAADPSPPSLLPPLYPKTQTQFTQSRSNN

SEQ ID NO: 191 - DNA, 1062 bp, Vitis vinifera
  CDS (1)..(1062)
atggctaccaccagaaatatacctgagtatgatcggaaaagtgaattaaaagcttttgatgattcaaaaagtggagtgaaggggcttcttgatggtgggatgaccaagatccctcttatgttcatccacccacgctataatcctgatgcgaaatcagagtcagctgtctcccagttcagggttcccttgatagaccttgatggcgttaaggacaatgcaactgtgcgggctaaaatcatagaccaagttcgaggagcttgtgaaaactggggattctttcaggtagtgaaccatggcattcccgcaagcgttttggaggagatgatagatgggattcgcggatttcatgagcaagacactcaaatgaaaaaggagttctacacacgcgacttcaaggacaaggtgtcatttgtttccaattttgatttatttgaggcaacagcagctacttggaaggacagtttatcttggcctatggttccgaatcctcctgaccccacggaatttccagcagtatgcagagacatagtgacggaatactcaaagcaagtaaagagattagggtatactctatttgaattactgtcggagggactgggactccatgtaaaccatttgaaagacacgggatgtgctgaggtgatttttcatgtgggtcattactacccaccgtgccctgagccagaattgactctaggcgccagcagacatgctgatagcgggttcctcacagtacttctacaagaccaagtgggtggtctccaagttcttcatcagaatcagtggatcgatttggtccccatgcctggagcactagtaatcaacgttggattttctctacaggttataacaaatgacaggtttaaaagcatagagcatagagtgttggcaaaccgtgtaagctcaagagtgtcaatggcaagtgcttttggcacaactcttttcccatcctcaaaactttattcaccgattaaggagttgctaacccaagagaatcctccgaagtataaggaagccaccttgcaagcccatgttgcctacttgagaggcaaaagggtttga

SEQ ID NO: 192 - protein, 353 aa, Vitis vinifera
MATTRNIPEYDRKSELKAFDDSKSGVKGLLDGGMTKIPLMFIHPRYNPDAKSESAVSQFRVPLIDLDGVKDNATVRAKIIDQVRGACENWGFFQVVNHGIPASVLEEMIDGIRGFHEQDTQMKKEFYTRDFKDKVSFVSNFDLFEATAATWKDSLSWPMVPNPPDPTEFPAVCRDIVTEYSKQVKRLGYTLFELLSEGLGLHVNHLKDTGCAEVIFHVGHYYPPCPEPELTLGASRHADSGFLTVLLQDQVGGLQVLHQNQWIDLVPMPGALVINVGFSLQVITNDRFKSIEHRVLANRVSSRVSMASAFGTTLFPSSKLYSPIKELLTQENPPKYKEATLQAHVAYLRGKRV

SEQ ID NO: 193 - DNA, 1068 bp, Vitis vinifera
  CDS (1)..(1068)
atgatcctgccaagctctggagttgaatctgaatatgatcggaaaagtgaattagaggcttttgatgcttcaaaaagtggagtgaaggggcttgtagatggtgggttgaccaagatccctcttatgttcatccacccacactataatcctgatgcgaaatcaggttccgctgtctctcagttcagggttcccttgatagatcttgatggcgttaatgacaacgccactttgcgggctaaaatcatagaccaagttcgagaagcttgtgaaaattggggattcttgcaggtagtcaaccatggaattcccgcaagtgttttggaggagatgctagatgggattcgcggatttcatgagcaagacactcaaatgaaaaaggagttctacacacgcgacttcaaggaaaaggtatcatttgtttccaattttgatttatttcaggcgacagcagctacttggaaggacagtttatcttgggctgtggctcctaatcctccacaccccaaagaattgccagcagtatgcagagatatagtgatggaatactcgaagcaagtaaagagattagggtatactctgttcgaagtactgtcagaggcactgggactcgatgtaaaccatttgaaagacatggaatgtgctgagatgatgtttcatgcgggtcattactacccaccgtgccctgagccagaattgactctaggtgcccgcagacatactgatagcggcttcctcacagtacttttacaagaccaagtgggtggtctccaagttcttcatcagaatcagtggatcgatttggtccccatgcctggagcactagtaatcaacgttggagattctctacaggttataacaaatgacaggtttaaaagcatagaacatagagtgctggtaaacagtgaaagctcaagagtgtcggtggcaagtgcttttggcacaactcttttcccatcctcgaagctttattcaccgattaaggagttgctatctcaagagaatcctccaaagtataaggaagccaccttgcaaacccatgtcgcctacctgagaggcaaaagggtttga

SEQ ID NO: 194 - protein, 355 aa, Vitis vinifera
MILPSSGVESEYDRKSELEAFDASKSGVKGLVDGGLTKIPLMFIHPHYNPDAKSGSAVSQFRVPLIDLDGVNDNATLRAKIIDQVREACENWGFLQVVNHGIPASVLEEMLDGIRGFHEQDTQMKKEFYTRDFKEKVSFVSNFDLFQATAATWKDSLSWAVAPNPPHPKELPAVCRDIVMEYSKQVKRLGYTLFEVLSEALGLDVNHLKDMECAEMMFHAGHYYPPCPEPELTLGARRHTDSGFLTVLLQDQVGGLQVLHQNQWIDLVPMPGALVINVGDSLQVITNDRFKSIEHRVLVNSESSRVSVASAFGTTLFPSSKLYSPIKELLSQENPPKYKEATLQTHVAYLRGKRV

SEQ ID NO: 195 - DNA, 960 bp, Vitis vinifera
  CDS (1)..(960)
atggtagtcaccagcaccacaaaattttcagaggactacgatcgagcaagtgaattaaaggccttcgatgagtctaaagcgggtgtcaaaggtttagttgatgctggggtctccaaggttccccggatgttcattcaaccaccagataacttgagaacttgtaacacccaattcaattttccagtcatagatctccatggcatggacaacgatccaattcggcgaaaggagattgttgagatggtcagggaagcatcggagacgtggtgtttcttcaccgtggtgaaccatgggatccctgttagcgtcttggaggagatgatggatggcgcacgccggttttatgaacaagacaatgaggtgaaggagttttacacgcgtgatcggacgagaaaggtggtatataatagcaattttgatctctacgtatcaaaagcaactaattggagggacaccttttattgcgttatggctccccatcctcttaacccacaagagttgccagcgacatgcagagatatattgatggagtacaaggagcaagtcatgagattaggacttaaactgttggaattaatgtctgaggctattgggctcaatccaaaccacctaaaagacagggattgtgcggaagggcttgccattttgtgtcactattatccagcatgtccacaaccagagctaaccatgggcaccacaaagcattctgacaatgacttccttaccatactactacaagaccagattggaggcctccaggttcttcatcaggatcagtgtgtcgatgttcccccagagcctggagcccttgtaattaatgttggtgagcttctacagcttatcaccaacgacaggtttaagagtgtagaacacagagtactggcaaaccgacgaggtccaagagtctcagtggcatgcttttttaggtgtggtttgatcagtttttctattaaaaattaa

SEQ ID NO: 196 - protein, 319 aa, Vitis vinifera
MVVTSTTKFSEDYDRASELKAFDESKAGVKGLVDAGVSKVPRMFIQPPDNLRTCNTQFNFPVIDLHGMDNDPIRRKEIVEMVREASETWCFFTVVNHGIPVSVLEEMMDGARRFYEQDNEVKEFYTRDRTRKVVYNSNFDLYVSKATNWRDTFYCVMAPHPLNPQELPATCRDILMEYKEQVMRLGLKLLELMSEAIGLNPNHLKDRDCAEGLAILCHYYPACPQPELTMGTTKHSDNDFLTILLQDQIGGLQVLHQDQCVDVPPEPGALVINVGELLQLITNDRFKSVEHRVLANRRGPRVSVACFFRCGLISFSIKN

SEQ ID NO: 197 - DNA, 1098 bp, Vitis vinifera
  CDS (1)..(1098)
atggtaatcaccagcatcagtcatgaatttccggaggactatgatcgagctagtgaattaaaggctttcgatgagtctaaaactggtgttaaaggtctagctgatgccggggtctccaaagttcctcggatgttcattcaaccaccagataacttgagaacctatactacccagttcaattttcccgtcgtagacctacaaggcatggacaatgatccaattcgccggaacaagatcgttgacatggtcagggatgcatcagagacgtggggtttcttcaacgtggtgaaccatgggatccctgttagcgtgttggaggagatgatggaaggagtacgccggtttcatgaacaagatactgaggtgaagaagcagttttacacacgtgatgcgtcgaggaaaaaggtgatgtacaatagcaattttgatctgtacacagcaccagcagctaattggagggacaccttttattgccttatggctcctcatcctcccaacccagaagaattgccagcatcatgcagggacatactgatggagtataaggatcaagttatgagattaggatttaaattgtttgagttaatatccgaggctctggggcttaatccaaaccacctaaaagacatggactgcgcagaggggctgtcaattttatgtcactactatccgtcgtgcccacagccagaactaactatgggcaccaccaaacacgctgacaatgacttcctcactgtactactacaagaccagattggaggcctccaagttcttcatcaaggtcagtggattgatgtccccccaaggcttggagcgcttgtaattaatgttggagatcttctacagcttattacgaatgacaggtttaaaagtgtaaaacacagggtaccggcaaaccatataggccccagagtctcagtggcatgcttttttagaacatctattcagccatcctccaaactttatgggcctatcaaggaattgtcatctgaagagaatccgccaaagtacagggaaaccacagtgggagactatgttgcctatttcaattcaaaagggcttgatggaacttctgccctaccacatttcaggctctag

SEQ ID NO: 198 - protein, 365 aa, Vitis vinifera
MVITSISHEFPEDYDRASELKAFDESKTGVKGLADAGVSKVPRMFIQPPDNLRTYTTQFNFPVVDLQGMDNDPIRRNKIVDMVRDASETWGFFNVVNHGIPVSVLEEMMEGVRRFHEQDTEVKKQFYTRDASRKKVMYNSNFDLYTAPAANWRDTFYCLMAPHPPNPEELPASCRDILMEYKDQVMRLGFKLFELISEALGLNPNHLKDMDCAEGLSILCHYYPSCPQPELTMGTTKHADNDFLTVLLQDQIGGLQVLHQGQWIDVPPRLGALVINVGDLLQLITNDRFKSVKHRVPANHIGPRVSVACFFRTSIQPSSKLYGPIKELSSEENPPKYRETTVGDYVAYFNSKGLDGTSALPHFRL

SEQ ID NO: 199 - DNA, 1092 bp, Vitis vinifera
  CDS (1)..(1092)
atggccgttgtgcaagaagaaattgaatctaaatatgaccgaattattgagttgaaagcttttgatgactcgaaacttggtgtgaaggggcttgttgatgctgggctggcaaagatcccccggatgtttatccatccacaacataatctctatgagaaatcaggccccattgactctcattctaatattccaatcatagaccttgaaggtgtcaagaatgatgtgactctccatgctaaaatcatcaacgaagttcaaaaagcttgtgaaaactggggcatctttcagatagtcaatcatggaatttcagaagggattttggaggagatgatcgaaggcatacgtagatttcatgagcaagatgctgaagtgaagaaagagtattatactcgtgattttacaaaaaaggtgatatttttgtcaaattttgatctatttcaggcatcatcagcctcctggagggatgcccttttgagtaccatcactcctaatccccctgatcccatacaactgcctttagtatgcagagatatagtggtggaatactcgaagcaagtaaagcatttggggtatactctgttagaattgctatctgaggctcttggacttgaaccaaatcattttaaaaacatggaatttgctaagcagggtttcttcttggctcagtactatccttcatgtcctgaacccgaattgacgctgggcaccaaacgccatactgatcctaactttcttactattgttttacaagaccaagtaggtggtctccaaattcttcatgagaatcactggatggatgttcctcccatacctggggccctagtaataaacaccggagatgttctgcagattgtaaccaacggcaggtttaaaagtgtagaacacagagtactggcacagcatgaaggtccaagaatttcagtggcgtccttcttcaactcatgtttcccaccatcctcaaaagtttacacaccgattaaggagttgttgtctgaagagaatccaccgaaatatcgtgacattttcctccctggttactataagggcttggtattctatgttttagtttctcttgaacaaaagagtttatga

SEQ ID NO: 200 - protein, 363 aa, Vitis vinifera
MAVVQEEIESKYDRIIELKAFDDSKLGVKGLVDAGLAKIPRMFIHPQHNLYEKSGPIDSHSNIPIIDLEGVKNDVTLHAKIINEVQKACENWGIFQIVNHGISEGILEEMIEGIRRFHEQDAEVKKEYYTRDFTKKVIFLSNFDLFQASSASWRDALLSTITPNPPDPIQLPLVCRDIVVEYSKQVKHLGYTLLELLSEALGLEPNHFKNMEFAKQGFFLAQYYPSCPEPELTLGTKRHTDPNFLTIVLQDQVGGLQILHENHWMDVPPIPGALVINTGDVLQIVTNGRFKSVEHRVLAQHEGPRISVASFFNSCFPPSSKVYTPIKELLSEENPPKYRDIFLPGYYKGLVFYVLVSLEQKSL

SEQ ID NO: 201 - DNA, 1092 bp, Vitis vinifera
  CDS (1)..(1092)
atggcatccgccgattacgaccgaatgaaggaagtgaaggagttctctgagtccaagataggcgtcaaaggtctctctgactctggcatcacttccatccctcgtatcttcatacacccaccccaaactctctcccaactcaaacccacatcttcctcttccttctcctccatccacatcccggtaatagatctttccaacttggactctccccatcaccgtcccaagatcgtggaccaaattcgagaggcctctaagacatggggtttctttcaagtgatcaaccacggcgtagccctgtccgtactggaggagacggtcaacgctgtcaagtctttccacgaccagccacatcaagtgaaggcgaagatctccgtgggtgaggagagacgcggggtggtgtacaccagcaacaacgatttgtaccgatcggaggcggcgacttggcatgactatcttcaggtgtggatggcaccacagccgccggaggttgagcggatgccggagatatgcaggagggaggtgattgcatgggacacgcatgcaaaaaaggttgctgagactctgatggaattgctatccgaaggattagggttagaacccggcaagtttaaggagttgacattttctgatactaggctttttgtgggggtatgctatccccactgtccacagcctgatctgacgatggggcttgcatctcacacggatccgacggttctgacggttttgttgcagaaccatgtccctgggttgcaggtgaggcatggggatgaatgggtggatgtaaagcctgttcctggtgggttgattatcaacgctggcgactttctccagatagtgtcgaacggtgagtacaatagtatacaacatcgagtgatagccaacccctgtaaagagccacggatctcgattgtgatgttcttcagtttagcgaaatggaaagagtccgactcttatggacctctaccagagttgctgtctcctgaaaaacctgcaatttatcgcaactttacaaagcaagaatacgacgacaacttctacagtaagggactagacagcaagtccttcattgataagattagaatatga

SEQ ID NO: 202 - protein, 363 aa, Vitis vinifera
MASADYDRMKEVKEFSESKIGVKGLSDSGITSIPRIFIHPPQTLSQLKPTSSSSFSSIHIPVIDLSNLDSPHHRPKIVDQIREASKTWGFFQVINHGVALSVLEETVNAVKSFHDQPHQVKAKISVGEERRGVVYTSNNDLYRSEAATWHDYLQVWMAPQPPEVERMPEICRREVIAWDTHAKKVAETLMELLSEGLGLEPGKFKELTFSDTRLFVGVCYPHCPQPDLTMGLASHTDPTVLTVLLQNHVPGLQVRHGDEWVDVKPVPGGLIINAGDFLQIVSNGEYNSIQHRVIANPCKEPRISIVMFFSLAKWKESDSYGPLPELLSPEKPAIYRNFTKQEYDDNFYSKGLDSKSFIDKIRI

SEQ ID NO: 203 - DNA, 1095 bp, Vitis vinifera
  CDS (1)..(1095)
atgaatatggcgtccgcggattacgaccgaatgaaggaggtgaaggagttcgatgagtccaagatgggcgtcaaaggtctctccgactccggcatcacttccatccctcgtttcttcatacacccaccccaaaccctctcccaactcaaatcttcttcctcttcctcctcccccggaatccctatgatagatctttccaacttggactctccccatcaccgtccgaagatcgtggaccaaattcgagaagcctctaagacatggggtttctttcaagtgatcaaccatggtgtagccgtgtccgcattggaggagacgatcaacgctatcaagtctttccacgagcagccacagcaagtgaaggcgaagcactacgtgcgtgaggagggacgcggcgtgatgtacgccagcaacaacgatttgtaccgatcggaggccgcgagctggcacgactctcttcaggtgtggatggcaccacagccgctcgaggttgagcagattccggagatatgcagaagggaggtggttgcatgggacacgcgtgccaaaacggttgctgagagtgtgatgaaactgttatgcgaaggattagggttagaatccggcaagtttaaggagttgactttttctgatactagggttttggtggggcactgttatccctactgtccacagcctgatttgacgatggggattatatctcacactgatccggtggtgttgacagttttgttgcagaaccaagtccccgggttgcaggtgaagcatggggatgaatgggtggacgtaaagcctgttcctggcgggttgattatcaacgtcggagactttctccagatagtgtcgaatggtgagtacaaaagtgttcagcatcgagtgttagccaattcctgtaaagagccacggatctcgattgtgatgttcttcaacttagcgaaatggaaagactctaactcttatggacctctaccagagttgctgtctcctgaaaaacctgcaatttatagcaactttacacagaaagaatacaacgacaacttctatagcaagggactagacagcaacaagtccttcatcgataagattacaatataa

SEQ ID NO: 204 - protein, 364 aa, Vitis vinifera
MNMASADYDRMKEVKEFDESKMGVKGLSDSGITSIPRFFIHPPQTLSQLKSSSSSSSPGIPMIDLSNLDSPHHRPKIVDQIREASKTWGFFQVINHGVAVSALEETINAIKSFHEQPQQVKAKHYVREEGRGVMYASNNDLYRSEAASWHDSLQVWMAPQPLEVEQIPEICRREVVAWDTRAKTVAESVMKLLCEGLGLESGKFKELTFSDTRVLVGHCYPYCPQPDLTMGIISHTDPVVLTVLLQNQVPGLQVKHGDEWVDVKPVPGGLIINVGDFLQIVSNGEYKSVQHRVLANSCKEPRISIVMFFNLAKWKDSNSYGPLPELLSPEKPAIYSNFTQKEYNDNFYSKGLDSNKSFIDKITI

SEQ ID NO: 205 - DNA, 1095 bp, Vitis vinifera
  CDS (1)..(1095)
atggtggtcaccagcaccagtgaattgccaggggactacgatcgagcaagtgaattaaaggctttcgatgagtccaaagctggtgtaaaaggactcgttgatgccggggtctctcaagttccccggatattcattcaaccactggagaaatcgagggccaatgtaaacacccaattcaaatttccagtcatagacctccaaggcatggatacggatcgagttcagcgcaaacagatcgtagacaaggtccgggaggcgtcagagacgtggggtttcttcaacgtgctgaaccatgggatcccagttaccgtgctggaggagatgatgaatggggtacgcaggttttatgaacaagatactgagctgaagcaggaattttacacccgagatgtgtcgagaaagttggtgtataatagcaattttgatctgtacacagctaaagcagctagttggagggacacattttattgccttatggctcctcatcctcccaacccacaagacttaccagcggcgtgcagggatatattgatggagtacaaggaacaagttatgaaattggggtttaaattgttggagttaatgtcagaggctctggggctcaatcccaaccacctaaaaggcatggattgtgcagaggggcttgccatggtgtgtcactactatccagcatgccctcagccagaattaaccttgggcaccggcttccacactgataacgacttccttactgtcctactacaagaccagattggaggcctccaagttcttcatcaggatcagtgggttgatgtccccccaatgcctggagctcttgtaatcaatgttggagatcttctacagctcattacaaatgacaggtttaagagtgtggaacacagagtactggcaaaccatactgggccaagagtctcaattgcatgcttctttagcacatccgtccagccatcctcaaagctttatggacctatcaaggaattgttatctgaagagaacccagcaaggtacagggaaaccacagtgagcgactatgttgcccacttccaagagaaagggcttgaagggtccactgctctgcagcttttccggctctaa

SEQ ID NO: 206 - protein, 364 aa, Vitis vinifera
MVVTSTSELPGDYDRASELKAFDESKAGVKGLVDAGVSQVPRIFIQPLEKSRANVNTQFKFPVIDLQGMDTDRVQRKQIVDKVREASETWGFFNVLNHGIPVTVLEEMMNGVRRFYEQDTELKQEFYTRDVSRKLVYNSNFDLYTAKAASWRDTFYCLMAPHPPNPQDLPAACRDILMEYKEQVMKLGFKLLELMSEALGLNPNHLKGMDCAEGLAMVCHYYPACPQPELTLGTGFHTDNDFLTVLLQDQIGGLQVLHQDQWVDVPPMPGALVINVGDLLQLITNDRFKSVEHRVLANHTGPRVSIACFFSTSVQPSSKLYGPIKELLSEENPARYRETTVSDYVAHFQEKGLEGSTALQLFRL

SEQ ID NO: 207 - DNA, 1074 bp, Vitis vinifera
  CDS (1)..(1074)
atggcgactcaagctgactgcgatcgattaggtgaattaaaggcttttgatgagaccaaagcaggtgtcaaaggactggttgatgccggggtctcccaagttccccggattttcattcaaccccccgatgacttcacaactggtgacaccaaattcagttttccagtcatagaccttcaagacatgaacacagatccagctcgacggaaggagatcgtggacatggtccgagacgcatcggagacgtggggtttcttcaacgtggtgaaccatggaatctccgtcactgttttggaggagatgaaggatggtgtacgcaggttttatgaacaagatacagaggtcaagaagcagtattactcgcgtgatttggagaggaaggtcgtgtataacagcaattttgatctgtacaaagcaccagcagctaattggagggataccttttattttcttatggctcctcaaccccccgaccctcaagagttgccaccggctttcagggatatattgatagagtacaaggatgaagttatgaaactaggctttaaattgttggagttgatctctgaggctctggggctgaaagcaaaccacctaaaagatatggattgtgcggagggactggccatgctgtgtcactactatcctgcatgccctcagccagaactaaccatgggcaccaccaagcacgctgacaacgactttcttaccgtcctactacaagacgagattggaggcctccaagttcttcatcaggatcagtgggttgatgttcccccaatgcctggagcccttgttattaatattggagaccttttacagcttataacaaatgacaggtttaaaagtgttgaacaccgagtgctggcaagccacaagggcccaagagtttctgtggcatgcttttttagcactgctcttcttccatccttgaaactttacggacctatcaaggaattgttatctgaagagaatccgcccaagtacagggaaattacggtgagagattttgttgcctacttcaatgcaaaaggacttgacgggacttctgccctggagcatttcaaactctag

SEQ ID NO: 208 - protein, 357 aa, Vitis vinifera
MATQADCDRLGELKAFDETKAGVKGLVDAGVSQVPRIFIQPPDDFTTGDTKFSFPVIDLQDMNTDPARRKEIVDMVRDASETWGFFNVVNHGISVTVLEEMKDGVRRFYEQDTEVKKQYYSRDLERKVVYNSNFDLYKAPAANWRDTFYFLMAPQPPDPQELPPAFRDILIEYKDEVMKLGFKLLELISEALGLKANHLKDMDCAEGLAMLCHYYPACPQPELTMGTTKHADNDFLTVLLQDEIGGLQVLHQDQWVDVPPMPGALVINIGDLLQLITNDRFKSVEHRVLASHKGPRVSVACFFSTALLPSLKLYGPIKELLSEENPPKYREITVRDFVAYFNAKGLDGTSALEHFKL

SEQ ID NO: 209 - DNA, 1077 bp, Vitis vinifera
  CDS (1)..(1077)
atgagaaaaaagagtgctgactgcgatcgattaggtgaattaaaggcttttgatgagaccaaagcaggtgtcaaaggactggttgatgccggggtctcccaagttccccggattttcattcaaccccccgatgacttcacaactggtgacaccaaattcagttttccagtcatagaccttcaagacatgaacacagatccagctcgacggaaggagatcgtggacatggtccgagacgcatcggagacgtggggtttcttcaacgtggtgaaccatggaatctccgtcactgttttggaggagatgaaggatggtgtacgcaggttttatgaacaagatacagaggtcaagaagcagtattactcgcgtgatttggagaggaaggtcgtgtataacagcaattttgatctgtacaaagcaccagcagctaattggagggataccttttattttcttatggctcctcaaccccccgaccctcaagagttgccaccggctttcagggatatattgatagagtacaaggatgaagttatgaaactaggctttaaattgttggagttgatctctgaggctctggggctgaaagcaaaccacctaaaagatatggattgtgcggagggactggccatgctgtgtcactactatcctgcatgccctcagccagaactaaccatgggcaccaccaagcacgctgacaacgactttcttaccgtcctactacaagacgagattggaggcctccaagttcttcatcaggatcagtgggttgatgttcccccaatgcctggagcccttgttattaatattggagaccttttacagcttataacaaatgacaggtttaaaagtgttgaacaccgagtgctggcaagccacaagggcccaagagtttctgtggcatgcttttttagcactgctcttcttccatccttgaaactttacggacctatcaaggaattgttatctgaagagaatccgcccaagtacagggaaattacggtgagagattttgttgcctacttcaatgcaaaaggacttgacgggacttctgccctggagcatttcaaactctag

SEQ ID NO: 210 - protein, 358 aa, Vitis vinifera
MRKKSADCDRLGELKAFDETKAGVKGLVDAGVSQVPRIFIQPPDDFTTGDTKFSFPVIDLQDMNTDPARRKEIVDMVRDASETWGFFNVVNHGISVTVLEEMKDGVRRFYEQDTEVKKQYYSRDLERKVVYNSNFDLYKAPAANWRDTFYFLMAPQPPDPQELPPAFRDILIEYKDEVMKLGFKLLELISEALGLKANHLKDMDCAEGLAMLCHYYPACPQPELTMGTTKHADNDFLTVLLQDEIGGLQVLHQDQWVDVPPMPGALVINIGDLLQLITNDRFKSVEHRVLASHKGPRVSVACFFSTALLPSLKLYGPIKELLSEENPPKYREITVRDFVAYFNAKGLDGTSALEHFKL

SEQ ID NO: 211 - DNA, 1092 bp, Vitis vinifera
  CDS (1)..(1092)
atggtaggcaccagcaccacaaaattttcagaggactacgatcgagcaagtgaattaaaggccttcgatgagtctaaagagggtgtcaaaggtttagttgatgctggggtctccaaggttccccggatgttcattcgaccaccagataactcgagagactgtaacacccaattcaaatttccggtcatagacctccatggcatggacagcgatccaattcggcgaaagaagattgttgagatggtccgggaagcatcggagacgtggggtttattcaccgtggtgaaccatgggatccctgttagtgtgttggaggagatgatggatggggtacaccggttttatgaacaagataatgaagtgaagaaggagttttacacgcgtgatctgacgagaaaggtgatatataatagcaattttgatctctacgtatcaaaagcagctaattggagggacaccttttattgccttatggctccccatcctcttaacccacaagagttgccagcgacatgcagagatatattgatggagtacaaggagcaagtcatgagattaggacttaaactgttggaattaatgtctgaggctattgggctcaatccaaaccacctaaaagacatggattgtgcggaagggcttgccattttgtgtcactattatccagcatgtccacagccagagctaaccatgggcaccacaaagcattctgacaatgacttccttactatactactacaagaccagattggaggcctccaggttcttcatcaggatcagtgggtcgatgttcccccagagcctggagcccttgtaattaatgttggtgatcttctacagcttatcaccaacgacagatttaagagtgtagaacacagagtactggcaaaccgacgaggtccaagagtctcagtggcatgcttttttagcacatctcatctgccatcctcaaaattatatggacctatcaaggaattgttatccaaagagaatccaccaaaatacagggaaaccacagtgagagactatgttctccatttccgctcaaaagggcttgacgggacttctgctctaccacagttcaagctctaa

SEQ ID NO: 212 - protein, 363 aa, Vitis vinifera
MVGTSTTKFSEDYDRASELKAFDESKEGVKGLVDAGVSKVPRMFIRPPDNSRDCNTQFKFPVIDLHGMDSDPIRRKKIVEMVREASETWGLFTVVNHGIPVSVLEEMMDGVHRFYEQDNEVKKEFYTRDLTRKVIYNSNFDLYVSKAANWRDTFYCLMAPHPLNPQELPATCRDILMEYKEQVMRLGLKLLELMSEAIGLNPNHLKDMDCAEGLAILCHYYPACPQPELTMGTTKHSDNDFLTILLQDQIGGLQVLHQDQWVDVPPEPGALVINVGDLLQLITNDRFKSVEHRVLANRRGPRVSVACFFSTSHLPSSKLYGPIKELLSKENPPKYRETTVRDYVLHFRSKGLDGTSALPQFKL

SEQ ID NO: 213 - DNA, 1098 bp, Vitis vinifera
  CDS (1)..(1098)
atggtaatcaccagcatcagtcatgaatttccggaggactatgatcgagctagtgaattaaaggctttcgatgagtctaaaactggtgttaaaggtctagttgatgccggggtctccaaagttcctcggatgttcattcaaccaccagataacttgagaacctatactacccagttcaattttcccgtcgtagacctacaaggcatggacaatgatccaattcgccggaacaagattgttgacatggtcaaggatgcatcagagacatggggtttcttcaacgtggtgaaccatgggatccctgttagcgtgttggaggagatgatggaaggagtactccggttttacgaacaagatactgaggtgaagaagcagttttacacacgtgatgcgtcgaggaaaaagatggtgtacaatagcaattttgatctgtatacagcaccagcagctaattggagggacaccttttattgccttatggctcctcatcctcccaacccagaagaattgccagcagcatgcagggacatactgatggagtataaggatcaaattatgagattaggatttaaattgtttgagttaatatccgaggctctggggcttaatccaaaccacctaaaagacatggactgcacagaggggctgtcaattttatgtcactactatccgtcatgcccacagccagaactaactatgggcaccaccaaacacgctgacaatgacttcctcactgtactactacaagaccagattggaggcctccaagttcttcatcaaggtcagtggattgatgtccccccaatgcctggagcgcttgtaattaatgttggagatcttctacagcttattacgaatgacaggtttaaaagtgtagaacacagggtactggcaaaccatataggccccagagtctcagtggcatgcttttttagcacatctattcagccatcctccaaactttatgggcctatcaaggaattgttatctgaagagaatccgcctaagtacaaggaaaccacagtgggagactatgttgcctatttcaattcaaaagggcttgatggaacttctgccctacctcatttcaggctctag

SEQ ID NO: 214 - protein, 365 aa, Vitis vinifera
MVITSISHEFPEDYDRASELKAFDESKTGVKGLVDAGVSKVPRMFIQPPDNLRTYTTQFNFPVVDLQGMDNDPIRRNKIVDMVKDASETWGFFNVVNHGIPVSVLEEMMEGVLRFYEQDTEVKKQFYTRDASRKKMVYNSNFDLYTAPAANWRDTFYCLMAPHPPNPEELPAACRDILMEYKDQIMRLGFKLFELISEALGLNPNHLKDMDCTEGLSILCHYYPSCPQPELTMGTTKHADNDFLTVLLQDQIGGLQVLHQGQWIDVPPMPGALVINVGDLLQLITNDRFKSVEHRVLANHIGPRVSVACFFSTSIQPSSKLYGPIKELLSEENPPKYKETTVGDYVAYFNSKGLDGTSALPHFRL

SEQ ID NO: 215 - DNA, 1107 bp, Vitis vinifera
  CDS (1)..(1107)
atgatgacatgcaatactcgagaaggaatggactctgaatatgaccggaaaagtgagttaattgcttttgatgattcaaaagctggtgtgaaggggcttgtagatgctggggtggcaaagatcccacgtatgttcatccatccacaacataatctccgtgagaagtcagtttccactaatgcccagcttcggattccaatcatagacctagaaggtgtcaacagtgatgcaattctacgtgctaaaatcattgacaaagttcgaaatgcttgtgagatttggggcatttttcagattgtcaatcatggaattctgaaaagtgttttggaggagatgatcaaaggaatacgtagatttaatgagcaagacactgaagtgaagaaagagttttatacccgtgattcctccaaaaaggtgaaatttgtatccaattttgatctatttcaggcaccagcagctacttggaaggattccttttcttgtattattaatcctaatccaccagacccaacagatatgcctgcggtatgcagagatataatcatggaatactcgaagcaagtaaagatgttggctaatactctgtttgaattagttgcagaggctcttggcctcaattcaaaccatttgaaagacatggaatgtgctgagggccttttccttgtgtctcattactacccagcttgcccagaaccagaattgactatgggcaccaaaactcatactgatccaacattcctcactgtacttttacaagaccaagtgggtggtctccaagttctccatgagaaacaatgggtcaatgtgaacccggtgcctggagcactagtgataaacactggagatcttctgcagcttgtatccaacgacatgtttaggagtgcaaaacacagggtattggcaaatcataaaggcccaagagtatcagtggccagctttttttctccatctagtctgccaccctcaaaactctacggaccaatcaaggagttgttatcagaagagaatcctccaaagtacaaggaaaccacagcaagagactatggtacctaccacagagcagaaaggcttggtggaacttctgctctccagcatttcaagctttag

SEQ ID NO: 216 - protein, 368 aa, Vitis vinifera
MMTCNTREGMDSEYDRKSELIAFDDSKAGVKGLVDAGVAKIPRMFIHPQHNLREKSVSTNAQLRIPIIDLEGVNSDAILRAKIIDKVRNACEIWGIFQIVNHGILKSVLEEMIKGIRRFNEQDTEVKKEFYTRDSSKKVKFVSNFDLFQAPAATWKDSFSCIINPNPPDPTDMPAVCRDIIMEYSKQVKMLANTLFELVAEALGLNSNHLKDMECAEGLFLVSHYYPACPEPELTMGTKTHTDPTFLTVLLQDQVGGLQVLHEKQWVNVNPVPGALVINTGDLLQLVSNDMFRSAKHRVLANHKGPRVSVASFFSPSSLPPSKLYGPIKELLSEENPPKYKETTARDYGTYHRAERLGGTSALQHFKL

SEQ ID NO: 217 - DNA, 1107 bp, Vitis vinifera
  CDS (1)..(1107)
atgatcacatgcaatactcgaggaggaatggactctgaatatgaccggaaaagtgagttaattgctttcgatgattcaaaagctggtgtgaaggggcttgtagatgctggggtggcaaagatcccacgtatgttcatccatccacaacataatctccgtgagaagtcagtttccactaatgcccagcttcggattccaatcatagacctagaaggtgtcaacagtgatgcaattctacgtgctaaaatcattgacaaagttcgaaatgcttgtgagatttggggcatttttcagattgtcaatcatggaattctgaaaagtgttctggaggagatgatcaaaggaatacgtagatttaatgagcaagacactgaagtgaagaaagagttttatacacgtgattcctccaaaaaggtgaaatttgtatccaattctgatctatttcaggcaccagcagctacttggaaggattccttttcttgtattattactcctaatccaccagacccaacagatatgcctgcggtatgcagagatataatcatggaatactcgaagcaagtaaagatgttggctaatactctgtttgaattagttgcagaggctcttggcctcaattctaaccatttgaaagacatggaatgtgctgagggccttttccttgtgtctcattactacccagcttgcccagaaccagaattgactatgggcaccaaaactcatactgatccaacattcctcactgtacttttacaagaccaagtaggtggtctccaagttctccatgagaaacaatgggtcaatgtgaacccagtgcctggagcactagtgataaacactggagatcttctgcagcttgtatccaacgacatgtttaggagtgcaaaacacagggtgttggcaaatcataaaggcccaagagtatcagtgggcagctttttttctccatttagtctgccaccctcaaaactctacggaccaatcaaggagttgttatcagaagagaatcctccaaagtacaaggaaaccacagcaagagactatggtacctgccacagagcagaaaggcatgatggtacttctgctctccatcatttcaagctttag

SEQ ID NO: 218 - protein, 368 aa, Vitis vinifera
MITCNTRGGMDSEYDRKSELIAFDDSKAGVKGLVDAGVAKIPRMFIHPQHNLREKSVSTNAQLRIPIIDLEGVNSDAILRAKIIDKVRNACEIWGIFQIVNHGILKSVLEEMIKGIRRFNEQDTEVKKEFYTRDSSKKVKFVSNSDLFQAPAATWKDSFSCIITPNPPDPTDMPAVCRDIIMEYSKQVKMLANTLFELVAEALGLNSNHLKDMECAEGLFLVSHYYPACPEPELTMGTKTHTDPTFLTVLLQDQVGGLQVLHEKQWVNVNPVPGALVINTGDLLQLVSNDMFRSAKHRVLANHKGPRVSVGSFFSPFSLPPSKLYGPIKELLSEENPPKYKETTARDYGTCHRAERHDGTSALHHFKL

SEQ ID NO: 219 - DNA, 1107 bp, Vitis vinifera
  CDS (1)..(1107)
atgaatcaagttgaggcagaaatcggatcgcaaaatgactggaacagtgaaacaaaagcttttgatgataccaaacttggtgtaaagggactcgtggatgccggggtgacaaagatccctcgtatattcatccatccacagcattatctccaggataagttagtttgtgaggattcccagtttagtattccaaccatagatcttcagggtgtcactagtgatgcaattttaagggccaaagccatagagaagattcaaaatgcttgtgaaaaatggggcttctttcagatagtcaatcatggaattcccaagagtgatttggaagagatgcttgctggggtacggagatttcatgagcaagatgcggaagtgaagaaggagttctacacacgcgatctcagaaaaaaggtgttattcctatccaattttgacctatttcaagctccgacagctacctggagggataccttggctctcgttatgtatcctattctaccagaacccgaatcattgcctacagtatgcagagacatagcgctggcatactcaaagcaagtacagagattggggattactctgttcgaactactgtcagtgggtcttggactcaatccaaaccatctgaaagacatggagtgtgctgaaaggctttcctttctgggtcactattacccagcatgccctgagcctgaattgacactgggcaccagtattcactccgatgctgacttcatgaccatacttttacaagaccaactgggtggcctccaagtttttcatgagaatcagtgggtcgacgttccccccatccctggagcactaatagtaaatgttggagattttctccagcttctcactaacgacaagcttaaaagcgtccatcacagggtaattgcaaaacaaaaaggcccaagaatttcagtggcatgtttctttagaacagaattttttgagccaggagataacttaagaagttatggaccaatccaagagttgttatcagaggaaaatcctccagtgtacaaggaaaccactgccaatgactatctgaagcactactactcaaaagggtctgggacttcttcactattgcatttgaaattgtga

SEQ ID NO: 220 - protein, 368 aa, Vitis vinifera
MNQVEAEIGSQNDWNSETKAFDDTKLGVKGLVDAGVTKIPRIFIHPQHYLQDKLVCEDSQFSIPTIDLQGVTSDAILRAKAIEKIQNACEKWGFFQIVNHGIPKSDLEEMLAGVRRFHEQDAEVKKEFYTRDLRKKVLFLSNFDLFQAPTATWRDTLALVMYPILPEPESLPTVCRDIALAYSKQVQRLGITLFELLSVGLGLNPNHLKDMECAERLSFLGHYYPACPEPELTLGTSIHSDADFMTILLQDQLGGLQVFHENQWVDVPPIPGALIVNVGDFLQLLTNDKLKSVHHRVIAKQKGPRISVACFFRTEFFEPGDNLRSYGPIQELLSEENPPVYKETTANDYLKHYYSKGSGTSSLLHLKL

SEQ ID NO: 221 - DNA, 1122 bp, Vitis vinifera
  CDS (1)..(1122)
atggtgagcagtagcagtaacgaaattcaggcaggaaaggcatccgattatgatcgaaaaagtgaattaaaatcctttgatgactcgaaacttggtgtaaagggactactggatgctgggctcactcagatcccacggatgttcatcaatgaacaacataagactgacatgacttggggttccagggagtcctccccagaaagcgttccaatcctagacttcaaaggcatggataaagatgcagctctacgcactcagatcatcaagaaagtgggagaggcttgcgagaagtggggtttcttccaggttgtcaaccatgggattccggagagtgttttgaatgatatgattgatggaatccggagatttcatgagcaagatgctgagaccaaaaaggagtattattcccgtgatttccaaaaaaaagttagatttaatagcaattttgatctttatcaagcacgcatggctaattggagggattccttggcttgtgtgatggctcctaatcctcctctccctgagcaactgccggcggtatgcagagatatagtgatggaatattcggaacaagtaatgaaattggggcttactctctttgaattattatccgaagctcttggacttaatccaaaccatttgaaagacatggaatgtgctgagggccttttccttttggggcattactacccagcatgtcccgaaccagaactgaccctgggaactagcagccatactgattctgacttcttcaccatactcttacaagaccaaatgggtggtctccaagttcttcatgaagatcaatgggttgatgttccccccatacctggagctctggtaataaacatgggagatcttctacagctggtctccaatgataggtttaaaagcatcttccacagagtcctagccaaaaatgtaggccccagaatttcagtggcaagttttttcagaaaatctcatcgagagaataactcgagactctacggacccattaaggagttgctttcagaagaaaaccccccaatctacagggaaacaaccgtagacgagtttctcacatactacttctcaaaaggactggatgggaactcttcacttccacattttaagctgtga

SEQ ID NO: 222 - protein, 373 aa, Vitis vinifera
MVSSSSNEIQAGKASDYDRKSELKSFDDSKLGVKGLLDAGLTQIPRMFINEQHKTDMTWGSRESSPESVPILDFKGMDKDAALRTQIIKKVGEACEKWGFFQVVNHGIPESVLNDMIDGIRRFHEQDAETKKEYYSRDFQKKVRFNSNFDLYQARMANWRDSLACVMAPNPPLPEQLPAVCRDIVMEYSEQVMKLGLTLFELLSEALGLNPNHLKDMECAEGLFLLGHYYPACPEPELTLGTSSHTDSDFFTILLQDQMGGLQVLHEDQWVDVPPIPGALVINMGDLLQLVSNDRFKSIFHRVLAKNVGPRISVASFFRKSHRENNSRLYGPIKELLSEENPPIYRETTVDEFLTYYFSKGLDGNSSLPHFKL

SEQ ID NO: 223 - DNA, 1122 bp, Vitis vinifera
  CDS (1)..(1122)
atggtgagcggcagcagtgacgaaattctggcaggaaaggtatccgattatgatcgaaaaagtgaattaaaatcctttgatgactcgaaacttggtgtaaagggactactggatgctgggctcactaagatcccacggatgttcatcaatgagcaacataagactgacatgacttggggttccagggagtcctccccagaaagcgttccaatcatagacttcaaaggcatggataaagatgcagctctacgcactcagatcatcaagaaagtgggagaggcttgcgagaagtggggtttcttccaggttgtcaaccatgggattccagagagtgttttgaatgatatgattgatggaatccggagatttcatgagcaagatgctgagaccaaaaaggagtattattcccgtgattcccaaaaaaaagttagatttattagcaattttgatctttatcaagcacgcatggctaattggagggattccttgtcttgtgtgatggctcctaatcctcctctccctgagcaactgccggctgtatgcagagatatagtgatggaatattcggggcaagtaatgaaactggggcttactctctttgaattattatccgaagctcttggacttaatccaaaccatttgaaagacatggaatgtgctgagggccttttcctttcggggcattactacccagcatgtcctgaaccagaactgaccctgggcactagcagccatactgatcctgacttcttcaccatactcttacaagaccaaatgggtggcctccaagttcttcatgaagatcaatgggttgatgttccccccatacctggagctctggtaataaacatgggagatcttctacagctggtctccaatgataggtttaaaagcatcttccacagggtcctagccaaaaatgtaggccccagaatttcattggcaagttttttcaatacatctcatccacagaataactcgagactctacggacccattaaggagttgctttcagaagaaaaccccccaatctacagggaaacaactgtagacgagtttctcgcatactacttctcaaaaggactggatgggaactcttcacttccacattttaagctgtga

SEQ ID NO: 224 - protein, 373 aa, Vitis vinifera
MVSGSSDEILAGKVSDYDRKSELKSFDDSKLGVKGLLDAGLTKIPRMFINEQHKTDMTWGSRESSPESVPIIDFKGMDKDAALRTQIIKKVGEACEKWGFFQVVNHGIPESVLNDMIDGIRRFHEQDAETKKEYYSRDSQKKVRFISNFDLYQARMANWRDSLSCVMAPNPPLPEQLPAVCRDIVMEYSGQVMKLGLTLFELLSEALGLNPNHLKDMECAEGLFLSGHYYPACPEPELTLGTSSHTDPDFFTILLQDQMGGLQVLHEDQWVDVPPIPGALVINMGDLLQLVSNDRFKSIFHRVLAKNVGPRISLASFFNTSHPQNNSRLYGPIKELLSEENPPIYRETTVDEFLAYYFSKGLDGNSSLPHFKL

SEQ ID NO: 225 - DNA, 1122 bp, Vitis vinifera
  CDS (1)..(1122)
atggtgagcagcagcggtgacgaaattcaggcaggaaaggtatacgattatgatcgaaaaagtgaattaaaatcctttgatgactcgaaacttggtgtgaagggactactggatgctgggctcactaagatcccacggatgttcatcaatgaccaacataagactgacatgacttggggttccagggagtcctccccagaaagcgttccaatcatagacttcaaaggcgtggacaaagatgcagctctacgcactcagatcgtcaagaaagtgggagaggcttgcgagaagtggggtttcttccaggttgtcaaccatgggattccagagagtgttttgaatgatatgattgatggaatccggagatttcatgagcaagatgctgagaccaaaaaggagtattattcccgtgattcccaaaacaaagttagatttagtagcaattttgatctttatcaagcacgcacggctaattggagggattccttgtcttgtgtgatggctcctaatcctcctctccctgagcaactgccggcggtatgcagagatatagtgatggaatattcggggcaagtaatgaaattggggcttactctctttgaattattatccgaagctcttggacttaatccaaaccatttgaaagacatggaatgtgctgagggccttttccttttggggcattactacccagcatgtcctgaaccagaactgaccctgggcactagcagccataccgatcctgacttcttcaccatactcttacaagaccaaatgggtggtctccaagttcttcatgaagatcaatgggttgatgttccccccatacctggggctctgctaataaacatgggagatcttctacagctggtctccaatgataggtttaaaagcatcttccacagagtcctagccaaaaatgtaggccccagaatttcagtggcaagttttttcagaaaatctcatgcagagaataactcgagactctacggacccgttaaggagttgctttcagaagaaaaccccccaatctacagggaaacaaccttagacgagtttctcacatactacttctcaaaaggactggatgggaactcttcacttccacattttaagctgtga

SEQ ID NO: 226 - protein, 373 aa, Vitis vinifera
MVSSSGDEIQAGKVYDYDRKSELKSFDDSKLGVKGLLDAGLTKIPRMFINDQHKTDMTWGSRESSPESVPIIDFKGVDKDAALRTQIVKKVGEACEKWGFFQVVNHGIPESVLNDMIDGIRRFHEQDAETKKEYYSRDSQNKVRFSSNFDLYQARTANWRDSLSCVMAPNPPLPEQLPAVCRDIVMEYSGQVMKLGLTLFELLSEALGLNPNHLKDMECAEGLFLLGHYYPACPEPELTLGTSSHTDPDFFTILLQDQMGGLQVLHEDQWVDVPPIPGALLINMGDLLQLVSNDRFKSIFHRVLAKNVGPRISVASFFRKSHAENNSRLYGPVKELLSEENPPIYRETTLDEFLTYYFSKGLDGNSSLPHFKL

SEQ ID NO: 227 - DNA, 1128 bp, Vitis vinifera
  CDS (1)..(1128)
atggaagagagaatgaagacctcggcggccggagagtcctctgccatgagtgttttagattatgaccgaacaaaagagttgaaggcttttgatgacaccaaagaaggtgtcaaaggactagtagatgccggggtggtgaatattcctaagatattcatgcgaccaccagatgagcttgcagagaaacgggattgccatcagaacgacatcaaagttccagttgtagatatgagtggcgtccagaaaggtgatcggcacagggagattgttgaagaagtccggattgcatcagaggagtggggctttttccaagttgtgaatcacggaatcccctcaaatgtgctggaagaaatggtcaatgggatacgagtgtttaatgaacaagatcctgaggtcaagaaagagtactattctcgtgatatgatgaggaaagtaaaattcaacagcaattatgatctcttccattcgcgggctgctaactggagggacactttgacaatttcccttacttcagatggccttgacccccaagaattgccagcgatctgcagagaggcaacaactgagtacataaagcatgttatgaagctgggggacgttctttttgagttattatcagaggcccttggactcaaaccagaccacctaagagccatgggatatactgaagggagcagcaccatggtctgccactactatccagcatgcccagagccagaacttactatgggcactagcaagcacactgatcctgcaacccttactattcttttgcaagaccaaattggtggcctccaagtctttcatgaaaaccagtgggctgaagttcaccccattgcaggaagcctagtcataaatataggggactttctccaggttatgtcaaatggcaagcttaaaagcgtctatcacagagtggttgccaaccatgtcggaccaagaatttcaacagcatactttttctcaggagctagaactgagccagcgaagctctgcggcccactcaaagagttgatatcagaggagaacccccctgtgtacagagatttcctagtggctgaatatattgggaaatttatgtccaaggggctagatgacgattctggccttgattatttcaagctgtga

SEQ ID NO: 228 - protein, 375 aa, Vitis vinifera
MEERMKTSAAGESSAMSVLDYDRTKELKAFDDTKEGVKGLVDAGVVNIPKIFMRPPDELAEKRDCHQNDIKVPVVDMSGVQKGDRHREIVEEVRIASEEWGFFQVVNHGIPSNVLEEMVNGIRVFNEQDPEVKKEYYSRDMMRKVKFNSNYDLFHSRAANWRDTLTISLTSDGLDPQELPAICREATTEYIKHVMKLGDVLFELLSEALGLKPDHLRAMGYTEGSSTMVCHYYPACPEPELTMGTSKHTDPATLTILLQDQIGGLQVFHENQWAEVHPIAGSLVINIGDFLQVMSNGKLKSVYHRVVANHVGPRISTAYFFSGARTEPAKLCGPLKELISEENPPVYRDFLVAEYIGKFMSKGLDDDSGLDYFKL

SEQ ID NO: 229 - DNA, 1101 bp, Vitis vinifera
  CDS (1)..(1101)
atggacatgggcttgggtctggaccctgtttatgatcgaaaaagtgaattaaaagcctttgatgactcaaaccttggagtaaagggactcgtagatgcagggatcacaaagattccacggatattcatcaatgagcaaaataagcttgacatgagctctaacaatcctcacttgagtgttccaattatagacttggaaagctttgacaaagatgcagttgtccgggctgaaataatcaaccaaatccgtgatgcttgcaagaagtggggtttctttctggtgatcaatcatgaaattccagaaagtgttttgagtgaaatgattgatgggataagaagatttcatgagcaagatggtgaagccaagaaggagtggtatacgcgtgattactcaagaaaggttacatatagtagtaattttgatctttatcaagcatcctcaactaattggagggacacctttgcttgtaccttggctcctgatccacctcaacccgagcaattgcctgcagtgtgcagagatatactgatggaatacttgaagcacgtaaggagactgggttttagcctctttgaattactatcagaagcacttggcctccatccaaaccatttgaaaaacatggaatgtgctgaggggattctccttctgggccattactatccagcgtgccctgaaccagaactaactctgggcaccagcagccacacagatgctgacttcattaccatacttatacaagaccaaatgggtggcctccaagttcttcatgaggatcaatgggtcaatatcccacccatatcaggagctttggtaataaacgttggagatcttctgcagtttgtgtctaatggtaacttcaaaagctcggaacacagagtactagcaaaaaatgtaggcccgagaatttcagtggcatgctttttcagaaaaattattccggtagagaataccacaagactgtatgggccaatcaaggagttactatcagaagataaccctcctatatacaggcaggaaaacttcccaaatgagtatctcatgcactacgactcaaaaggattggatggcacctcttcattactacgttttaagttgtga

SEQ ID NO: 230 - protein, 366 aa, Vitis vinifera
MDMGLGLDPVYDRKSELKAFDDSNLGVKGLVDAGITKIPRIFINEQNKLDMSSNNPHLSVPIIDLESFDKDAVVRAEIINQIRDACKKWGFFLVINHEIPESVLSEMIDGIRRFHEQDGEAKKEWYTRDYSRKVTYSSNFDLYQASSTNWRDTFACTLAPDPPQPEQLPAVCRDILMEYLKHVRRLGFSLFELLSEALGLHPNHLKNMECAEGILLLGHYYPACPEPELTLGTSSHTDADFITILIQDQMGGLQVLHEDQWVNIPPISGALVINVGDLLQFVSNGNFKSSEHRVLAKNVGPRISVACFFRKIIPVENTTRLYGPIKELLSEDNPPIYRQENFPNEYLMHYDSKGLDGTSSLLRFKL

SEQ ID NO: 231 - DNA, 1182 bp, Vitis vinifera
  CDS (1)..(1182)
atgtctatcagccttgcctccaatttctttacgttatcttcgcacattcggacaaggtccaagaaggagaaggctcaacctacaactgcagttacgctaatgatggccgccaacggcgatattcactacgatcgagccaaagaagtcaagcagttcgacgaatccaaaatcggcgtcaaaggtctcgtcgactccggcatcaccactatcccccgaatcttcatccacccaaccgaaactatttccgacctcaaatcctctaacccatccggttcccattcaatccccgtcatttccctctccggcgaccgctcctccgtcgtcgaccaaatcaggcgcgcctccgccgaattcggcttcttccagatcatcaaccacggcatctccaccgacgtcctcgaccgcacggtcgccgccatcagggccttcaacgagcagccaacggaggttaaggcgcagtactaccggcgggatattggaacgggagtggcgttctcgactaacttcgacttgtatcactccaaggcggcgagctggagagacacgcttcaggtgaggctggggccgacacctacggagttcgataagatgcctgaggtgtgccgcagggaagtgatggagtgggaccgtgagatggtgaggctgggagaggcgttgatgggattgatgtgcgaagggctggggttggatgcgggaagattgaaggagctgacgtgtttggaaggaagaattatggcgagtcactactatccgtactgtcctcagcctgaattgacgatggggctcaccccccacacagatccgggagtgttaacggtggtactgcagaatcaggtaggtgggttgcaggttaagcacgatggggcatggctggatttgaaccctgtgcccggtgctctcgtcatcaacgtgggcgatatgcttcaggtaatgagcaatgatgaatacaaaagcgtggagcatagggtggcggggaacccatgtcgggaagcaagagtttcaattgcagttttcttcaatccgggcgataggcattccttgtttgggccattgccggagctcatatcagcagagaaaccagctgtgtacaagagcttcacattcgatgagtttatgacaaggttctttactaaggagttggatggtaagtctttgataaatttctttaaactctcacaatga

SEQ ID NO: 232 - protein, 393 aa, Vitis vinifera
MSISLASNFFTLSSHIRTRSKKEKAQPTTAVTLMMAANGDIHYDRAKEVKQFDESKIGVKGLVDSGITTIPRIFIHPTETISDLKSSNPSGSHSIPVISLSGDRSSVVDQIRRASAEFGFFQIINHGISTDVLDRTVAAIRAFNEQPTEVKAQYYRRDIGTGVAFSTNFDLYHSKAASWRDTLQVRLGPTPTEFDKMPEVCRREVMEWDREMVRLGEALMGLMCEGLGLDAGRLKELTCLEGRIMASHYYPYCPQPELTMGLTPHTDPGVLTVVLQNQVGGLQVKHDGAWLDLNPVPGALVINVGDMLQVMSNDEYKSVEHRVAGNPCREARVSIAVFFNPGDRHSLFGPLPELISAEKPAVYKSFTFDEFMTRFFTKELDGKSLINFFKLSQ

SEQ ID NO: 233 - DNA, 1125 bp, Populus trichocarpa
  CDS (1)..(1125)
atggcggtcaccgcagattcaaccaccggagtttctgcaacctacgaccggtaccaagaaatcagatcctttgatgaatcaaaatgcggtgtcaaaggcctcgtcgatgctggcatcaccaaggtgccgcgatttttcatccggccaccggaggatattgccgcggatgacataaataccggcgaatggatcaatacccagttcaccattcctgtcatagaccttaaaaacatggacagtcgaagagctgaggcggtggccggagtcaagcgggcagcagaggaggtgggtttcttccaggtggtgaaccatggtatggaaaatagggtgttggaggagatgttggaggcggtgcgcgggttccacgagcagccaagggaggtaaaggaggagtactatagcagagagatgacgaggaaggtgaagtatgttagtaattttgatttgtacaagtcaaagtatgctaattggagggatactctgttttgtgttatgggacctgacccacttgatccacaagagttgcctctggtttccagagatataatgatggagtactcgaacaaagtttgcaaattagcaacagttttgtttgagttactatctgaggcacttggactcaagtctgaccacctcaaagagatggattgtgtgaaaggacatgctctgctgagtcactattatccagcatgtccggagcccgagttggctatgggcaccacgaagcactctgaccctgatttcctcaccatcctacttcaagacgatatcggtggactccaaatttttcatcagaatcattggatagatgttcctcctgttcatggagctctagtagtgaacattggagatcttttacaggcaagcactgtgcttatatctaatgacaagttcaaaagtgtagagcacagggtggtggccaatcatattggccctagagtatccgtggcttcctttttcactccgcatctttatccatcaacaagactgtatggcccaatcaaggaattgctgtcagaagaaaatccccccatttactgtgaaatcactgtgaaagactttatcgcctattatgattcaaaaggattggatgggaattctgcacttccacacttcaaggtgtga

SEQ ID NO: 234 - protein, 374 aa, Populus trichocarpa
MAVTADSTTGVSATYDRYQEIRSFDESKCGVKGLVDAGITKVPRFFIRPPEDIAADDINTGEWINTQFTIPVIDLKNMDSRRAEAVAGVKRAAEEVGFFQVVNHGMENRVLEEMLEAVRGFHEQPREVKEEYYSREMTRKVKYVSNFDLYKSKYANWRDTLFCVMGPDPLDPQELPLVSRDIMMEYSNKVCKLATVLFELLSEALGLKSDHLKEMDCVKGHALLSHYYPACPEPELAMGTTKHSDPDFLTILLQDDIGGLQIFHQNHWIDVPPVHGALVVNIGDLLQASTVLISNDKFKSVEHRVVANHIGPRVSVASFFTPHLYPSTRLYGPIKELLSEENPPIYCEITVKDFIAYYDSKGLDGNSALPHFKV

SEQ ID NO: 235 - DNA, 1101 bp, Populus trichocarpa
  CDS (1)..(1101)
atggcctccacacttgattccagttctgatcgaacaagtgaattaaaagcttttgatgaaaccaaagccggtgtcaaaggacttgttgatgctggaatcaccaaggtcccttggattttccatcacccaccagatgacttagacaagactttgattgttgctacagatggcaagttcagatttccaatcatagacctggaaggtgtccgtaaagatccctttcaacgcaaggagatcgttgagagagtccgagatgcatcagagacttggggcttttttgaagtggtcaatcatgggattcctgtcagtgttctggaggagatgaaggatggggtatgtaggttttatgagcaagatgttgagctgaaaaaagaatacttttctcgtgattatacaagaaaggtcatctataatagcaattttgatttgtatactgcatcatcaactaactggagggatactgtttcttatatcatggctcctggtcctcccatgccagaggaattgccagcggcctgcagagatattctcatagaatacaccaaggaagtaatgaaattgggaaattcactgttcgagttactatcagaggctcttggtttgaaccccaaccacttgaaagacattgattgcagcaaggggcttacaattctgggccattattatccggcgtgtccccagccagaattgacgttgggtacaactaagcactctgataatgacttcctcacagtgcttctacaagatcatattggtggcctccaggttatgtatcagaatcattgggttgatgtacctcctacgcctggggctctgttgattaacattggagatcttctacaggcaactcttatatcaaatgacaagttcataagcgttgagcatagggtgctggcaaaccgtataggaccaagagtatctgtagcgagctttttcagcacaaatcttaatccaaactcaagaccctatggacctatcaaggagttgttatcagaagagagtcctccaaagtacagggaaaccacagtaagagattatgttgcctacttcatccacaaaggccttgacgggacatctgctctgctgcatttcaagctgtga

SEQ ID NO: 236 - protein, 366 aa, Populus trichocarpa
MASTLDSSSDRTSELKAFDETKAGVKGLVDAGITKVPWIFHHPPDDLDKTLIVATDGKFRFPIIDLEGVRKDPFQRKEIVERVRDASETWGFFEVVNHGIPVSVLEEMKDGVCRFYEQDVELKKEYFSRDYTRKVIYNSNFDLYTASSTNWRDTVSYIMAPGPPMPEELPAACRDILIEYTKEVMKLGNSLFELLSEALGLNPNHLKDIDCSKGLTILGHYYPACPQPELTLGTTKHSDNDFLTVLLQDHIGGLQVMYQNHWVDVPPTPGALLINIGDLLQATLISNDKFISVEHRVLANRIGPRVSVASFFSTNLNPNSRPYGPIKELLSEESPPKYRETTVRDYVAYFIHKGLDGTSALLHFKL

SEQ ID NO: 237 - DNA, 1140 bp, Populus trichocarpa
  CDS (1)..(1140)
atggtgggcagtggcagggctgctgaaatttctgttcaagaaactagctatgacagagggagtgaattaaaagctttcgacgagacaaaagctggtgttaaaggacttgttgatgctggggtttcaaaagtccctcaaatcttcatccatccatctgaaaggttggagcacaggactctaagcaccagcaagaacccagttaatgtcactgtcatagaccttgaagctatcgataaagatccaatcaggcgtaaagggattgttgacaaagttcgtgatgcgtcggagacatggggtttctttcaggtggtcaatcatggaatccctgtgggtgttctggaggagatggatgccggtgtacgcagattttttgagcaagatgttgaagtgaagaaaaagttttacacgcgagatgtcacaaaaaggtttgtgtacaacagcaactttgatttgcacacagcaccagtggctaattggagggatacatttttctcctacatggccccttatcctcccaagcctgaagaattgcctggagcttgcagagatataatgatggaattctcgaagcaagttacaagtctaggaatttctttgttcgggctgttatcagaggctcttgggctaaaaacagatcacctggaaaagatggactgtgctgaggggcttgctcttataagtcattactatccagcatgtcctgagccagaattaactctaggtacaagcaagcattcggataatgacttcctcacggtacttctgcaagatcagattggaggcctccaaatgcttcatcaggatcagtgggttgatattcctcctgttccaggagccctagtgatcaatattggagatcttatgcaggcaagtttctcctttattagtctgatatcgaacgacaaatttaaaagtgtggaacacagagtactggcaaaccgtgtaggtccaagaatatcagttgcttgttttttcagcacaagttttcagccatcctcaaagctatatggaccgatcaaggagctgttatcagaatataaccctccaatttatagagaaaccacagtgaatgagtatctttcctacttctatgatcatggccttgatggaacatctccattgatacacttcaagctgtaa

SEQ ID NO: 238 - protein, 379 aa, Populus trichocarpa
MVGSGRAAEISVQETSYDRGSELKAFDETKAGVKGLVDAGVSKVPQIFIHPSERLEHRTLSTSKNPVNVTVIDLEAIDKDPIRRKGIVDKVRDASETWGFFQVVNHGIPVGVLEEMDAGVRRFFEQDVEVKKKFYTRDVTKRFVYNSNFDLHTAPVANWRDTFFSYMAPYPPKPEELPGACRDIMMEFSKQVTSLGISLFGLLSEALGLKTDHLEKMDCAEGLALISHYYPACPEPELTLGTSKHSDNDFLTVLLQDQIGGLQMLHQDQWVDIPPVPGALVINIGDLMQASFSFISLISNDKFKSVEHRVLANRVGPRISVACFFSTSFQPSSKLYGPIKELLSEYNPPIYRETTVNEYLSYFYDHGLDGTSPLIHFKL

SEQ ID NO: 239 - DNA, 1107 bp, Populus trichocarpa
  CDS (1)..(1107)
atggtgatcaaaagctcagctgaagttcaagaatcaaactatgacaaagaaagtcaactcaaagcttttgatgacacgagaactggagtgaagggtctaatagataatggaattaccaagattccaaagatattcgttcatgacaaaagatcagatgtttcaagtgattctgatcagtctgcggctgttccattgatagacttcgaaggcatagatgaagatagaagtcaacgtgcaaaggtagtcgagggagtaagagatgcttgtgccgagtggggtttctttcaagtggtcaatcatggaatcccagttagtgttttggaggaaatgattggtggggtagctaggtttcatgagcaagatagtgaagtgaagaaagaatggtattcaagggattacacaaggaaggtgctttataattcaaattttgatctttatcaagccccagctgccaattggagagatactttgagttgtgtcatggctcctcgccagccgaatccccatgacttgcctgatgtgtgcagagatatcatgaatgattactcaaacaaagtaatggttttagcacaaagattattcgaattgctgtcagaagcactgggacttgatcctaattaccttaaagacatacactgtgcagagggactcttttttctgggccattactacccagcatgtcctgaaccagatttgacttttggcactagcagccattctgatagtagcttcctcactgttcttgtacaagaccaaattggtggcctccaagtccttcatgaaaatcaatgggttgatcttaaccccattccaggagctcttgttataaacctgggagacatgttacagttaatttcgaatgacagatttattagtgtccagcacagagtgctagcaagaactgtaggtccaagaatttctgtggcatgctttataagacaacaccttccgcctgagaatgcctcgagactatatgggccaatcaaggagttgctatcagaagaaagcccagcaatctaccgagaaaccactgtgaaggacttggtaacccactactatgcaaaagggctcgatgggatctctgcattggagcatttcaagctgtga

SEQ ID NO: 240 - protein, 368 aa, Populus trichocarpa
MVIKSSAEVQESNYDKESQLKAFDDTRTGVKGLIDNGITKIPKIFVHDKRSDVSSDSDQSAAVPLIDFEGIDEDRSQRAKVVEGVRDACAEWGFFQVVNHGIPVSVLEEMIGGVARFHEQDSEVKKEWYSRDYTRKVLYNSNFDLYQAPAANWRDTLSCVMAPRQPNPHDLPDVCRDIMNDYSNKVMVLAQRLFELLSEALGLDPNYLKDIHCAEGLFFLGHYYPACPEPDLTFGTSSHSDSSFLTVLVQDQIGGLQVLHENQWVDLNPIPGALVINLGDMLQLISNDRFISVQHRVLARTVGPRISVACFIRQHLPPENASRLYGPIKELLSEESPAIYRETTVKDLVTHYYAKGLDGISALEHFKL

SEQ ID NO: 241 - DNA, 1128 bp, Oryza sativa subsp. indica
  CDS (1)..(1128)
atgccggcctccgaccccgcccccgccgccgccgccgccgcctacgaccgcaccgccgagctccgcgcgctcgacgccaccctctccggcgtccgcggcctcgtcgcgtcgggcgccacccacctcccccgcatcttccacaacgtcgtccatggtgatcaagaaccaccggaggcgacggcgccatcgtccgcggccacgaccacgacgaccgtcccggtgatcgacatcagcgggagccgcgcggccgtggtcgacgccgtccggcgggcggcggcggagtgggggttcttccaggtgacggggcacggggttcccctcgccgcgatggacgccgcggcgggcgcggcgcgcgcgttccacgagtccggcggcggcgagggcagcgacaaggcgcggctctactcgcgcgagcccgggagagccgtcaagtaccactgcaacttcgacctgtaccagtcgccggtggccaactggcgcgacacgctctacctccgcatggcgcccgacccgccgcccgccgccgacttgccggagatctgccgggatgcactgtttgaatatgccaaacaagtaaagaatttggggaacacactgttcgagctgctctcggagggccttgggctcaaaccgagctacctgacagacatagaatgcaaccaggggcaaatcatactatgccactactaccctccctgcccccagcctgagctcgccatcgggacaagccggcattcggactccggcttcctcaccatacttctccaggatgacattgggggcctccagatcctccatgaggaccgatgggtcgatgtcacgccaactcctggagcgttcatcgtcaatgttgccgatctcctgcagttgatctccaatgacaattacaagagtgtggaccatagagtggtggcgaagaacactgaaccgagagtctcgattgcctgtttcttcagcacccattttcatccgatttccacgaggatgtatggcccgatcaaggagctgttgtctgatgagaacccgcctttgtacagggaggcactcgtcagagattacaccgcgcgttactactccgttgggctagatggcaagttcaagactactctttctgaattccggttatag

SEQ ID NO: 242 - protein, 375 aa, Oryza sativa subsp. indica
MPASDPAPAAAAAAYDRTAELRALDATLSGVRGLVASGATHLPRIFHNVVHGDQEPPEATAPSSAATTTTTVPVIDISGSRAAVVDAVRRAAAEWGFFQVTGHGVPLAAMDAAAGAARAFHESGGGEGSDKARLYSREPGRAVKYHCNFDLYQSPVANWRDTLYLRMAPDPPPAADLPEICRDALFEYAKQVKNLGNTLFELLSEGLGLKPSYLTDIECNQGQIILCHYYPPCPQPELAIGTSRHSDSGFLTILLQDDIGGLQILHEDRWVDVTPTPGAFIVNVADLLQLISNDNYKSVDHRVVAKNTEPRVSIACFFSTHFHPISTRMYGPIKELLSDENPPLYREALVRDYTARYYSVGLDGKFKTTLSEFRL

SEQ ID NO: 243 - DNA, 1179 bp, Oryza sativa subsp. indica
  CDS (1)..(1179)
atgccgctcgctcgcaagcccatgcctccaagtagcttcatcatgaccacaattcgtcatcaagccggcgaggcggcgaccgtggcgtcctccgccgccgccgcgacggcaacggaccgcgccgccctcgtcaaggccttcgacgagacacgcaccggcgtccgcggcctcgtcgagtccggtgtctccgccgtcccggacatcttccgccaccccgacccctacgcctccgtcccgctcgctccacccggcgtctccatccccgtcgtcgacctctccctccccgcgccgctcgccgccgaggccgcggcgggggcggcgcgcgagtggggtttcttctacctcgtcaaccaccacgacctcgtcccccccggcttcaccgacgggctcctcgccgccacgcgcgccttccacgagctccccgccgcggagcgcgccgcgcactacggccgctccgtggacggcggggtggactacttctccaacttcgacctgtaccggtccggcgccgcgagctggcgcgacaccatcaaggtcacgttcgggccctcgcgccccgacacggggcgcatcccggcggcgtgccgcgccgaggtcgtcggctgggacgcgcacgccaccgccgtggcccgcgccgtcatggcgctgctctgcgaggggctcggcctccgcggcgagacgctggaggaggcctcctgcctcgaggggagagtgatggtgtgccactactacccggtgtgccctgagcccgagcgcaccatggggatcgtcccgcacacggaccccgtcgtgctcaccatcctcgcgcaggatggtgtcggtggcctgcaggtgaagcacacgaacgaggatggggagagctactgggtggatgcgaagcctgtgcccggtgctcttatgatcaatgttggggacctattgcagataatgtctaatgataagtacaagagcgtggaacaccgggtagtaatgaattcacatgaagaagccagagtttcaagtgccatcttctacaatcctggcaagagaggggactcagttttttatggaccattgccagagctggtttcttcggaaaacccgccaaagtacaggaattttactatgcctgagtttttggggaccttctttaaacgagagcttgcgagcaatgctcttatcgagcacttcaaaatatga

SEQ ID NO: 244 - protein, 392 aa, Oryza sativa subsp. indica
MPLARKPMPPSSFIMTTIRHQAGEAATVASSAAAATATDRAALVKAFDETRTGVRGLVESGVSAVPDIFRHPDPYASVPLAPPGVSIPVVDLSLPAPLAAEAAAGAAREWGFFYLVNHHDLVPPGFTDGLLAATRAFHELPAAERAAHYGRSVDGGVDYFSNFDLYRSGAASWRDTIKVTFGPSRPDTGRIPAACRAEVVGWDAHATAVARAVMALLCEGLGLRGETLEEASCLEGRVMVCHYYPVCPEPERTMGIVPHTDPVVLTILAQDGVGGLQVKHTNEDGESYWVDAKPVPGALMINVGDLLQIMSNDKYKSVEHRVVMNSHEEARVSSAIFYNPGKRGDSVFYGPLPELVSSENPPKYRNFTMPEFLGTFFKRELASNALIEHFKI

SEQ ID NO: 245 - DNA, 1191 bp, Oryza sativa subsp. japonica
  CDS (1)..(1191)
atggccaccttctccggcaccgaccgcctccgcgacctccacgccttcgacgacaccaaggccggcgtcaagggcctcgtcgacgccggcgtcaccaccgtcccctacttcttccgccaccaccccgacccactccccgtcgccgcgccgtcggaggccgccgcggccatccctctcatcgacctcgccaaggccgacgtcgaccgtggccacgtcgtctcccaggtgaggtccgccgccgagtcggccgggcttttccaggtggtgaaccacggcgtcgccggggagctcatggacgcgatgctcgcggcggcgcggcggttcaacgagcagcccgcggaggcgaaggcgccctactacaccagggacctcggcagcaaggtccggttcttctgcaacttcgacctgttccagtcgccggcggcgcagtggcgcgacacgctgtacgtggagatggtgcccgacgcgccctcgccggaggagatcccgccgccgctcaggggcgtcgcggaggatttcgccgcggcggtgtggcggctcggcgagcgggtgaccgagctgctctcggaggcgctgggccttccccccgggtacctcgccgagcacgccgggtgcatggacggcatgagcatggtggcgcagtactacccgccgtgcccggagccggagaagacgatgggcacgacgcggcactccgacccgagcttcctcaccgtgctgctgcaggacgagtccggcgggctccaggcggtgctcccgcggcccccggaggagcggtgggtggacgtgcccccggtggccggcgcgctggtggtgaacgtcggcgacctcctccagctggtgtcgaacggccggctccggagcatggagcaccgggtgctgcccaccgccgccagcgcggcgcgggcccgcgtggcggtggcgtgcttcttccggctcgagtactcggcgtcgttgacgaggccgaggtcgtacggcccgatcgtggattccggcgaaggcggcgcgcggcgggcggcggcggtgtacaggagcacgacgccgagggatttcctggcgtacttcaacggcaaggggctcgacgggcggtcggcgctggagcatttcaggattccggaggcggctgcggcttcttccgccgtcgacgtcgtctcctcctccaccaccgccgccgcatccattccacggtag

SEQ ID NO: 246 - protein, 396 aa, Oryza sativa subsp. japonica
MATFSGTDRLRDLHAFDDTKAGVKGLVDAGVTTVPYFFRHHPDPLPVAAPSEAAAAIPLIDLAKADVDRGHVVSQVRSAAESAGLFQVVNHGVAGELMDAMLAAARRFNEQPAEAKAPYYTRDLGSKVRFFCNFDLFQSPAAQWRDTLYVEMVPDAPSPEEIPPPLRGVAEDFAAAVWRLGERVTELLSEALGLPPGYLAEHAGCMDGMSMVAQYYPPCPEPEKTMGTTRHSDPSFLTVLLQDESGGLQAVLPRPPEERWVDVPPVAGALVVNVGDLLQLVSNGRLRSMEHRVLPTAASAARARVAVACFFRLEYSASLTRPRSYGPIVDSGEGGARRAAAVYRSTTPRDFLAYFNGKGLDGRSALEHFRIPEAAAASSAVDVVSSSTTAAASIPR

SEQ ID NO: 247 - DNA, 1071 bp, Oryza sativa subsp. japonica
  CDS (1)..(1071)
atggccaccgtctccggcaccgaccgcctccgcgacctccacgccttcgacgacaccaaggccggcgtcaagggcctcgtcgacgccggcgtcaccaccatcccctacttcttccgccacccgcccgacccactccccgtcgcctcgccgtccgaggccgccgcggccatcccgctcatcgacctcgccaaggccgacgtcgaccgtgaccacgtcgtctcacaggtgacggcggcagccgagacggtcggcttcttccaggttgtcaaccatggcgtcgccggggagctgatggaggcgatgctcgcggcggtgcggcgcttcaacgaggagcccctggaggcgaaggtgccctactacaccagggacgtcgccagcaaggtccggttcagctccaacttcgacctcttccgttcgccggcggccaactggcgcgacacgttggtgatcgagatgttccccggagccgccgtcgccggaggagatcccgccgccgtgcaggggcgtgttggaggagggctgggcctccccgcggggtacctcggccgcgaagccgggtgcacggacgggctgagcgtggcggcgaactactacccggcgtgcccggagccggaggcgacgatgggcgcgaccaagcacgccgaccccagcttcctcaccgtgctgctgcaggacacctccggcggcctgcaggcgctgctggaccagccgcggcgtcggtgggtggacgtgcccccggtggccggcgcgctggtggtgaacgtcggcgacttcctccagctggtgtcgaacgaccggctccggagcgtggagcaccgggtgctgcccaccggcgctgccgggccggctcgcgtgtcggtggcgtgcttcttccgcgtcgagtacgcgtcgacgaggccgtacgtcccggtcgtcgtcggcggcggcggggcgcgggcggcggcggtgtacaggggcacgacggcgggggagttcctggcgcacttcaacggcaaggggctcgacgggcggtcggcgctggaccacttcaggattccggcggcggcgtcgtctcctcctcctccactgtag

SEQ ID NO: 248 - protein, 356 aa, Oryza sativa subsp. japonica
MATVSGTDRLRDLHAFDDTKAGVKGLVDAGVTTIPYFFRHPPDPLPVASPSEAAAAIPLIDLAKADVDRDHVVSQVTAAAETVGFFQVVNHGVAGELMEAMLAAVRRFNEEPLEAKVPYYTRDVASKVRFSSNFDLFRSPAANWRDTLVIEMFPGAAVAGGDPAAVQGRVGGGLGLPAGYLGREAGCTDGLSVAANYYPACPEPEATMGATKHADPSFLTVLLQDTSGGLQALLDQPRRRWVDVPPVAGALVVNVGDFLQLVSNDRLRSVEHRVLPTGAAGPARVSVACFFRVEYASTRPYVPVVVGGGGARAAAVYRGTTAGEFLAHFNGKGLDGRSALDHFRIPAAASSPPPPL

SEQ ID NO: 249 - DNA, 1104 bp, Vitis vinifera
  CDS (1)..(1104)
atggttgtcaccagcttcagtgaatctccaatggcgactcaagctgactgcgatcgattaggtgaattaaaggcttttgatgagaccaaagcaggtgtcaaaggactggttgatgccggggtctcccaagttccccggattttcattcaaccccccgatgacttcacaactggtgacaccaaattcagttttccagtcatagaccttcaagacatgaacacagatccagctcgacggaaggagatcgtggacatggtccgagacgcatcggagacgtggggtttcttcaacgtggtgaaccatggaatctccgtcactgttttggaggagatgaaggatggtgtacgcaggttttatgaacaagatacagaggtcaagaagcagtattactcgcgtgatttggagaggaaggtcgtgtataacagcaattttgatctgtacaaagcaccagcagctaattggagggataccttttattttcttatggctcctcaaccccccgaccctcaagagttgccaccggctttcagggatatattgatagagtacaaggatgaagttatgaaactaggctttaaattgttggagttgatctctgaggctctggggctgaaagcaaaccacctaaaagatatggattgtgcggagggactggccatgctgtgtcactactatcctgcatgccctcagccagaactaaccatgggcaccaccaagcacgctgacaacgactttcttaccgtcctactacaagacgagattggaggcctccaagttcttcatcaggatcagtgggttgatgttcccccaatgcctggagcccttgttattaatattggagaccttttacagcttataacaaatgacaggtttaaaagtgttgaacaccgagtgctggcaagccacaagggcccaagagtttctgtggcatgcttttttagcactgctcttcttccatccttgaaactttacggacctatcaaggaattgttatctgaagagaatccgcccaagtacagggaaattacggtgagagattttgttgcctacttcaatgcaaaaggacttgacgggacttctgccctggagcatttcaaactctag

SEQ ID NO: 250 - protein, 367 aa, Vitis vinifera
MVVTSFSESPMATQADCDRLGELKAFDETKAGVKGLVDAGVSQVPRIFIQPPDDFTTGDTKFSFPVIDLQDMNTDPARRKEIVDMVRDASETWGFFNVVNHGISVTVLEEMKDGVRRFYEQDTEVKKQYYSRDLERKVVYNSNFDLYKAPAANWRDTFYFLMAPQPPDPQELPPAFRDILIEYKDEVMKLGFKLLELISEALGLKANHLKDMDCAEGLAMLCHYYPACPQPELTMGTTKHADNDFLTVLLQDEIGGLQVLHQDQWVDVPPMPGALVINIGDLLQLITNDRFKSVEHRVLASHKGPRVSVACFFSTALLPSLKLYGPIKELLSEENPPKYREITVRDFVAYFNAKGLDGTSALEHFKL

SEQ ID NO: 251 - DNA, 1122 bp, Vitis vinifera
  CDS (1)..(1122)
atggtgagcagcagcggtgacgaaattcaggcaggaaaggtatacgattatgatcgaaaaagtgaattaaaatcctttgatgactcgaaacttggtgtgaagggactactggatgctgggctcactaagatcccacggatgttcatcaatgaccaacataagactgacatgacttggggttccagggagtcctccccagaaagcgttccaatcatagacttcaaaggcgtggacaaagatgcagctctacgcactcagatcgtcaagaaagtgggagaggcttgcgagaagtggggtttcttccaggttgtcaaccatgggattccagagagtgttttgaatgatatgattgatggaatccggagatttcatgagcaagatgctgagaccaaaaaggagtattattcccgtgattcccaaaacaaagttagatttagtagcaattttgatctttatcaagcacgcatggctaattggagggattccttgtcttgtgtgatggctcctaatcctcctctccctgagcaactgccggcggtatgcagagatatagtgatggaatattcggggcaagtaatgaaattggggcttactctctttgaattattatccgaagctcttggacttaatccaaaccatttgaaagacatggaatgtgctgagggccttttccttttggggcattactacccagcatgtcctgaaccagaactgaccctgggcactagcagccataccgatcctgacttcttcaccatactcttacaagatcaaatgggtggtctccaagttcttcatgaagatcaatgggttgatgttccccccatacctggagctctggtaataaacatgggagatcttctacagctggtctccaatgataggtttaaaagcatcttccacagagtcctagccaaaaatgtaggccccagaatttcagtggcaagttttttcagaaaatctcatgcagagaataactcgagactctacggacccgttaaggagttgctttcagaagaaaaccccccaatctacagggaaacaaccttagacgagtttctcacatactacttctcaaaaggactggatgggaactcttcacttccacattttaagctgtga

SEQ ID NO: 252 - protein, 373 aa, Vitis vinifera
MVSSSGDEIQAGKVYDYDRKSELKSFDDSKLGVKGLLDAGLTKIPRMFINDQHKTDMTWGSRESSPESVPIIDFKGVDKDAALRTQIVKKVGEACEKWGFFQVVNHGIPESVLNDMIDGIRRFHEQDAETKKEYYSRDSQNKVRFSSNFDLYQARMANWRDSLSCVMAPNPPLPEQLPAVCRDIVMEYSGQVMKLGLTLFELLSEALGLNPNHLKDMECAEGLFLLGHYYPACPEPELTLGTSSHTDPDFFTILLQDQMGGLQVLHEDQWVDVPPIPGALVINMGDLLQLVSNDRFKSIFHRVLAKNVGPRISVASFFRKSHAENNSRLYGPVKELLSEENPPIYRETTLDEFLTYYFSKGLDGNSSLPHFKL

SEQ ID NO: 253 - DNA, 1107 bp, Vitis vinifera
  CDS (1)..(1107)
atggaagttgctggagaatctctcattgagaatggagcatattttaatagagctatagaagtgaagaagtttgatgaaaccaaagctggagtaaaagggcttgtggactctggtgtggagaagattcccagattcttcatccacccaccggagaacttgcagaggtctctgtctgaaactggtgggactagttttcaggttccagtgatagatttcaggggcctggatatgggtcaaagagcagagattgtgagagcaattcgcaaagcttcagagacatggggcttcttccagatggttaatcatggaattccaattaccatcatagaagaggtgttggaaggagtgagacgattccatgagcagccgcaggagatgaagatggagtggtactcacgggactcgaagcaaccagtgaagtattactgcaacggggacctccatgtatcaaatgctgcaaactggagggactccatatcgtgtgagttcccggatggaactctggaccccgaagctttgcctcgtgtatgcagaaaggagataacagcgtacatcaaatgcatggctgaactgaaggagatggtgggtgaattactatctgaggctctggggctgagcagtgaccaccttaagcagatgggatgtacggagactcaaacattggtgtgccactattacccaggttgtccccagccagacttgactctaggtgctaccaagcattcagacccgtgttttataactattcttctgcaagacaacattggtggcctacaggttcttcatcagaatcagtgggtggatgtaccacctgtacatggagctctggtggcaaaccttggggatttcatgcagcttatcaccaatgacaagttcaagagcgtggagcatagagtactggctagacaggttggaccgaggatatcagctgcatgttttttctatccgagtactatcaatacgtataagccttatgggccaataaaggagtttctatcggacaataatccgccaatctacagggaaactcatgtcaatgaatatttagcctattacaggtccaaaggattggatggtacatcagcccttcctcattttaagctatga

SEQ ID NO: 254 - protein, 368 aa, Vitis vinifera
MEVAGESLIENGAYFNRAIEVKKFDETKAGVKGLVDSGVEKIPRFFIHPPENLQRSLSETGGTSFQVPVIDFRGLDMGQRAEIVRAIRKASETWGFFQMVNHGIPITIIEEVLEGVRRFHEQPQEMKMEWYSRDSKQPVKYYCNGDLHVSNAANWRDSISCEFPDGTLDPEALPRVCRKEITAYIKCMAELKEMVGELLSEALGLSSDHLKQMGCTETQTLVCHYYPGCPQPDLTLGATKHSDPCFITILLQDNIGGLQVLHQNQWVDVPPVHGALVANLGDFMQLITNDKFKSVEHRVLARQVGPRISAACFFYPSTINTYKPYGPIKEFLSDNNPPIYRETHVNEYLAYYRSKGLDGTSALPHFKL

SEQ ID NO: 255 - DNA, 1122 bp, Vitis vinifera
  CDS (1)..(1122)
  misc_feature (252)..(252): m is a or c
atggtgagcggcagcagtgacgaaattctggcaggaaaggtatccgattatgatcgaaaaagtgaattaaaatcctttgatgactcgaaacttggtgtaaagggactactggatgctgggctcactaagatcccacggatgttcatcaatgagcaacataagactgacatgacttggggttccagggagtcctccccagaaagcgttccaatcatagacttcaaaggcatggataaagatgcagctctacgmactcagatcatcaagaaagtgggagaggcttgcgagaagtggggtttcttccaggttgtcaaccatgggattccagagagtgttttgaatgatatgattgatggaatccggagatttcatgagcaagatgctgagaccaaaaaggagtattattcccgtgattcccaaaaaaaagttagatttattagcaattttgatctttatcaagcacgcatggctaattggagggattccttgtcttgtgtgatggctcctaatcctcctctccctgagcaactgccggctgtatgcagagatatagtgatggaatattcggggcaagtaatgaaattggggcttactctctttgaattattatccgaagctcttggacttaatccaaaccatttgaaagacatggaatgtgctgagggccttttcctttcggggcattactacccagcatgtcccgaaccagaactgaccctgggaactagcagccatactgattctgacttcttcaccatactcttacaagaccaaatgggtggcctccaagttcttcatgaagatcaatgggttgatgttccccccatacctggagctctggtaataaacatgggagatcttctacagctggtctccaatgataggtttaaaagcatcttccacagggtcctagccaaaaatgtaggccccagaatttcattggcaagttttttcaatacatctcatccacagaataactcgagactctacggacccattaaggagttgctttcagaagaaaaccccccaatctacagggaaacaactgtagacgagtttctcgcatactacttctcaaaaggactggatgggaactcttcacttccacattttaagctgtga

SEQ ID NO: 256 - protein, 373 aa, Vitis vinifera
MVSGSSDEILAGKVSDYDRKSELKSFDDSKLGVKGLLDAGLTKIPRMFINEQHKTDMTWGSRESSPESVPIIDFKGMDKDAALRTQIIKKVGEACEKWGFFQVVNHGIPESVLNDMIDGIRRFHEQDAETKKEYYSRDSQKKVRFISNFDLYQARMANWRDSLSCVMAPNPPLPEQLPAVCRDIVMEYSGQVMKLGLTLFELLSEALGLNPNHLKDMECAEGLFLSGHYYPACPEPELTLGTSSHTDSDFFTILLQDQMGGLQVLHEDQWVDVPPIPGALVINMGDLLQLVSNDRFKSIFHRVLAKNVGPRISLASFFNTSHPQNNSRLYGPIKELLSEENPPIYRETTVDEFLAYYFSKGLDGNSSLPHFKL

SEQ ID NO: 257 - DNA, 987 bp, Vitis vinifera
  CDS (1)..(987)
atggccgttgtgcaagaagaaattgaatctaaatatgaccgaattattgagttgaaagcttttgatgactcgaaacttggtgtgaaggggcttgttgatgctgggctggcaaagatcccccggatgtttatccatccacaacataatctctatgagaaatcaggccccattgactctcattctaatattccaatcatagaccttgaaggtgtcaagaatgatgtgactctccatgctaaaatcatcaacgaagttcaaaaagcttgtgaaaactggggcatctttcagatagtcaatcatggaatttcagaagggattttggaggagatgatcgaaggcatacgtagatttcatgagcaagatgctgaagtgaagaaagagtattatactcgtgattttacaaaaaaggcatcatcagcctcctggagggatgcccttttgattaccatcactcctaatccccctgatcccatacaactgcctttagtatgcagagatatagtggtggaatactcgaagcaagtaaagcatttggggtatactctgttagaattgctatctgaggctcttggacttgaaccaaatcattttaaaaacatggaatttgctaagcagggtttcttcttggctcagtactatccttcatgtcctgaacccgaattgacgctgggcaccaaacgccatactgatcctaactttcttactattgttttacaagaccaagtgggtggtctccaaattcttcatgagaatcactggatggatgttcctcccatacctggggccctagtaataaacaccggagatgttctgcagattgtaaccaacggcaggtttaaaagtgtagaacacagagtactggcacagcatgaaggtccaagaatttcagtggcgtccttcttcaactcatgtttcccaccatcctcaaaagtttacacaccgattaaggagttgttgtctgaagagaatcctccaaatgataaataa

SEQ ID NO: 258 - protein, 328 aa, Vitis vinifera
MAVVQEEIESKYDRIIELKAFDDSKLGVKGLVDAGLAKIPRMFIHPQHNLYEKSGPIDSHSNIPIIDLEGVKNDVTLHAKIINEVQKACENWGIFQIVNHGISEGILEEMIEGIRRFHEQDAEVKKEYYTRDFTKKASSASWRDALLITITPNPPDPIQLPLVCRDIVVEYSKQVKHLGYTLLELLSEALGLEPNHFKNMEFAKQGFFLAQYYPSCPEPELTLGTKRHTDPNFLTIVLQDQVGGLQILHENHWMDVPPIPGALVINTGDVLQIVTNGRFKSVEHRVLAQHEGPRISVASFFNSCFPPSSKVYTPIKELLSEENPPNDK

SEQ ID NO: 259 - DNA, 1122 bp, Vitis vinifera
  CDS (1)..(1122)
  misc_feature (84)..(84): y is t or c
  misc_feature (327)..(327): r is g or a
  misc_feature (702)..(702): y is t or c
atggtgagcagtagcagtgacgaaattcaggcaggaaaggcatccgattatgatcgaaaaagtgaattaaaatcctttgatgaytcgaaacttggtgtaaagggactactggatgctgggctcactcagatcccacggatgttcatcaatgaacaacataagactgacatgacttggggttccagggagtcctccccagaaagcgttccaatcctagacttcaaaggcatggataaagatgcagctctacgcactcagatcatcaagaaagtgggagaggcttgcgagaagtggggtttcttccaggttgtcaaccatgggattccrgagagtgttttgaatgatatgattgatggaatccggagatttcatgagcaagatgctgagaccaaaaaggagtattattcccgtgattcccaaaaaaaagttagatttaatagcaattttgatctttatcaagcacgcatggctaattggagggattccttggcttgtgtgatggctcctaatcctcctctccctgagcaactgccggcggtatgcagagatatagtgatggaatattcggaacaagtaatgaaattggggcttactctctttgaattattatccgaagctcttggacttaatccaaaccatttgaaagacatggaatgtgctgagggccttttccttttggggcattactacccagcatgtccygaaccagaactgaccctgggaactagcagccatactgattctgacttcttcaccatactcttacaagaccaaatgggtggtctccaagttcttcatgaagatcaatgggttgatgttccacccatacctggagctctggtaataaacatgggagatcttctacagctggtctccaatgataggtttaaaagcatcttccacagagtcctagccaaaaatgtaggccccagaatttcagtggcaagttttttcagaaaatctcatcgagagaataactcgagactctacggacccattaaggagttgctttcagaagaaaaccccccaatctacagggaaacaaccgtagacgagtttctcacatactacttctcaaaaggactggatgggaactcttcacttccacattttaagctgtga

SEQ ID NO: 260 - protein, 373 aa, Vitis vinifera
MVSSSSDEIQAGKASDYDRKSELKSFDDSKLGVKGLLDAGLTQIPRMFINEQHKTDMTWGSRESSPESVPILDFKGMDKDAALRTQIIKKVGEACEKWGFFQVVNHGIPESVLNDMIDGIRRFHEQDAETKKEYYSRDSQKKVRFNSNFDLYQARMANWRDSLACVMAPNPPLPEQLPAVCRDIVMEYSEQVMKLGLTLFELLSEALGLNPNHLKDMECAEGLFLLGHYYPACPEPELTLGTSSHTDSDFFTILLQDQMGGLQVLHEDQWVDVPPIPGALVINMGDLLQLVSNDRFKSIFHRVLAKNVGPRISVASFFRKSHRENNSRLYGPIKELLSEENPPIYRETTVDEFLTYYFSKGLDGNSSLPHFKL

SEQ ID NO: 261 - DNA, 1059 bp, Vitis vinifera
  CDS (1)..(1059)
atggcgactcaagctgactgcgatcgattaggtgaattaaaggcttttgatgagaccaaagcaggtgtcaaaggactggttgatgccggggtctcccaagttccccggattttcattcaaccccccgatgacttcacaactggtgacaccaaattcaaccttcaagacatgaacacagatccagctcgacggaaggagatcgtggacatggtccgagacgcatcggagacgtggggtttcttcaacgtggtgaaccatggaatctccgtcactgttttggaggagatgaaggatggtgtacgcaggttttatgaacaagatacagaggtcaagaagcagtattactcgcgtgatttggagaggaaggtcgtgtataacagcaattttgatctgtacaaagcaccagcagctaattggagggataccttttattttcttatggctcctcaaccccccgaccctcaagagttgccaccggctttcagggatatattgatagagtacaaggatgaagttatgaaactaggctttaaattgttggagttgatctctgaggctctggggctgaaagcaaaccacctaaaagatatggattgtgcggagggactggccatgctgtgtcactactatcctgcatgccctcagccagaactaaccatgggcaccaccaagcacgctgacaacgactttcttaccgtcctactacaagacgagattggaggcctccaagttcttcatcaggatcagtgggttgatgttcccccaatgcctggagcccttgttattaatattggagaccttttacagcttataacaaatgacaggtttaaaagtgttgaacaccgagtgctggcaagccacaagggcccaagagtttctgtggcatgcttttttagcactgctcttcttccatccttgaaactttacggacctatcaaggaattgttatctgaagagaatccgcccaagtacagggaaattacggtgagagattttgttgcctacttcaatgcaaaaggacttgacgggacttctgccctggagcatttcaaactctag

SEQ ID NO: 262 - protein, 352 aa, Vitis vinifera
MATQADCDRLGELKAFDETKAGVKGLVDAGVSQVPRIFIQPPDDFTTGDTKFNLQDMNTDPARRKEIVDMVRDASETWGFFNVVNHGISVTVLEEMKDGVRRFYEQDTEVKKQYYSRDLERKVVYNSNFDLYKAPAANWRDTFYFLMAPQPPDPQELPPAFRDILIEYKDEVMKLGFKLLELISEALGLKANHLKDMDCAEGLAMLCHYYPACPQPELTMGTTKHADNDFLTVLLQDEIGGLQVLHQDQWVDVPPMPGALVINIGDLLQLITNDRFKSVEHRVLASHKGPRVSVACFFSTALLPSLKLYGPIKELLSEENPPKYREITVRDFVAYFNAKGLDGTSALEHFKL

SEQ ID NO: 263 - DNA, 1080 bp, Vitis vinifera
  CDS (1)..(1080)
atggactctgaatatgaccggaaaagtgagttaattgcttttgatgattcaaaagctggtgtgaaggggcttgtagatgctggggtggcaaagatcccacgtatgttcatccatccacaacataatctccgtgagaagtcagtttccactaatgcccagcttcggattccaatcatagacctagaaggtgtcaacagtgatgcaattctacgtgctaaaatcattgacaaagttcgaaatgcttgtgagatttggggcatttttcagattgtcaatcatggaattctgaaaagtgttttggaggagatgatcaaaggaatacgtagatttaatgagcaagacactgaagtgaagaaagagttttatacccgtgattcctccaaaaaggtgaaatttgtatccaattttgatctatttcaggcaccagcagctacttggaaggattccttttcttgtattattaatcctaatccaccagacccaacagatatgcctgcggtatgcagagatataatcatggaatactcgaagcaagtaaagatgttggctaatactctgtttgaattagttgcagaggctcttggcctcaattcaaaccatttgaaagacatggaatgtgctgagggccttttccttgtgtctcattactacccagcttgcccagaaccagaattgactatgggcaccaaaactcatactgatccaacattcctcactgtacttttacaagaccaagtgggtggtctccaagttctccatgagaaacaatgggtcaatgtgaacccggtgcctggagcactagtgataaacactggagatcttctgcagcttgtatccaacgacatgtttaggagtgcaaaacacagggtattggcaaatcataaaggcccaagagtatcagtggccagctttttttctccatctagtctgccaccctcaaaactctacggaccaatcaaggagttgttatcagaagagaatcctccaaagtacaaggaaaccacagcaagagactatggtacctaccacagagcagaaaggcttggtggaacttctgctctccagcatttcaagctttag

SEQ ID NO: 264 - protein, 359 aa, Vitis vinifera
MDSEYDRKSELIAFDDSKAGVKGLVDAGVAKIPRMFIHPQHNLREKSVSTNAQLRIPIIDLEGVNSDAILRAKIIDKVRNACEIWGIFQIVNHGILKSVLEEMIKGIRRFNEQDTEVKKEFYTRDSSKKVKFVSNFDLFQAPAATWKDSFSCIINPNPPDPTDMPAVCRDIIMEYSKQVKMLANTLFELVAEALGLNSNHLKDMECAEGLFLVSHYYPACPEPELTMGTKTHTDPTFLTVLLQDQVGGLQVLHEKQWVNVNPVPGALVINTGDLLQLVSNDMFRSAKHRVLANHKGPRVSVASFFSPSSLPPSKLYGPIKELLSEENPPKYKETTARDYGTYHRAERLGGTSALQHFKL

SEQ ID NO: 265 - DNA, 1080 bp, Vitis vinifera
  CDS (1)..(1080)
atggactctgaatatgaccggaaaagtgagttaattgctttcgatgattcaaaagctggtgtgaaggggcttgtagatgctggggtggcaaagatcccacgtatgttcatccatccacaacataatctccgtgagaagtcagtttccactaatgcccagcttcggattccaatcatagacctagaaggtgtcaacagtgatgcaattctacgtgctaaaatcattgacaaagttcgaaatgcttgtgagatttggggcatttttcagattgtcaatcatggaattctgaaaagtgttctggaggagatgatcaaaggaatacgtagatttaatgagcaagacactgaagtgaagaaagagttttatacacgtgattcctccaaaaaggtgaaatttgtatccaattctgatctatttcaggcaccagcagctacttggaaggattccttttcttgtattattactcctaatccaccagacccaacagatatgcctgcggtatgcagagatataatcatggaatactcgaagcaagtaaagatgttggctaatactctgtttgaattagttgcagaggctcttggcctcaattctaaccatttgaaagacatggaatgtgctgagggccttttccttgtgtctcattactacccagcttgcccagaaccagaattgactatgggcaccaaaactcatactgatccaacattcctcactgtacttttacaagaccaagtaggtggtctccaagttctccatgagaaacaatgggtcaatgtgaacccagtgcctggagcactagtgataaacactggagatcttctgcagcttgtatccaacgacatgtttaggagtgcaaaacacagggtgttggcaaatcataaaggcccaagagtatcagtgggcagctttttttctccatttagtctgccaccctcaaaactctacggaccaatcaaggagttgttatcagaagagaatcctccaaagtacaaggaaaccacagcaagagactatggtacctgccacagagcagaaaggcatgatggtacttctgctctccatcatttcaagctttag

SEQ ID NO: 266 - protein, 359 aa, Vitis vinifera
MDSEYDRKSELIAFDDSKAGVKGLVDAGVAKIPRMFIHPQHNLREKSVSTNAQLRIPIIDLEGVNSDAILRAKIIDKVRNACEIWGIFQIVNHGILKSVLEEMIKGIRRFNEQDTEVKKEFYTRDSSKKVKFVSNSDLFQAPAATWKDSFSCIITPNPPDPTDMPAVCRDIIMEYSKQVKMLANTLFELVAEALGLNSNHLKDMECAEGLFLVSHYYPACPEPELTMGTKTHTDPTFLTVLLQDQVGGLQVLHEKQWVNVNPVPGALVINTGDLLQLVSNDMFRSAKHRVLANHKGPRVSVGSFFSPFSLPPSKLYGPIKELLSEENPPKYKETTARDYGTCHRAERHDGTSALHHFKL

SEQ ID NO: 267 - DNA, 1080 bp, Vitis vinifera
  CDS (1)..(1080)
atggactctgaatatgaccggaaaagtgagttaattgcttttgatgattcaaaagctggtgtgaaggggcttgtagatgctggggtggcaaagatcccacgtatgttcatccatccacaacataatctccgtgagaagtcagtttccactaatgcccagcttcggattccaatcatagacctagaaggtgtcaacagtgatgcaattctacgtgctaaaatcattgacaaagttcgaaatgcttgtgagatttggggcatttttcagattgtcaatcatggaattctgaaatgtgttttggaggagatgatcaaaggaatacgtagatttaatgagcaagacactgaagtgaagaaagagttttatactcgtgatttctccaaaaaggtgacatttgtatccaattttgatctatttcaggcaccagcagctacttggaaggattccttttcttgtattattgctcctaatccaccagacccaacagatatgcctgcggtatgcagagatataatcatggaatactcgaagcaagtaaagatgttggctaatactctgtttgaattagttgcagaggctcttggcctcaattctaaccatttgaaagacatggaatgtgctgagggccttttccttgtgtctcattactacccagcttgcccagaaccagaattgactatgggcaccaaaactcatactgatccaacattcctcacggtacttttacaagaccaagtgggtggtctccaagttctccatgagaaacaatgggtcaatgtgaacccggtgcctggagcactagtgataaacactggagatcttctgcagcttgtatccaacgacatgtttaggagtgcaaaacacagggtattggcaaatcataaaggcccaagagtatcagtggccagctttttttctccatttagtctgccatcctcaaaactctacggaccaatcaaggagttgttatcagaagataatcctccaaagtacaaggaaaccacagcaagagactatggtacctgccacagagcagaaaggcttgatgggacttctgctctccagcatttcatgctttag

SEQ ID NO: 268 - protein, 359 aa, Vitis vinifera
MDSEYDRKSELIAFDDSKAGVKGLVDAGVAKIPRMFIHPQHNLREKSVSTNAQLRIPIIDLEGVNSDAILRAKIIDKVRNACEIWGIFQIVNHGILKCVLEEMIKGIRRFNEQDTEVKKEFYTRDFSKKVTFVSNFDLFQAPAATWKDSFSCIIAPNPPDPTDMPAVCRDIIMEYSKQVKMLANTLFELVAEALGLNSNHLKDMECAEGLFLVSHYYPACPEPELTMGTKTHTDPTFLTVLLQDQVGGLQVLHEKQWVNVNPVPGALVINTGDLLQLVSNDMFRSAKHRVLANHKGPRVSVASFFSPFSLPSSKLYGPIKELLSEDNPPKYKETTARDYGTCHRAERLDGTSALQHFML

SEQ ID NO: 269 - DNA, 1113 bp, Populus jackii
  CDS (1)..(1113)
atggtggtcactgcagattcaaccaccggagtttctgcaacctacgaccgggaccaagaaatcagatccttcgatgaatcaaaatgcggtgtcaaaggcctcgtcgatgctggcatcaccaagttgccgcgatttttcatccggccaccggaggatattgccgcggattacataaataccggcgaatggatcaatacccagttcaccattcctgtcatagaccttaaaaacatggacagtcgaagagctgaggcggtggccggagtcaagcgggcagcagaggaggtgggtttcttccaggtggtgaaccatggtatggaaaatagggtgttggaggagatgttggaggcggtgcgcgggttccacgagcagccaagggaggtaaaggaggagtactatagcagagagatgacgaggaaggtgacgtatgttagtaattttgatttgtacaaggcaaagtatgctaattggagggatactctgttttgtgttatgggacctgacccacttgatccacaagagttgcctctggtttccagagatataattatggagtactcgaacaaagtttgcaaattagcaacagttttgtttgagttactatctgaggcacttggactcaagtctgaccacctcaaagagatggattgtgtgaaaggacatgctctcctgagtcactattatccagcatgtccggagccagagttggctatgggcaccacgaagcactctgaccctgatttcctcaccatcctacttcaagacgatatcggtggactccaaatttttcatcagaatcattggatagatgttcctcctgttcatggagctctagtagtgaacattggagatcttttacagcttatatctaatgacaagttcaaaagtgtagagcacagggtggtggccaatcatattggccctagagtatccgtggcttcctttttcactccgcatctttatccatcaacaagactgtatggcccaatcaaggaattgctgtcagaagaaaatccccccatttactgtgaaatcactgtgaaagactttatcgcctattatgattcaaaaggattggatgggaattctgcacttccacacttcaagctgtga

SEQ ID NO: 270 - protein, 370 aa, Populus jackii
MVVTADSTTGVSATYDRDQEIRSFDESKCGVKGLVDAGITKLPRFFIRPPEDIAADYINTGEWINTQFTIPVIDLKNMDSRRAEAVAGVKRAAEEVGFFQVVNHGMENRVLEEMLEAVRGFHEQPREVKEEYYSREMTRKVTYVSNFDLYKAKYANWRDTLFCVMGPDPLDPQELPLVSRDIIMEYSNKVCKLATVLFELLSEALGLKSDHLKEMDCVKGHALLSHYYPACPEPELAMGTTKHSDPDFLTILLQDDIGGLQIFHQNHWIDVPPVHGALVVNIGDLLQLISNDKFKSVEHRVVANHIGPRVSVASFFTPHLYPSTRLYGPIKELLSEENPPIYCEITVKDFIAYYDSKGLDGNSALPHFKL

SEQ ID NO: 271 - DNA, 1119 bp, Catharanthus roseus
  CDS (1)..(1119)
atgaaggaattgaacaactcagaagaagaattgaaggcttttgatgatacaaaagctggagtaaaagcacttgtagattctgggattacagaaatccctcgtatatttctcgatcatccaacaaatcttgaccagatttcatccaaggatagagaacccaaattcaagaagaatattccggtcatagatttggatggcattagtactaattcagaaattcgacgtgaaatagtggagaaaattagagaagcaagtgagaaatggggattttttcaaatagtgaatcatgggattccacaagaagttatggatgacatgatagttggaattcgtagatttcatgaacaagataatgaaattaagaaacaattctatactcgtgatcgtaccaaaagctttcgttatacaagcaattttgttctgaatccaaaaattgcttgtaattggagagatacttttgaatgcactatggctcctcatcaacctaatcctcaagatttaccagatatttgcagggatataatgatgaagtacataagttatacaagaaatttggggcttactctgtttgagttgctctcagaagctttagggcttaaatcaaatcgtttgaaagacatgcattgtgatgaaggagttgagctcgttggacattactaccctgcatgtcctcaaccggaattaactttaggtacaagcaaacacacagacactggtttcttaaccatgcttcagcaagatcaaattggtggccttcaagttctttatgagaatcatcaatgggttgatgtgcccttcattcctggtgctctaatcatcaatattggagattttctacagataatcagcaacgataagttcaagagtgccccacacagagtgctggcaaacaaaaatggcccaagaatttcgactgctagtgttttcatgccaaattttttagagagtgccgaagtaaggttgtatgggccaattaaggagttattatcagaagaaaatcctccaatctacgagcagattacggctaaagattatgtaacagtgcaattctccagaggtcttgatggtgatagtttcttatctcctttcatgttaaataaggacaacatggagaaatag

SEQ ID NO: 272 - protein, 372 aa, Catharanthus roseus
MKELNNSEEELKAFDDTKAGVKALVDSGITEIPRIFLDHPTNLDQISSKDREPKFKKNIPVIDLDGISTNSEIRREIVEKIREASEKWGFFQIVNHGIPQEVMDDMIVGIRRFHEQDNEIKKQFYTRDRTKSFRYTSNFVLNPKIACNWRDTFECTMAPHQPNPQDLPDICRDIMMKYISYTRNLGLTLFELLSEALGLKSNRLKDMHCDEGVELVGHYYPACPQPELTLGTSKHTDTGFLTMLQQDQIGGLQVLYENHQWVDVPFIPGALIINIGDFLQIISNDKFKSAPHRVLANKNGPRISTASVFMPNFLESAEVRLYGPIKELLSEENPPIYEQITAKDYVTVQFSRGLDGDSFLSPFMLNKDNMEK

SEQ ID NO: 273 - DNA, 1074 bp, Oryza sativa subsp. indica
  CDS (1)..(1074)
atggccaccgtctccggcaccgaccgcctccgtgacctccacgccttcgacgacaccaaggccggcgtcaagggcctcgtcgacgccggcgtcaccaccgccgacgtcgacctcgccaaggccgacgtcgaccggggacgggtggtcgccgaggtcagggcggccgcggagacggtcggcttcttccaggtggtcaaccatggcgtcgccggggagctgatggaggagatgctcgcggcggtgcggcgcttccacgaggagcccctggaggcgaaggtgccctactacaccagggacgtcgccagcaaggtccggttcaactccaacttcggcctcttccgtaacgggttccgttcgccggcggccaactggcgcgacacgatgttcgttgagatgttcccggaggcgccctcgccggaagagatcccgccgccgtgcaggggcgtgctggaggtgtacgccgcggcggtgcggcggctcggggaacggctgttcgagctgctatcggaggcgctgggcctccccgtggggtaccttggccgcgacgccgggtgcatggacgggctgagcctgagcgtggcggcgcactactacccggcgtgcccggagccggaggcgacgatgggcgcgaccaagcactccgaccccagcttcctcacagtgctgctgcaggacacctccggcggcctgcaggcggtgctcccgcggcctccggaggagcggtgggtggacgtgcccccggtggccggcgcgctgttggtgaacgtcggcgacctcctccagctggtgtcgaacgacaggctccggagcgtggagcaccgggtgctgcccaccggcgccgcggggccggcccgcgtgtcggtggcgtgcttcttccgccacgcgtacgcgtcgacgaggtcgtgtgtcccggtcgtcgtcggcggcggcggggcacgggcggcggcggtgtacaggagcacgacggcgggggagttcctggcgcactacaacggcaaggggctcgacgggcggtcggcgctggaccacttcaggcttccggcggcggcgtcgtctcctcctcctccgctgtag

SEQ ID NO: 274 - protein, 357 aa, Oryza sativa subsp. indica
MATVSGTDRLRDLHAFDDTKAGVKGLVDAGVTTADVDLAKADVDRGRVVAEVRAAAETVGFFQVVNHGVAGELMEEMLAAVRRFHEEPLEAKVPYYTRDVASKVRFNSNFGLFRNGFRSPAANWRDTMFVEMFPEAPSPEEIPPPCRGVLEVYAAAVRRLGERLFELLSEALGLPVGYLGRDAGCMDGLSLSVAAHYYPACPEPEATMGATKHSDPSFLTVLLQDTSGGLQAVLPRPPEERWVDVPPVAGALLVNVGDLLQLVSNDRLRSVEHRVLPTGAAGPARVSVACFFRHAYASTRSCVPVVVGGGGARAAAVYRSTTAGEFLAHYNGKGLDGRSALDHFRLPAAASSPPPPL

SEQ ID NO: 275 - DNA, 1086 bp, Ricinus communis
  CDS (1)..(1086)
atgatgagtacagatgaatacgatcgattcgaggaagccaaaaaatttgatgattctaaaatcggcgttaaaggccttgttgatgcaggcctcacttccattcctcgaatctttatccacccagccgatactctatccgatatcaaacctgtaaatagacaaccagaagcaggtaccaccattccgaccattgacatatcgggcgtagactctgatcggaggtcggtgattgttgaggagatatcacgtgcatgtagagagctagggttttttcagatagtgaatcatggtgtgcatgtggaagttatggatgaggttatcagtggagtaaagggtttccatgagctgcctactgaggttaagcaacggtggtatcaacgggagacggtgactggtgttaattttttttctaatgtcgatttgttcaaggctagagctgctagttggagggatacgcttcagatcaggctgggtccaaacttaccagaggttgaagaaattccggagatatgtaggaatgaggtcatagaatggagtcaactggctgtgcaggtggcagagcttttaatggagttattgtgcgaggggctgggattgaaatcagaaactttaaaggagatgacatgtttggaagccagagtaatggtgggccactactatccacactgtccgcagcctgatctgacggttgggattacatcacatacggatcctggggttttgactctgttgcttcaggactctgttggaggtttgcaggttaagcatggtgatgaatgggtggatgttaaacctgttcctggagctcttgttatcaacattggagatatacttcagatcatgtccaatgatgaatacagaagcgtggaacacagagtgttggctaatccttcccgtgacccgcgagtttccattgctattttcttcaaccctggtaagagagactgcgcttatggtccctttccggatctaatatcagcagaaaagccagctgtttacaaacaattcatgctcatggatttcttgaaaaggttcttctccaaggaattggatggaaaaactttgacaaattactataagctgtga

SEQ ID NO: 276 - protein, 361 aa, Ricinus communis
MMSTDEYDRFEEAKKFDDSKIGVKGLVDAGLTSIPRIFIHPADTLSDIKPVNRQPEAGTTIPTIDISGVDSDRRSVIVEEISRACRELGFFQIVNHGVHVEVMDEVISGVKGFHELPTEVKQRWYQRETVTGVNFFSNVDLFKARAASWRDTLQIRLGPNLPEVEEIPEICRNEVIEWSQLAVQVAELLMELLCEGLGLKSETLKEMTCLEARVMVGHYYPHCPQPDLTVGITSHTDPGVLTLLLQDSVGGLQVKHGDEWVDVKPVPGALVINIGDILQIMSNDEYRSVEHRVLANPSRDPRVSIAIFFNPGKRDCAYGPFPDLISAEKPAVYKQFMLMDFLKRFFSKELDGKTLTNYYKL

SEQ ID NO: 277 - DNA, 1095 bp, Ricinus communis
  CDS (1)..(1095)
atggctacaagttatgacaggcaaagtgaactaaaggcttttgatgacactaaagctggtgttaagggtcttgtagatggcggtctcacaaaaattccaaggatatttattcatgatcaatctaagatcaataataaatcaagttcaggtgacagcatacatagcataccgatcatagacttcaatggcatagatagtgattcaagtgtacgtattgatataattaataaagttcgagatgcctgcaagaaatggggttttttccaggtgatcaaccatggaattccagcagctattttggatgatataatagacggggtacggaaatttcacgagcaagacaccgaggtaaagaagagattctacagccgtgagcaagctgggattgcaaaatttaagttcaatacgaacttcgatttttatcaatcaccagccgctaattggagagattctatgtattgcattatggctcctgatccacccagttctgaagaattgcctgatgtttgcagagatatcctgatcgattactcaaacaaggtggctgccttatcaaatatactatttgaattgctatctgaagcactagggctaaatgccaactaccttaaggatataggttgttccgaggggcttttatttctgggtcattactacccagtttgccctgaaccagaattgactatgggcactagcagccattccgataatagctttttgacggtacttctacaagaccaaagtggtggcctccaggtcctttcctgtaagaatcaatgggtcgatgttaatccaactccaggagctcttgtgataaaccttggggatatgttacagttaatctctaatgataaatttaaaagctcggaacacagagtattagcgaaaagtgtaggtccaagaatttcagtggcatgttttaacatacagcttacacattcaaagaacgcctcgagattatacgggccaatcaaggagttgctatcagaagaaacccccccagtttaccttgaaaccaccatcaaggagtatttgacatactactattctaaaggacttaatggcatttctgcattagagcatttcaagttgtga

SEQ ID NO: 278 - protein, 364 aa, Ricinus communis
MATSYDRQSELKAFDDTKAGVKGLVDGGLTKIPRIFIHDQSKINNKSSSGDSIHSIPIIDFNGIDSDSSVRIDIINKVRDACKKWGFFQVINHGIPAAILDDIIDGVRKFHEQDTEVKKRFYSREQAGIAKFKFNTNFDFYQSPAANWRDSMYCIMAPDPPSSEELPDVCRDILIDYSNKVAALSNILFELLSEALGLNANYLKDIGCSEGLLFLGHYYPVCPEPELTMGTSSHSDNSFLTVLLQDQSGGLQVLSCKNQWVDVNPTPGALVINLGDMLQLISNDKFKSSEHRVLAKSVGPRISVACFNIQLTHSKNASRLYGPIKELLSEETPPVYLETTIKEYLTYYYSKGLNGISALEHFKL

SEQ ID NO: 279 - DNA, 1080 bp, Ricinus communis
  CDS (1)..(1080)
atgaaaccagattggagcccaacaagtgaacgaaaggcttttgatgacacaaaagccggtgttaaaggacttgttgatgctggaatcaacaagatccctcacttctttcatcaaccagtagatgtttccgacaagagttcacttggtgttgattccaggttcagattccccgtcatcaaccttgaagctattcataaagattcaattcgacgcaaggaagttgttgacaaagtccagattgcctcagagacttggggattttttgaagtggtcaatcatggcgttcctgtaaatgttctggaggagatgaaggatggaattcgtagattttatgagcaggatattgagctgaaaaaggaattctattctcgtgattatacaaaaaagattgtgtacaatagcaattttgatttgtttactgcacaagctgctaactggagagataccattttcttcctcatggctcctgatcctccaaaatcagaagagctgccagcagtatgcaggaatatattgaaggaatactgcaaggaagtaacaagcttggggaacttactgctcgaattattatcagaagcacttggtctgagcccaagtcacttgaaagaaatggattgtgctgaaggacttgctgttctatgtcattactatccagcatgcccccagccagaattaacattggccacaagcaagcatactgataatgactttctcactgtgcttctacaagatcatatcggtggcctccaagttcagcatcagaatcaatggattgatgttcctccaacaccaggcgctctagttgttaacattggagaccttctacagctcatatcgaatgacaagttcataagcgtcgagcatagggtgctggcaaaccatattggaccaagaatatctgcggcgtgcttctttagcacttctgtaatgccaaaatcacgactttatggacctattcaggagctgctgtcagaagagaatcctccaaagtacagagaaaccacagtaacagaatacgtactctactctaatggaaaaggtcttgatggtacttctcctctgctgcattttaagctttga

SEQ ID NO: 280 - protein, 359 aa, Ricinus communis
MKPDWSPTSERKAFDDTKAGVKGLVDAGINKIPHFFHQPVDVSDKSSLGVDSRFRFPVINLEAIHKDSIRRKEVVDKVQIASETWGFFEVVNHGVPVNVLEEMKDGIRRFYEQDIELKKEFYSRDYTKKIVYNSNFDLFTAQAANWRDTIFFLMAPDPPKSEELPAVCRNILKEYCKEVTSLGNLLLELLSEALGLSPSHLKEMDCAEGLAVLCHYYPACPQPELTLATSKHTDNDFLTVLLQDHIGGLQVQHQNQWIDVPPTPGALVVNIGDLLQLISNDKFISVEHRVLANHIGPRISAACFFSTSVMPKSRLYGPIQELLSEENPPKYRETTVTEYVLYSNGKGLDGTSPLLHFKL

SEQ ID NO: 281 - DNA, 1092 bp, Ricinus communis
  CDS (1)..(1092)
atgaactccacattcaaccctgaatattgccgatcaagtgagttaaaagcttttgatgacacaaaagctggtgttaaaggacttgttgatgctggaattaccaaaatccctcgcattttttatcaatcacctgattctttagagaaaaattcacctactcccgataccaagttcagatttcctgtcatagaccttaaagatgtagaagatggtgcagtttcgcgcaaggagattgttgacggagtacgaaatgcatcagagacttggggattttttcaagttgtcaatcatgggattcctgcgagtgtccttgaggagatgaaggatgggctgcttaaattttttgagcaagatactgagctgaaaaagggattttactctcgtgatttaactaaaaaggtgggttacaacagcaatttcgatttgtatagtgcaccagcagctaattggagagatacaattgctttccaaatggtccctgatcctccaaaacctgaagagatgccagctgcattcagacatatattagtcgagtacagcaaagaagtcaggaaactgggaagcgtactatttgatttattatcagaagctcttggtctgaaaccaaaccacttgaaagacatggattgtgataagggactttttattttgggtcattactatccagcatgccccgagccagaattaaccttaggcacaagcaagcatgctgataatgacttcctcactgtgcttctccaagacgatatcggtggtctccaagttctgcatcagaatcagtggactgatgttcctcccacgcctggcgctctagtggttaacattggggatcttctacagcttatatcaaatgacaaatttataagtgctgagcatagagttctggcaaactataaaggaccaagagtatctgtggcatgcttttttagcacagctttatttcctgtatcaagactttatggaccaatcaaggagttgttatcagaggagaatcctcccaagtacagagaaactacagtgaaagaatttgtttcccacttcaatgcaaaaggccttgatggaacttctgctctgctgcatttcaagctgtga

SEQ ID NO: 282 - protein, 363 aa, Ricinus communis
MNSTFNPEYCRSSELKAFDDTKAGVKGLVDAGITKIPRIFYQSPDSLEKNSPTPDTKFRFPVIDLKDVEDGAVSRKEIVDGVRNASETWGFFQVVNHGIPASVLEEMKDGLLKFFEQDTELKKGFYSRDLTKKVGYNSNFDLYSAPAANWRDTIAFQMVPDPPKPEEMPAAFRHILVEYSKEVRKLGSVLFDLLSEALGLKPNHLKDMDCDKGLFILGHYYPACPEPELTLGTSKHADNDFLTVLLQDDIGGLQVLHQNQWTDVPPTPGALVVNIGDLLQLISNDKFISAEHRVLANYKGPRVSVACFFSTALFPVSRLYGPIKELLSEENPPKYRETTVKEFVSHFNAKGLDGTSALLHFKL

SEQ ID NO: 283 - DNA, 1092 bp, Ricinus communis
  CDS (1)..(1092)
atgaactcccccgttgattctgaatattgccgaactagtgaattaaaagcttttgacgacacaaaagctggcgttaaaggacttgttgatgctggaattattgaagtccctcgaattttccatctatcatctgatcaccttgacaatatttctcatactgtcgaccccatgttcaactttcctcgcatagaccttgaaggcgttaataaagactcaattttgcgcaaggagattgttgacaaagtacgacatgcttcagagacttggggatttttcgaagtggtcaatcatgggattcctgtaagtgttcttgaggagatgaaggagggagtaaaaaggtttcatgagcaagatgtagagcttaaaaaagaattttactctcgtgactatacaaaaaaggttctatacaatagcaactttgatttgtatagttcaccatttgctaactggagggattctattttctttcaaatgattcctgaccctcccaagccagaagaattgccagctgcctgcagagatatactgatggagtactccaaagaagtaaggaaattaggagatttattgctggaattattttcagaggcgctcggtctgagcccaaaccacttgaaagacatggaatgcaatgaaggacttctgattgtaggcaactattatccagcatgtcgccagccagaaataaccttaggtgcaagcgggcatgcggacagtgacttctttacagtgcttctgcaagatcatattggtggactccaggttctgcatcagaatgaatggattaatgtgccttctacaccagatgctctggtcgttaacattggtgatcttatacagctcataacaaacgacaagtttataagcgtggagcatagagtgctggcgaactgtgtaggaccaagaatatcggtagcaagctttttcactacaacccttatatcaacatcaagactgtatggtcctattaaggagttgttgtcagaagagaatcccccaaagtatagagaaacaacagtaagagagtactctgatcactacaagggaaaaggcctggatgggacttctgcacttctgcatttcaagctttga

SEQ ID NO: 284 - protein, 363 aa, Ricinus communis
MNSPVDSEYCRTSELKAFDDTKAGVKGLVDAGIIEVPRIFHLSSDHLDNISHTVDPMFNFPRIDLEGVNKDSILRKEIVDKVRHASETWGFFEVVNHGIPVSVLEEMKEGVKRFHEQDVELKKEFYSRDYTKKVLYNSNFDLYSSPFANWRDSIFFQMIPDPPKPEELPAACRDILMEYSKEVRKLGDLLLELFSEALGLSPNHLKDMECNEGLLIVGNYYPACRQPEITLGASGHADSDFFTVLLQDHIGGLQVLHQNEWINVPSTPDALVVNIGDLIQLITNDKFISVEHRVLANCVGPRISVASFFTTTLISTSRLYGPIKELLSEENPPKYRETTVREYSDHYKGKGLDGTSALLHFKL

SEQ ID NO: 285 - DNA, 1134 bp, Ricinus communis
  CDS (1)..(1134)
atggaactgagcagcagaaatgcagcttcaggaacaatcaaccatgaatatgatcgaaatagtgaattaaaagctttcgacgaaacaaagcttggtgttaaaggcctaattgatgcaggagttactaaggttcctcgcatattccataagccacatgattatcctgatgacatttcatctgcagcagaagatgctcagtttagaattcctatcatagaccttgaagctgtggaaatggattcaactacacatgaaaaggctgtcgaagaaatcagaaatgcggcagaaacatggggcttctttcagataatcaatcatgggattgatttaagcattatggaggaaatgataaatggggtacgcagattttttgagcaagatagtgaagtcaagaaaaaattctattcacgtgaagccggaaaaagtttcatgtatgttagcaacttcgatctgtacttttctaagttcgctagttggagggacaccttttcgtgcaatatcgcacctaatactgttaaacctgaagaactacctgaagtatgcagagatataacattggagtactcgaagaaggtgaggagggtggggatttttctttttgaactgttgtcggaggctttagggctaaaaccaaatcgcctcagggagatggagtgtacagaaggacttgttgttttatgccattattatccaccttgtcctgagcctgaactaactacggggacggttggccataccgatccgggcttccttacagttctgctccaagaccagattggaggcctacaagttctgcatcagaataagtgggttgatattcctccagtgcctggagcccttgttgtcaatctcgcagacatgctacaggcaattattcccaattttcagctcatatccaacgacaagttcaaaagctctatgcacagagtactgtcaaaccgaataggtccaagaatatcagtggcaagctttttcagcaccggttttcagaaatcatcaaagctattcggaccgattaaggagctgctatcagaagacaatcctccaatctacagagaaactgcagtctatgacttcgctacatctctcaaggatggcaaaggaggattgcagaattttaagctacaaacatag

SEQ ID NO: 286 - protein, 377 aa, Ricinus communis
MELSSRNAASGTINHEYDRNSELKAFDETKLGVKGLIDAGVTKVPRIFHKPHDYPDDISSAAEDAQFRIPIIDLEAVEMDSTTHEKAVEEIRNAAETWGFFQIINHGIDLSIMEEMINGVRRFFEQDSEVKKKFYSREAGKSFMYVSNFDLYFSKFASWRDTFSCNIAPNTVKPEELPEVCRDITLEYSKKVRRVGIFLFELLSEALGLKPNRLREMECTEGLVVLCHYYPPCPEPELTTGTVGHTDPGFLTVLLQDQIGGLQVLHQNKWVDIPPVPGALVVNLADMLQAIIPNFQLISNDKFKSSMHRVLSNRIGPRISVASFFSTGFQKSSKLFGPIKELLSEDNPPIYRETAVYDFATSLKDGKGGLQNFKLQT

SEQ ID NO: 287 - DNA, 1110 bp, Ricinus communis
  CDS (1)..(1110)
atggccgatgcaacttcaagtactttgggatatgatcgaatggaagaagtgaagaaattcgacgaatcaaagatgggtgtgaagggtctctctgattctggcattacttccattccgaagttcttcattcattccccacaatccttagctgatctcaagccaaaagcatctcaaacatctattaccattcccattatcgacctatccaatatcaattccaacgatcaccgtgcccaaatcattatccaaatcaaggaagctgctagcagctggggtttctttcaagtgatcaaccatggtgttcctcaatcagttcttgactcaacgttgagagctatcaaatcctttcatgaactaccccgtgaggtaaaatccaagtactataaacgcgaagaaggaaaaggtgttatgtacgctagcaataatgatttgtaccgtgcagaagctgcttgctggcacgactcattgcaggtgtggatggggcctgtgccggccaatgttgaggagataccggagatatgtcgagaagaggtggtggaatgggatgcgagtgctaaaggggtggctgaggctgtgatggagctgttgagtgaaggattagggttacaggcagggaagtttaaggagttgacattcagtgaaattagagctttggtggggcattgctatccttactgtccgcaaccggacctcacgttggggattatgccacatacagatcctggcgtcatgacggtgctgctacaggatgagatcggagggttgcaggtgaaacacggtgatgattgggtggatataaagcctgttaatggtggattgattataaatgtcggcgactttcttcagatagtgtcaaatggggagtacaaaagtgtcgagcacagagtgttggctaactcaagcaaggagccaagaatttcagtagttgaatttttcaacctaagcaagtggaaaggatctgatgattatcatgggcctttgccggagctgttatccccggagaaacctgctatttatcggaatttcacaaagcaagagtttcatgaaaacttttatagcaagggtctggatagcaagtctttggtggagaaattaaaaatagaaaattaa

SEQ ID NO: 288 - protein, 369 aa, Ricinus communis
MADATSSTLGYDRMEEVKKFDESKMGVKGLSDSGITSIPKFFIHSPQSLADLKPKASQTSITIPIIDLSNINSNDHRAQIIIQIKEAASSWGFFQVINHGVPQSVLDSTLRAIKSFHELPREVKSKYYKREEGKGVMYASNNDLYRAEAACWHDSLQVWMGPVPANVEEIPEICREEVVEWDASAKGVAEAVMELLSEGLGLQAGKFKELTFSEIRALVGHCYPYCPQPDLTLGIMPHTDPGVMTVLLQDEIGGLQVKHGDDWVDIKPVNGGLIINVGDFLQIVSNGEYKSVEHRVLANSSKEPRISVVEFFNLSKWKGSDDYHGPLPELLSPEKPAIYRNFTKQEFHENFYSKGLDSKSLVEKLKIEN

SEQ ID NO: 289 - DNA, 1119 bp, Ricinus communis
  CDS (1)..(1119)
atggacgtgatcatttcttctgctgcagatttttcagctgttgatgaagatggttccatctacgacaaagctgaagaagtgaaagcttttgatgaaactaaagctggtgttaaaggactagttgattctgatgtgacaaagatacctaggttttttgtccatccaccacagaatgtgaaaaatccgtcatcgaagatcactgatgtcagcctgctgcaggttccagtgattgacttgggaggcattggaagtcatcgaaggcggcttcaggtagtgaatgagatcaggaatgcatcagaaacatggggtttctttcaaatggttaatcatggagtccctgtcagtgttcttgatgaaatgttggctggtgttaaacgattccatgagcaacctcaggaggtgaagatggagtggtattctcgcgactctaagcgcagagtgaagtacttctgcaatggtgatctccttgtcaatagagcaccagcaaattggagggataccatagcatttgattttcaggacgggaaactagacccggagctctatcctcaggtatgcagggaagctgtaagtgaatacatgagaaacatgatcaagacgagcaagatactatctgaactgatatcggaggcactagggcttccaagtgaatacctgtcaggattggaatgcatggaaactgagtcattagtgtgccattattacccaatttgtccggagccagactcgacactaggcaccaccaagcacacagacccttcatttctgacaatattgttgcaagataatgtgggtggactgcaagttctcaaccaaaatcaatggatcgatgtgcctcctcggcatggagctcttgtagtaaacataggagacttcatgcagctcatcaccaacgacaagttcagaagtgtggagcacagagtgttagttggaagggtaggagcaagggcatcagtagcatgctttttctatccaagtacagctaataaatttaaaccttatggagcagtaaaggaacttctatctggcaatccacccatttatagagaaactcacatcagtgaatacatggcccatttcaggtccaaaggattagatggtcctctcatggcaatgtag

SEQ ID NO: 290 - protein, 372 aa, Ricinus communis
MDVIISSAADFSAVDEDGSIYDKAEEVKAFDETKAGVKGLVDSDVTKIPRFFVHPPQNVKNPSSKITDVSLLQVPVIDLGGIGSHRRRLQVVNEIRNASETWGFFQMVNHGVPVSVLDEMLAGVKRFHEQPQEVKMEWYSRDSKRRVKYFCNGDLLVNRAPANWRDTIAFDFQDGKLDPELYPQVCREAVSEYMRNMIKTSKILSELISEALGLPSEYLSGLECMETESLVCHYYPICPEPDSTLGTTKHTDPSFLTILLQDNVGGLQVLNQNQWIDVPPRHGALVVNIGDFMQLITNDKFRSVEHRVLVGRVGARASVACFFYPSTANKFKPYGAVKELLSGNPPIYRETHISEYMAHFRSKGLDGPLMAM

SEQ ID NO: 291 - DNA, 1152 bp, Zea mays
  CDS (1)..(1152)
atgtcccccacggaagaagccgctggtggtggtggcgacgactatgaccgcttgagcgagctgaaggcgttcgacgacagcaaggccggcgtcaagggcctcgtggacgctggcgtcacgaccatccctgccatcttccgcggccatctccttcaggaagggccgaaggtatcgtcctctagcagtagcagcagtactagtcttagcattatcccggtcatcgacctctcggcggcggacgcagtcgcacgggaggaggtggtcgcccagttgaaggctgcagccgagacggtggggttcttccagctggtgaaccacggcgttcccagcgagctcctgtgcgagatgctgccgtcggtgaggcggttcaacgaggagccccacgaggtgaagcggccctactacacgcgggacgcacgtcgcaaggtgcggttcaactccaacttcgatctgttccagtcgccggcggccaactggcgcgacacgctcttctgcgaggcagcgccggagccgccgcgggcggaggagctgccggtcgccgtcaggcacgtgatgctggagtacggcggcgcggtgcgggaggtggcggcgcgcgtgctggggctgctctcggaggccctggggctgagccccgggcacctcgcagggatggggtgcgcggagggcctcagcctggtgtgcaactactacccgccgtgcccggaaccggacctcaccctgggctgcagcaggcactcggaccccagcttcctgaccgtgctgctgcaggactcgcatgcgcagggcggcctgcaggcgctcctcgcatccaggtggctggacgtgcctccggtggccggcgcgctcctggtgaacgtcggagaccttctccagctggtcagcaacgggcggttcaagagcgtggagcaccgggtggtggctaaccggagcagggacacggcgagagtgtcagtggcgtgcttctgcaacgcggacatcgcgagatccacgaggctgtatggacccatcgcggagctcatcgccgcggacgacagcgacggcgcgggaagggcgctgtacaggaacgtgacggtcccggagttcctagcgcactacgacaagaaaggcctcgacggtcgcccggcgctccaccgcttccagctgcttcaataa

SEQ ID NO: 292 - protein, 383 aa, Zea mays
MSPTEEAAGGGGDDYDRLSELKAFDDSKAGVKGLVDAGVTTIPAIFRGHLLQEGPKVSSSSSSSSTSLSIIPVIDLSAADAVAREEVVAQLKAAAETVGFFQLVNHGVPSELLCEMLPSVRRFNEEPHEVKRPYYTRDARRKVRFNSNFDLFQSPAANWRDTLFCEAAPEPPRAEELPVAVRHVMLEYGGAVREVAARVLGLLSEALGLSPGHLAGMGCAEGLSLVCNYYPPCPEPDLTLGCSRHSDPSFLTVLLQDSHAQGGLQALLASRWLDVPPVAGALLVNVGDLLQLVSNGRFKSVEHRVVANRSRDTARVSVACFCNADIARSTRLYGPIAELIAADDSDGAGRALYRNVTVPEFLAHYDKKGLDGRPALHRFQLLQ

SEQ ID NO: 293 - DNA, 1095 bp, Solanum lycopersicum
  CDS (1)..(1095)
atgatatttcaggccacaattcagaatagttatgacaaaatgagtgacctaatagcctttgatgatactaaggctggtgtcaaagggcttgttgattccggaatcaataaagtacctcaagtattcattctaccgccaaaatacagggtaaaaacatgtgaaacacacatcagttttccagtgatagacctcaaaggcattgatgaggatccgataaagtataaggagattgtggacaaagttcgagatgcatcggagacatggggtttctttcaagtggttaatcatggaattccaacatccatcttggaaaaaacgttactaggaacacgacagtttttcgagcaagataccgagatcaagaaacaatattacactcgagatattggggaaaaggtgatttatactagcaatcttgatttgtatagcccttctgttccagctgcaagttggagagactcaattttctttttcatggctccgaatcctcctagtccacaagaatttccaacagcttgcggggaaattctaatggactactccaagtatgtgacggaattggggttctccttgcttgaattattgtctgaaggtctcggtctcgatcgtagttatctgaaagattatatggattattgccatcaaagttgcttgtgccattactatccatcatgccctcagccagaactcaccatgggcatcagtcaacattccgacactgagtttatcacggtgcttctacaagatgatatcggtggactccaagttcttcaccaaaatcaatggtttgatgttcctcctatacgtggtgctcttgtcgtcaatattggagattttctgcagctcatgtcaaatgacaagtacatgagtgttgagcacagagcaattgcaaagaaagatggatcaagaatgtcagttgcctgcttctttggtgaaaatccattgcaatcttcaaagctgtatgaaccaatcactgaattgttatcagaagataatcctccaaaatatcacgcaaccacagtgattgactacaaaaattatgtccttaataaaggcctagatggaacttctgcgctgttgagttacaagatctaa

SEQ ID NO: 294 - protein, 364 aa, Solanum lycopersicum
MIFQATIQNSYDKMSDLIAFDDTKAGVKGLVDSGINKVPQVFILPPKYRVKTCETHISFPVIDLKGIDEDPIKYKEIVDKVRDASETWGFFQVVNHGIPTSILEKTLLGTRQFFEQDTEIKKQYYTRDIGEKVIYTSNLDLYSPSVPAASWRDSIFFFMAPNPPSPQEFPTACGEILMDYSKYVTELGFSLLELLSEGLGLDRSYLKDYMDYCHQSCLCHYYPSCPQPELTMGISQHSDTEFITVLLQDDIGGLQVLHQNQWFDVPPIRGALVVNIGDFLQLMSNDKYMSVEHRAIAKKDGSRMSVACFFGENPLQSSKLYEPITELLSEDNPPKYHATTVIDYKNYVLNKGLDGTSALLSYKI

SEQ ID NO: 295 - DNA, 1128 bp, Oryza sativa
  CDS (1)..(1128)
atgccggcctccgaccccgccctcgccgccgccgccgccgcctacgaccgcaccgccgagctccgcgcgctcgacgccaccctctccggcgtccgcggcctcgtcgcgtcgggcgccacccacctcccccgcatcttccacaacgtcgtccatggtgatcaagaaccaccggaggcgacggcgccatcgtccgcggccacgaccacgacgaccgtcccggtgatcgacatcagcgggagccgcgcggccgtggtcgacgccgtccggcgggcggcggcggagtgggggttcttccaggtgacggggcacggggttcccctcgccgcgatggacgccgcggcgggcgcggcgcgcgcgttccacgagtccggcggcggcgagggcagcgacaaggcgcggctctactcgcgcgagcccgggagagccgtcaagtaccactgcaacttcgacctgtaccagtcgccggtggccaactggcgcgacacgctctacctccgcatggcgcccgacccgccgcccgccgccgacttgccggagatctgccgggatgcactgtttgaatatgccaaacaagtaaagaatttggggaacacactgttcgagctgctctcggagggccttgggctcaaaccgagctacctgacagacatagaatgcaaccaggggcaaatcatactatgccactactaccctccctgcccccagcctgagctcgccatcgggacaagccggcattcggactccggcttcctcaccatacttctccaggatgacattgggggcctccagatcctccatgaggaccgatgggtcgatgtcacgccaactcctggagcgttcatcgtcaatgttgccgatctcctgcagttgatctccaatgacaattacaagagtgtggagcatagagtggtggcgaagaacactgaaccgagagtctcgattgcctgtttcttcagcacccattttcatccgatttccacgaggatgtatggcccgatcaaggagctgttgtctgatgagaacccgcctttgtacagggaggcactcgtcagagattacaccgcgcgttactactccgttgggctagatggcaagttcaagactactctttctgaattccggttatag

SEQ ID NO: 296 - protein, 375 aa, Oryza sativa
MPASDPALAAAAAAYDRTAELRALDATLSGVRGLVASGATHLPRIFHNVVHGDQEPPEATAPSSAATTTTTVPVIDISGSRAAVVDAVRRAAAEWGFFQVTGHGVPLAAMDAAAGAARAFHESGGGEGSDKARLYSREPGRAVKYHCNFDLYQSPVANWRDTLYLRMAPDPPPAADLPEICRDALFEYAKQVKNLGNTLFELLSEGLGLKPSYLTDIECNQGQIILCHYYPPCPQPELAIGTSRHSDSGFLTILLQDDIGGLQILHEDRWVDVTPTPGAFIVNVADLLQLISNDNYKSVEHRVVAKNTEPRVSIACFFSTHFHPISTRMYGPIKELLSDENPPLYREALVRDYTARYYSVGLDGKFKTTLSEFRL

SEQ ID NO: 297 - DNA, 1086 bp, Arabidopsis thaliana
  CDS (1)..(1086)
atggagtcaagtgatcgttcaagtcaagcaaaagctttcgacgagacaaaaaccggcgtgaaagggcttgtggcttcgggaatcaaagagattccagccatgttccatacacctccggatactctaacaagcctgaaacaaacagcaccaccttcgcagcagctgacgatccccacggtggatctgaaaggaggaagcatggatttgatatcgcggcggagcgtggtggagaagattggagacgctgcggagagatggggattcttccaggtggtgaatcatgggatctcggtggaggtgatggagaggatgaaagaagggattcgcaggtttcacgagcaggacccggaagtgaagaaacggttctactctagggatcacactagagatgtgctttactacagcaacatcgatctccacacttgtaataaggctgcaaattggagagatacgctcgcctgttacatggcccccgatcctcccaagttacaggacttgcccgcggtttgcggggagattatgatggagtactcaaagcaactaatgactttaggtgaatttctctttgagcttctatctgaggctttgggattaaaccctaatcacctcaaggacatgggctgtgccaagtctcatatcatgtttggccaatactatccaccttgccctcagcctgaccttactttaggcataagcaagcacaccgatttctcgtttatcaccattcttcttcaggacaatatcggagggcttcaagttatccatgaccaatgctgggttgatgtttctcctgtccctggcgcccttgtcattaacatcggagatcttctccagcttataagcaatgacaaattcattagcgcggagcatagggtgatagcaaatggatcttctgaaccgcggatttcaatgccatgtttcgtcagcacgttcatgaagccgaatccacgaatatatggacccatcaaagaacttttgtcagaacaaaaccctgccaagtatagagacttaaccatcaccgagttttcaaacaccttcaggtcccaaacgatcagtcaccctgcgttacaccatttcaggatctga

SEQ ID NO: 298 - protein, 361 aa, Arabidopsis thaliana
MESSDRSSQAKAFDETKTGVKGLVASGIKEIPAMFHTPPDTLTSLKQTAPPSQQLTIPTVDLKGGSMDLISRRSVVEKIGDAAERWGFFQVVNHGISVEVMERMKEGIRRFHEQDPEVKKRFYSRDHTRDVLYYSNIDLHTCNKAANWRDTLACYMAPDPPKLQDLPAVCGEIMMEYSKQLMTLGEFLFELLSEALGLNPNHLKDMGCAKSHIMFGQYYPPCPQPDLTLGISKHTDFSFITILLQDNIGGLQVIHDQCWVDVSPVPGALVINIGDLLQLISNDKFISAEHRVIANGSSEPRISMPCFVSTFMKPNPRIYGPIKELLSEQNPAKYRDLTITEFSNTFRSQTISHPALHHFRI

SEQ ID NO: 299 - DNA, 1095 bp, Solanum lycopersicum
  CDS (1)..(1095)
atgacaacctccaacacacaacaaagctatgacaaaacaagtgaactaaaagcctttgatgacacaaaagcaggtgtcaaaggacttattgatagtggaattactaaagtacctcaaatattcattcatccagaggccttagaaaataaaaccacaaatcccaaaaatacacatttcattttccctttaatagacctccaaaacatcagcattaacaacaaagagatagtgaaacaaattcaagaagcatcagagacatggggtttctttcaagttatcaatcatggtatccccgtccccgtcctagacgaaatgttgcgtggggcacgacgttttcacgatcaagatatcgacgttaaaaagccatactatagtcgagatattgcaaggaaagttatgtacaattgcaattttgatctatttagtgagaaatctcttgcagcaaattggagagactcactttactctgtcatggctcctaatcctgctactcccgaggaaatccccgagacatgcagggaaatcacaattgagtactcaaattatgtgatgaatttgggatacacattgcttgaattattttcagaaggacttggtttaaaaccaaaccatctcaaagaaatgggatgtgctgagggactaggcattttgtgcaattactaccctaaatgtccacaaccagaaattgcaattggcacaagtagacatgctgataatgattttttcacagtgcttttgcaagatgatattggtggacttcaagttcttcacaagaatcaatgggttgatgtccctcctactcatggagctttagttgtcaatattggtgacattcttcagcttatatcgaatgacaaatataagagcgtagttcacagagtattggcaaatacaattggtccaagaatatcaatagcaagtttcttcagcacagggccattttcaacttctagaatttatggaccaattgaggaattattatcaaaagataatcctccaaagtatagatcaacaacaatgaaggacttctttgaatattctaataaaaaaggacttgatggcaattctaatttgtctcactacaaaataatatga

SEQ ID NO: 300 - protein, 364 aa, Solanum lycopersicum
MTTSNTQQSYDKTSELKAFDDTKAGVKGLIDSGITKVPQIFIHPEALENKTTNPKNTHFIFPLIDLQNISINNKEIVKQIQEASETWGFFQVINHGIPVPVLDEMLRGARRFHDQDIDVKKPYYSRDIARKVMYNCNFDLFSEKSLAANWRDSLYSVMAPNPATPEEIPETCREITIEYSNYVMNLGYTLLELFSEGLGLKPNHLKEMGCAEGLGILCNYYPKCPQPEIAIGTSRHADNDFFTVLLQDDIGGLQVLHKNQWVDVPPTHGALVVNIGDILQLISNDKYKSVVHRVLANTIGPRISIASFFSTGPFSTSRIYGPIEELLSKDNPPKYRSTTMKDFFEYSNKKGLDGNSNLSHYKII

SEQ ID NO: 301 - DNA, 1146 bp, Oryza sativa subsp. japonica
  CDS (1)..(1146)
atggccaccttctccggcaccgaccgtctccgcgacctccaggccttcgacaacaccaaggccggtgtcaagggcctcgtcgacgccggcgtcaccgccatcccctacttcttccgccaccaccctgaccccctccccatcgccgcgccgtcggaggccgccgcggccatcctagtcatcgacctcgccaaggccgacgtcgaccgtggccacgtcgtctcccaggtgaggtccgccgccgagacggtcggcttcttccaggtggtcaaccatggcgtcgccggggagctgatggaggagatgctcgcggcggtgcggcgcttccacgaggagcccctggaggcgaaggtgccgtactacaccagggacgtcgccagcaaggtctggttcaactccaacttcggcctcttccgtaacgggttccgttcgccggaggccaactggcgcgacacgatgttcgttgagatgttcccggaggcgccctcgccggaagagatcccgccgccgtgcaggggcgtgctggaggtgtacgccgcggcggtgcggcggctcggggaacggctgttcgagctgctgtcggaggcgctgggcctccccgtggggtaccttggccgcgacgccgggtgcatggacgggctgagcctgagcgtggcggcgcactactacccggcgtgcccggagccggaggcgacgatgggcgcgaccaagcactccgaccccagcttcctcacagtgctgctgcaggacacctccggcggcctgcaggcggtgctcccgcggcctccggaggagcggtgggtggacgtgcccccggtggccggcgcgctggtggtgaacgtcggcgacctcctccagctggtgtcgaacgacaggctccggagcgtggagcaccgggtgctgcccaccggcgccgcggggccggcccgcgtgtcggtggcgtgcttcttccgccacgcgtacgcgtcgacgaggccgtgtgtcccggtcgtcgtcggcggcggcggggcacgggcggcggcggtgtacaggagcacgacggcgggggagttcctggcgcactacaacggcaaggggctcgacgggcggtcggcgctggaccacttcaggcttccggcggcggcgtcgtctcctcctcctccgctgtag

SEQ ID NO: 302 - protein, 381 aa, Oryza sativa subsp. japonica
MATFSGTDRLRDLQAFDNTKAGVKGLVDAGVTAIPYFFRHHPDPLPIAAPSEAAAAILVIDLAKADVDRGHVVSQVRSAAETVGFFQVVNHGVAGELMEEMLAAVRRFHEEPLEAKVPYYTRDVASKVWFNSNFGLFRNGFRSPEANWRDTMFVEMFPEAPSPEEIPPPCRGVLEVYAAAVRRLGERLFELLSEALGLPVGYLGRDAGCMDGLSLSVAAHYYPACPEPEATMGATKHSDPSFLTVLLQDTSGGLQAVLPRPPEERWVDVPPVAGALVVNVGDLLQLVSNDRLRSVEHRVLPTGAAGPARVSVACFFRHAYASTRPCVPVVVGGGGARAAAVYRSTTAGEFLAHYNGKGLDGRSALDHFRLPAAASSPPPPL

SEQ ID NO: 303 - DNA, 1104 bp, Cucumis melo
  CDS (1)..(1104)
atgcccaacctcaccccattctccaaacttgacaaaacctttgacagagcttctgaactcaaagccttcgaccaaacaaaggccggcgtcaaaggccttgttgactccggcgtggcggagattccaggaatattctactgcccacccaaagaagcttcaaattccattccggaggaaacccatttgggtgttccggtggtggatctgggagatatcgataaagacccattcaaacgcagacaagtggtggaagaaatccgagaagcttcagaaactgggggtttttttcaagtgattaaccatggagttccggtgagtgttcaggaggagatcataaatagggttcgtcgatttttcgaacaggacagtgaagtgaagaaacaatattatacaagagactacactaaatctttcatttacaattgcaatttcgatttgtttagctcaccagtggccaattggagggataccatcgtcactgtcatggccccaaatcctcctaacccacacgacttgcctcaagtttgcagggacatcctttttgaatattcaaaacacattatgaagcttggagaattgatatttggtttactttcggaggctcttggtttgaaatcaactcatctcgtagacttggactgtaacgagggacttcgcataatcggccactattatccgtcaagtcctcaaccggaactctccatcggcacaactgaacactctgatgatacattcatcaccgtgctactgcaggacaatatgggaggtctccaagtgcgtcaacaaaacaaatgggtggatgttccaccagttcctggggccttcgttatcaacgtcggcaacttattgcagttgataacaaatgatagatttgtgagttcagagcataaagtattggcgaaccgtgaaggtccaagaatatcggtagcaagtttctttagcaccggccgtctaccaacatctaaactttatggacccattaaagaattgttgtcggaacaaaatcctcccaaatacaaagaaatcactgttagagagtacaatatctactttgccgaaaaagggttggatggcacttctgctcttccacatttcaagatttga

SEQ ID NO: 304 - protein, 367 aa, Cucumis melo
MPNLTPFSKLDKTFDRASELKAFDQTKAGVKGLVDSGVAEIPGIFYCPPKEASNSIPEETHLGVPVVDLGDIDKDPFKRRQVVEEIREASETGGFFQVINHGVPVSVQEEIINRVRRFFEQDSEVKKQYYTRDYTKSFIYNCNFDLFSSPVANWRDTIVTVMAPNPPNPHDLPQVCRDILFEYSKHIMKLGELIFGLLSEALGLKSTHLVDLDCNEGLRIIGHYYPSSPQPELSIGTTEHSDDTFITVLLQDNMGGLQVRQQNKWVDVPPVPGAFVINVGNLLQLITNDRFVSSEHKVLANREGPRISVASFFSTGRLPTSKLYGPIKELLSEQNPPKYKEITVREYNIYFAEKGLDGTSALPHFKI

SEQ ID NO: 305 - DNA, 1089 bp, Arabidopsis thaliana
  CDS (1)..(1089)
atgacagagaattctgaaaaaatcgatcgtttaaacgatctcacgacttttatctcgacgaagacaggagtgaaaggactcgtcgatgccgaaataaccgaagttcctagcatgtttcatgtcccttcttctattttatcaaacaacagaccttctgatatctccggcttaaacctcaccgtcccaatcatcgacctaggagatcgtaacacatcttcaagaaacgttgtcatttcgaagatcaaagacgcagctgagaattggggatttttccaagtgatcaatcatgatgttcctttaactgttcttgaagagatcaaagagagtgttcgaaggtttcatgaacaagatccagttgtcaagaaccaatatcttcctaccgataacaacaagagatttgtttataacaatgatttcgatctctatcattcttctcctttgaattggagagactctttcacttgttatattgctccagatcctccgaatccagaggaaatcccactagcttgcaggagtgcggcgatcgaatacacgaagcatgtaatggaattaggagctgtgctcttccaacttctctcagaagctttaggtttagactctgaggcacttaagaggattgattgtcttaagggtttgtttatgctctgccattactatccaccttgcccacaacctgacctaactttaggtataagtaaacacaccgacaactctttcctcacgcttcttcttcaagaccaaatcggtggtcttcaagttcttcatgaagattattgggtcgatgtccctcctgtacctggagctcttgttgtcaacattggtgatttcatgcagctgataacgaacgataagttcttgagcgtggagcatagggtacgaccgaacaaagatagaccgcggatttcagttgcgtgcttctttagctcgagtctttctccaaattccacggtttatggaccgattaaagatcttttgtctgatgaaaaccctgctaagtacaaagatatcaccataccagagtacactgcaggatttcttgcgagcatttttgatgaaaagtcgtatttgactaattacatgatatga

SEQ ID NO: 306 - protein, 362 aa, Arabidopsis thaliana
MTENSEKIDRLNDLTTFISTKTGVKGLVDAEITEVPSMFHVPSSILSNNRPSDISGLNLTVPIIDLGDRNTSSRNVVISKIKDAAENWGFFQVINHDVPLTVLEEIKESVRRFHEQDPVVKNQYLPTDNNKRFVYNNDFDLYHSSPLNWRDSFTCYIAPDPPNPEEIPLACRSAAIEYTKHVMELGAVLFQLLSEALGLDSEALKRIDCLKGLFMLCHYYPPCPQPDLTLGISKHTDNSFLTLLLQDQIGGLQVLHEDYWVDVPPVPGALVVNIGDFMQLITNDKFLSVEHRVRPNKDRPRISVACFFSSSLSPNSTVYGPIKDLLSDENPAKYKDITIPEYTAGFLASIFDEKSYLTNYMI

SEQ ID NO: 307 - DNA, 2226 bp, Arabidopsis thaliana
  CDS (1)..(2226)
atgggtcacgattccttttgttatttaattgtattaagatgtgcattaagatgtggaataatagcacttatgcaaatctgtgcattgcaaaaaaaagaaagaagaagcaagatggagtcaagtgatcgttcaagtcaagcaaaagctttcgacgagacaaaaaccggcgtgaaagggcttgtggcttcgggaatcaaagagattccagccatgttccatacacctccggatactctaacaagcctgaaacaaacagcaccaccttcgcagcagctgacgatccccacggtggatctgaaaggaggaagcatggatttgatatcgcggcggagcgtggtggagaagattggagacgctgcggagagatggggattcttccaggtggtgaatcatgggatctcggtggaggtgatggagaggatgaaagaagggattcgcaggtttcacgagcaggacccggaagtgaagaaacggttctactctagggatcacactagagatgtgctttactacagcaacatcgatctccacacttgtaataaggctgcaaattggagagatacgctcgcctgttacatggcccccgatcctcccaagttacaggacttgcccgcggtttgcggggagattatgatggagtactcaaagcaactaatgactttaggtgaatttctctttgagcttctatctgaggctttgggattaaaccctaatcacctcaaggacatgggctgtgccaagtctcatatcatgtttggccaatactatccaccttgccctcagcctgaccttactttaggcataagcaagcacaccgatttctcgtttatcaccattcttcttcaggacaatatcggagggcttcaagttatccatgaccaatgctgggttgatgtttctcctgtccctggcgcccttgtcattaacatcggagatcttctccagcttataagcaatgacaaattcattagcgcggagcatagggtgatagcaaatggatcttctgaaccgcggatttcaatgccatgtttcgtcagcacgttcatgaagccgaatccacgaatatatggacccatcaaagaacttttgtcagaacaaaaccctgccaagtatagagacttaaccatcaccgagttttcaaacaccttcaggtcccaaacgatcagaatcacagagattccggccctgttccgtgcaacgccggctactcttgcaagcctgaagtcgccaccacctccaaagcatctcaccatccctaccgttgatctcaaaggagcaagcgtggtggagaagatcggagaagctgctgagaaatggggattattccatttggtgaatcacggcatcccggtggaggttctggagaggatgattcaagggattcgcgggtttcacgagcaagaacctgaagccaagaaacgcttctactctagggatcacactagagacgtgctttactttagcaatcatgatctccaaaactccgaggccgccagttggagagacactctcggttgttataccgcacccgagcctcccagattagaggatttgcccgcggtttgcggggagattatgctggagtactcaaaggaaataatgagtttaggtgaaaggctatttgagcttctatcagaggctttggggttgaactctcatcatctcaaggacatggactgtgccaagtctcaatatatggttggccaacactacccaccttgccctcagcctgaccttactataggcataaacaagcacaccgatatttcctttctcaccgttcttcttcaagacaatgttggagggcttcaagttttccatgaacagtattggattgatgttactcctgtccctggggctctagtcattaacattggagattttcttcaggttaaaaagatcatgttgctacttcgatcttgcttcatttcatgtatgatttggggtttgatccttcttttttactgtgtgcagcttataaccaatgataagttcataagcgcggagcatagggtgatagccaatggatcttctgaaccgcggacttccgtggcaattgttttcagcacgttcatgagggcgtattctcgagtatatgggccaatcaaagatctcctgtctgcagaaaaccctgctaagtatagagactgcaccctcaccgaattttcaaccatcttcagctcaaaaacgctcgatgctcctaagttacaccatttcaaaatctaa

SEQ ID NO: 308 - protein, 741 aa, Arabidopsis thaliana
MGHDSFCYLIVLRCALRCGIIALMQICALQKKERRSKMESSDRSSQAKAFDETKTGVKGLVASGIKEIPAMFHTPPDTLTSLKQTAPPSQQLTIPTVDLKGGSMDLISRRSVVEKIGDAAERWGFFQVVNHGISVEVMERMKEGIRRFHEQDPEVKKRFYSRDHTRDVLYYSNIDLHTCNKAANWRDTLACYMAPDPPKLQDLPAVCGEIMMEYSKQLMTLGEFLFELLSEALGLNPNHLKDMGCAKSHIMFGQYYPPCPQPDLTLGISKHTDFSFITILLQDNIGGLQVIHDQCWVDVSPVPGALVINIGDLLQLISNDKFISAEHRVIANGSSEPRISMPCFVSTFMKPNPRIYGPIKELLSEQNPAKYRDLTITEFSNTFRSQTIRITEIPALFRATPATLASLKSPPPPKHLTIPTVDLKGASVVEKIGEAAEKWGLFHLVNHGIPVEVLERMIQGIRGFHEQEPEAKKRFYSRDHTRDVLYFSNHDLQNSEAASWRDTLGCYTAPEPPRLEDLPAVCGEIMLEYSKEIMSLGERLFELLSEALGLNSHHLKDMDCAKSQYMVGQHYPPCPQPDLTIGINKHTDISFLTVLLQDNVGGLQVFHEQYWIDVTPVPGALVINIGDFLQVKKIMLLLRSCFISCMIWGLILLFYCVQLITNDKFISAEHRVIANGSSEPRTSVAIVFSTFMRAYSRVYGPIKDLLSAENPAKYRDCTLTEFSTIFSSKTLDAPKLHHFKI

SEQ ID NO: 309 - DNA, 1092 bp, Solanum lycopersicum
  CDS (1)..(1092)
atggaaagccctagagttgaggagagttatgacaaaatgagtgaattaaaagcgtttgatgatactaaggccggtgttaaaggacttgttgattctggaattactaaagtacctcaaatattcgttctaccgccaaaagacagggctaaaaaatgtgaaacacatttcgtttttccagtgatagaccttcaaggtatcgatgaggatccgattaagcataaggagatagtggacaaagttcgagatgcatcggagaaatggggttttttccaagtggttaatcatgggattccaacatccgtcttggacagaacgttgcaaggaacacgacagttctttgagcaagataacgaggttaagaaacagtattacactcgagatactgcgaaaaaagtggtttatactagcaatcttgatttgtataaatcttctgttccagctgcaagttggagagacacgattttctgttacatggctccgaatcctcccagtctacaagaatttccaactccatgcggggagtcattaatagacttctccaaggatgtgaagaaactgggattcactttacttgaattattgtctgaaggtctcggtctcgatcgtagttatctcaaagattatatggattgttttcatcttttctgttcttgcaactactacccaccatgtcctcagccagaactcaccatgggcaccattcaacataccgatattggttttgtaacgatccttctacaagatgatatgggagggctccaagttcttcaccagaatcattgggttgatgttcctcctacacccggttctctagtggtgaatattggagattttctgcagctcttgtcaaatgacaagtacttaagtgtcgagcacagagcaatctcaaacaatgttggatcaagaatgtcaatcacgtgcttcttcggtgaaagtccatatcaatcttccaagctttatggaccgataactgaattgttatcagaagataatcctccaaaatatcgcgcaaccacagtgaaagaccacactagttacctccataacagaggcctagatggaacttctgcattgtcccgttacaagatctaa

SEQ ID NO: 310 - protein, 363 aa, Solanum lycopersicum
MESPRVEESYDKMSELKAFDDTKAGVKGLVDSGITKVPQIFVLPPKDRAKKCETHFVFPVIDLQGIDEDPIKHKEIVDKVRDASEKWGFFQVVNHGIPTSVLDRTLQGTRQFFEQDNEVKKQYYTRDTAKKVVYTSNLDLYKSSVPAASWRDTIFCYMAPNPPSLQEFPTPCGESLIDFSKDVKKLGFTLLELLSEGLGLDRSYLKDYMDCFHLFCSCNYYPPCPQPELTMGTIQHTDIGFVTILLQDDMGGLQVLHQNHWVDVPPTPGSLVVNIGDFLQLLSNDKYLSVEHRAISNNVGSRMSITCFFGESPYQSSKLYGPITELLSEDNPPKYRATTVKDHTSYLHNRGLDGTSALSRYKI

SEQ ID NO: 311 - DNA, 1206 bp, Catharanthus roseus
  CDS (1)..(1206)
atgcctaagtcttggccaattgtgatatcatctcatagtttctgttttcttccaaattctgagcaagaaagaaaaatgaaggacttgaactttcatgctgctacactctcagaagaagaatctttaagggaattgaaggcttttgatgagacaaaggctggtgtaaaagggattgtagatactgggataaccaaaattccacgtatctttatcgatcaaccaaaaaatcttgaccggatttcagtgtgtagaggaaaatccgatatcaagattccagttataaacttgaatggcctcagtagcaattcagaaatacggcgtgagattgtggagaaaattggagaagcgagtgagaaatatggattcttccagatagttaatcatgggattccacaagatgttatggataaaatggtagatggagttcgtaagtttcatgaacaagatgatcaaatcaagagacaatattactcccgtgaccgcttcaacaaaaattttctatatagcagtaattacgttttgattccaggaattgcttgcaattggagggatactatggaatgcattatgaattctaatcaacctgatcctcaggaattcccagatgtatgcagagacatattgatgaagtactcaaattatgtaagaaatttggggcttattctctttgaattactatcagaagctttggggctcaaaccaaatcatcttgaagaaatggattgtgctgaaggacttatacttcttggtcattactaccctgcatgccctcaaccagagttgacatttgggacaagcaagcactcagacagtggtttcttaaccatacttatgcaggatcaaattggcggccttcaaattcttcttgagaatcaatggattgatgtccccttcattcctggagctctagttattaacattgcagatcttttacagctgatcacgaacgacaagttcaagagtgtcgaacatagagtactggcaaacaaagttggtccgaggatttctgttgctgttgcttttggtataaaaacacaaactcaagaaggggtttcgccaagattgtacggaccaattaaagagttaatatcagaggaaaatccacccatttacaaggaggtcactgttaaagattttataacaattcgatttgccaaacgctttgacgatagctcttccttatctcctttcaggttaaacaattag

SEQ ID NO: 312 - protein, 401 aa, Catharanthus roseus
MPKSWPIVISSHSFCFLPNSEQERKMKDLNFHAATLSEEESLRELKAFDETKAGVKGIVDTGITKIPRIFIDQPKNLDRISVCRGKSDIKIPVINLNGLSSNSEIRREIVEKIGEASEKYGFFQIVNHGIPQDVMDKMVDGVRKFHEQDDQIKRQYYSRDRFNKNFLYSSNYVLIPGIACNWRDTMECIMNSNQPDPQEFPDVCRDILMKYSNYVRNLGLILFELLSEALGLKPNHLEEMDCAEGLILLGHYYPACPQPELTFGTSKHSDSGFLTILMQDQIGGLQILLENQWIDVPFIPGALVINIADLLQLITNDKFKSVEHRVLANKVGPRISVAVAFGIKTQTQEGVSPRLYGPIKELISEENPPIYKEVTVKDFITIRFAKRFDDSSSLSPFRLNN

SEQ ID NO: 313 - DNA, 1017 bp, Glycine max
  CDS (1)..(1017)
atggatcaaaagcttgtctcaagctggttccatcttcattcctcagtgcccttatcctacgtgcaaccaccggaaagtagaccaggcatggttgaagcttccagcaagagaaaaatcccggtggtggatcttgggctacatgatcgtgctgaaaccttgaaacagattttgaaagcctccgaggagtttggatttttccaggttatcaaccatggagtttccaaggaattaatggatgaaacactggatattttcaaggaatttcatgccatgcctgctgaagaaaagataagggaaagctcccgggacccaaatggaagttgcaggctttatacaagccgcgagattaacgacaaagatgtcgttcagttttggagggacacattaagacacatctgtccaccttcaggagaattcatggaatttttgcctcaaaaacctgcaaaatatcatgaagttgttgcgaaatacgcacaagaaatgagaacactaggactcaaaattttggagctgttatgtgaaggattaggacttgaccaaaattactgttgtggtgaacttagtgatagtccattattgctagctcatcactacccgccttgcccagaaccaactttaactttgggagctcccaagcaccgagatcctaaccttgcaaccattctgcttcaagaaaatgatataaatgcacttcaagtcttcaaggatggggaatggattgttgttgaaccaattccttatgcttttgtggtgaacattgggcttatgttgcagatcattagcaatggaaggttggttggtgctgaacaccgtgttgtcacaaattcaggcattgggaggaccactgttgcatatttcatccgtccaacaaataaacagattatagaacctgcaaagcctttgttaagttctggtgctcgcccaatctacgggtccattacatatgaagagttcttgagaaatttcttgagcaagggtcctgaaattgaacaagaattgctcttaaaaccttcgtag

SEQ ID NO: 314 - protein, 338 aa, Glycine max
MDQKLVSSWFHLHSSVPLSYVQPPESRPGMVEASSKRKIPVVDLGLHDRAETLKQILKASEEFGFFQVINHGVSKELMDETLDIFKEFHAMPAEEKIRESSRDPNGSCRLYTSREINDKDVVQFWRDTLRHICPPSGEFMEFLPQKPAKYHEVVAKYAQEMRTLGLKILELLCEGLGLDQNYCCGELSDSPLLLAHHYPPCPEPTLTLGAPKHRDPNLATILLQENDINALQVFKDGEWIVVEPIPYAFVVNIGLMLQIISNGRLVGAEHRVVTNSGIGRTTVAYFIRPTNKQIIEPAKPLLSSGARPIYGSITYEEFLRNFLSKGPEIEQELLLKPS

SEQ ID NO: 315 - DNA, 1020 bp, Zea mays
  CDS (1)..(1020)
atggcagagcatctcatctctacggctgaccacgacaggctgccggacagctacgtccggccggagacgcaacggccgcgcctgcgcgaggtcgtccccgacgcggagatccccgtggtggacctcgctgaccccgaccgcgaagccgtcgtcgccagggtcgccgaggcctgccgcacccacggcttcttccaggtgctcaaccacggggtgccggagcagctgacggcggcgatgatgtcggtggcgtacgaattcttccggctccccgcggaggagaaggccaagctgtactccgacgacccggccaagaagatgcggctgtccaccagctttaacgtgcgcaaggagacggtgcacaactggcgggactacctccgcctgcactgccacccgctggagcagtacgtccccgactggccggacaacccaccatccttcaggaggaccgtgagcgcgtactgcagtgcggtccgggagctggggttcaggctgtacgtcgccatctccgagggcttgggcctggacggagcgtacatcaaggaggcgctgggcgagcaggagcagcacatggcggtgaacttctacccgaggtgcccggcgccggagctcacgtacgggctgcccgcgcacacggaccccaacgcgctcaccatcctgctcatggaccagcaggtggccggcctgcaggtgctcaaggacggccgctggatcgccgtgaacccgcggcccggcgcgctcgtcgtcaacatcggggaccagctgcaggcgctgagcaacggcaggtacaggagcgtgtggcaccgcgccgtcgtcaacgccgacaggccgaggatgtcggtggcgtcgttcctctgcccctgcaacgacgcgcgcatcggccccgccgccaggctcgtcaccgacggcacgcccgccgtctacagggactacacctacgccgagtactacgccaagttctggagcaggaacctggaccaggagcactgcctcgagctcttcaggaccccgacctcctag

SEQ ID NO: 316 - protein, 339 aa, Zea mays
MAEHLISTADHDRLPDSYVRPETQRPRLREVVPDAEIPVVDLADPDREAVVARVAEACRTHGFFQVLNHGVPEQLTAAMMSVAYEFFRLPAEEKAKLYSDDPAKKMRLSTSFNVRKETVHNWRDYLRLHCHPLEQYVPDWPDNPPSFRRTVSAYCSAVRELGFRLYVAISEGLGLDGAYIKEALGEQEQHMAVNFYPRCPAPELTYGLPAHTDPNALTILLMDQQVAGLQVLKDGRWIAVNPRPGALVVNIGDQLQALSNGRYRSVWHRAVVNADRPRMSVASFLCPCNDARIGPAARLVTDGTPAVYRDYTYAEYYAKFWSRNLDQEHCLELFRTPTS

SEQ ID NO: 317 - DNA, 1026 bp, Brassica napus
  CDS (1)..(1026)
atggcagcaaagctaatatccaccggttttcgtcacactactttgccggaaaactatgtccggccactctccaaccgtccatgtctctccgacgtctctccacttgaagatttccctatcatcgatctatcttccacagatcgatctcggctcgtccaacaaatccaccaagcttgctcccgatttggattttttcaggtcataaatcacagagttagcaaagaaacaatagatggaatggtgagtgttgcgaacgagttctttagcatgtctatggaggaaaaaatgaagctgtactcggacgatccaacgaagacgacgagattatcaacgagcttcaatgtgaaaaaagaagaggtcaacaattggagagactatcttagactacattgttatcctatcaacaagtatgtccatgagtggccttcaaacccaccttctttcaaggaagttgtgagtaaatacagtacagaaataagagaactgggatttaaaatagaggaactgatatcagagagcctaggtttagaaaaagatcacatgaagaaagtgcttgccgaacaaggtcaacacatggcagacaactattaccctccatgtcctgagcctgagctcacctatggtttacctgctcataccgacccaaatgccctcaccattcttctccaagatgctaccgtttgcggtctccagatcttgatcgacggtcactggtttgctgttaatcctcgtcctgatgcttttgtcatcaacattggtgaccagttgcaggcattgagtaacggagtatacaaaagtgtttggcatcgagcagtgacaaacactgaaaacccgagactatcgatcgcatcatttatgtgccctgataacggtgctgtcataagcccggcaaagcccttgtgggaagccaaggaggaagaggccaagccagtctacagagactacacttatgcagagtactacaagaagttttggagtaggaatctggaccaagaacattgccttgagaactttctaaaccactag

SEQ ID NO: 318 - protein, 341 aa, Brassica napus
MAAKLISTGFRHTTLPENYVRPLSNRPCLSDVSPLEDFPIIDLSSTDRSRLVQQIHQACSRFGFFQVINHRVSKETIDGMVSVANEFFSMSMEEKMKLYSDDPTKTTRLSTSFNVKKEEVNNWRDYLRLHCYPINKYVHEWPSNPPSFKEVVSKYSTEIRELGFKIEELISESLGLEKDHMKKVLAEQGQHMADNYYPPCPEPELTYGLPAHTDPNALTILLQDATVCGLQILIDGHWFAVNPRPDAFVINIGDQLQALSNGVYKSVWHRAVTNTENPRLSIASFMCPDNGAVISPAKPLWEAKEEEAKPVYRDYTYAEYYKKFWSRNLDQEHCLENFLNH

SEQ ID NO: 319 - DNA, 1026 bp, Brassica napus
  CDS (1)..(1026)
atggcggcaaagcttttatccaccggtttccgtcactctactttgccggaaaactatgtccggccactctctgaccgtccacgtctctcccaagtttctcagcttgaagatttccctctcatcgatatatcttcaacagatcgatctcggctcgtccaaaaaatccaccaagcttgcgcccgatttggtttctttcaggttataaatcatggtgttagcaaagcaactatagatgagatggtgagtgttgcgcatgagttttttggcatgcctatggacgaaaaaatgaagctatactcggacgatccaacaaagacaccgagattatcgacgagctttaatgtgaaggaagaagaggttaacaattggagagactatctaagactacattgttatcctatcgacaagtatgtccatgagtggccttcaaacccaccttctttcaaggaagttgtgagtaaatacagtacagaaataagagaattgggatttaaaatagaggaattgatatcagagagcttaggtttagaaaaagattacatgaagaaagtgcttggtgaacaaggtcaacacatggcagtcaactattatcctccatgtcctgagcctgagctcacctatggtttacctgctcataccgacccaaatgccctcaccattcttctccaagatgctaccgtttgcggtctccagatcttgatcgacggtcactggtttgctgttaatcctcgtcctgatgcttttgtcatcaacattggtgaccagttgcaggcattgagtaacggagtatacaaaagtgtttggcatcgagcagtgacaaacactgaaaacccgagactatcgatcgcatcatttatgtgccctgataacggtgctgtcataagcccggcaaagcccctgtgggaagccaaggaggaagaggccaagccaatctacagagactacacttatgcagagtactacaagaagttttggagtaggaatctggaccaagaacattgcctcgaaaactttctaaaccactag

SEQ ID NO: 320 - protein, 341 aa, Brassica napus
MAAKLLSTGFRHSTLPENYVRPLSDRPRLSQVSQLEDFPLIDISSTDRSRLVQKIHQACARFGFFQVINHGVSKATIDEMVSVAHEFFGMPMDEKMKLYSDDPTKTPRLSTSFNVKEEEVNNWRDYLRLHCYPIDKYVHEWPSNPPSFKEVVSKYSTEIRELGFKIEELISESLGLEKDYMKKVLGEQGQHMAVNYYPPCPEPELTYGLPAHTDPNALTILLQDATVCGLQILIDGHWFAVNPRPDAFVINIGDQLQALSNGVYKSVWHRAVTNTENPRLSIASFMCPDNGAVISPAKPLWEAKEEEAKPIYRDYTYAEYYKKFWSRNLDQEHCLENFLNH

SEQ ID NO: 321 - DNA, 1026 bp, Brassica napus
  CDS (1)..(1026)
atggcggcaaagcttttatccaccggtttccgtcactctactttgccggaaaactatgtccggccactctctgaccgtccacgtctctcccaagtttctcagcttgaagatttccctctcatcgatatatcttcaacagatcgatctcggctcgtccaaaaaatccaccaagcttgcgcccgatttggtttctttcaggttataaatcatggtgttagcaaagcaactatagatgagatggtgagtgttgcgcatgagttttttggcatgcctatggacgaaaaaatgaagctatactcggacgatccaacaaagacaccgagattatcgacgagctttaatgtgaaggaagaagaggttaacaattggagagactatctaagactccattgttatcctatcgacaagtatgtccatgagtggccttcaaacccaccttctttcaaggaagttgtgagtaaatatagtagagaaataagagaattgggatttaaaatagaggaattgatatcagagagcttaggtttagaaaaagattacatgaagaaagtgcttggtgaacaaggtcaacacatggcagtcaactattatcctccatgtcctgagcctgagctcacctatggtttacctgctcataccgacccaaatgccctcaccattcttctccaagatgctaccgtttgcggtctccagatcttgatcgacggtcactggtttgctgttaatcctcgtcctgatgcttttgtcatcaacattggtgaccagttgcaggcattgagtaacggagtatacaaaagtgtttggcatcgagcagtgacaaacactgaaaacccgagactatcgatcgcatcatttatgtgccctgataacggtgctgtcataagcccggcaaagcccttgtgggaagccaaggaggaagaggccaagccagtctacagagactacacttatgcagagtactacaagaagttttggagtaggaatctggaccaagaacattgccttgagaactttctaaaccactag

SEQ ID NO: 322 - protein, 341 aa, Brassica napus
MAAKLLSTGFRHSTLPENYVRPLSDRPRLSQVSQLEDFPLIDISSTDRSRLVQKIHQACARFGFFQVINHGVSKATIDEMVSVAHEFFGMPMDEKMKLYSDDPTKTPRLSTSFNVKEEEVNNWRDYLRLHCYPIDKYVHEWPSNPPSFKEVVSKYSREIRELGFKIEELISESLGLEKDYMKKVLGEQGQHMAVNYYPPCPEPELTYGLPAHTDPNALTILLQDATVCGLQILIDGHWFAVNPRPDAFVINIGDQLQALSNGVYKSVWHRAVTNTENPRLSIASFMCPDNGAVISPAKPLWEAKEEEAKPVYRDYTYAEYYKKFWSRNLDQEHCLENFLNH

SEQ ID NO: 323 - DNA, 1017 bp, Glycine max
  CDS (1)..(1017)
atggacataaaagtgctttcttccggagttcagtactcaaatctaccggagagttacatccgacccgaatcggagcgacctcgtctttccgaggtttcggagtgcgaggatgttccaatcatcgacttgggttctcaaaatagagcccagattgttcaccaaatcggtgaagcctgcagaaactatggtttcttccaggtgattaatcacggggtggctttagaagcggcaaaggaaatggtagaagtggcacatggattcttcaagttaccagtggaggagaagctcaagttgtactcggaagacacatcaaagacaatgagactgtctactagttttaatgtgaaaaaagagacggtgcgtaattggagggattatcttaggcttcactgctatccattggagaaatatgcgcctgaatggccttctaatccaccctctttcaaggaaactgttacagaatactgcacaataattagggaattggggttgaggatacaggaatacatatcagagagtttgggcctagaaaaagactacataaagaatgtattaggggaacaagggcagcacatggctgtgaactactatccaccatgcccagaaccagaacttacctatggattgccagggcacactgacccaaatgcacttacaattctgcttcaagaccttcaagttgctggccttcaggttctcaaagatggcaagtggcttgccgttagtccccaacctaatgcctttgtcattaacattggcgatcaacttcaggctttgagtaatgggctttataagagtgtgtggcaccgtgctgttgtcaatgttgagaaaccaaggctttctgtggcttcatttctttgtccaaatgacgaggcattgataagccctgcaaaaccactcaccgaacatggatccgaagccgtatacagaggatttacatatgcagaatactataagaagttttggagcaggaacttagaccaagaacactgtttggaacttttcaagaacaagtaa

SEQ ID NO: 324 - protein, 338 aa, Glycine max
MDIKVLSSGVQYSNLPESYIRPESERPRLSEVSECEDVPIIDLGSQNRAQIVHQIGEACRNYGFFQVINHGVALEAAKEMVEVAHGFFKLPVEEKLKLYSEDTSKTMRLSTSFNVKKETVRNWRDYLRLHCYPLEKYAPEWPSNPPSFKETVTEYCTIIRELGLRIQEYISESLGLEKDYIKNVLGEQGQHMAVNYYPPCPEPELTYGLPGHTDPNALTILLQDLQVAGLQVLKDGKWLAVSPQPNAFVINIGDQLQALSNGLYKSVWHRAVVNVEKPRLSVASFLCPNDEALISPAKPLTEHGSEAVYRGFTYAEYYKKFWSRNLDQEHCLELFKNK

SEQ ID NO: 325 - DNA, 1155 bp, Zea mays
  CDS (1)..(1155)
atggctccgaccgccgccaaggacagtggctccgccgatcgctggcgcgaggtgcaggcgttcgaggacagcaagctgggtgtgaagggcctggtcgactccggcgtcaagtccatcccggccatgttccaccacccgccggagtccctcaaggatgtcatttctccaccagctctgccctcctccgacgatgcgccggccatcccagtggtggacctgtccgtggcgcggcgcgaggatctggtggcccaggtgaagcacgcggccgggacggtgggcttcttctgggtggtgaaccacggcgtgccggaggagctgatggccagcatgctcagcggggtgcgccagttcaacgagggctctctggaggccaagcaggcgctctactcacgggaccccgctcgcaacgtgcgcttcgcttccaacttcgacctcttcgagtccgcggcggccgactggcgcgacacgctctactgcaagattgcgccggatccggcgccgcgggagctcgtgccggagcctctccggaacgtgatgatggaatacggcgaggaactgacgaagctggcgcggtccatgttcgagctgctgtcggagtccctcggcatgcccagcgaccacctgcacaagatggagtgcatgcagcagctccacatcgtgtgccagtactacccgccatgcccggagccgcacctcaccatcggcgtcaggaagcactcagacaccggtttcttcaccatcctcctgcaggacggcatgggcggcctgcaggtgctagtcgatcgcggaggcggccgccagacgtgggtggacgtcactccccgacctggggcactcatggtcaacatgggcagctttcttcagcttgtgacgaatgaccggtacaagagcgtggatcaccgggtgccggctaacaagagcagtgacacggcgagggtctcggtagctgccttcttcaaccccgacgagaagagaaccgagaggctgtatggcccaattccagaccccagcaagcctccgctgtacaggagcgtcacgttcccggacttcatcgccaagttcaacagcatcggactggacggtcgcgtgctcgaccacttccggttggaggacgacggccctactcctcttgctgctgctgcacaccacgtctag

SEQ ID NO: 326 - protein, 384 aa, Zea mays
MAPTAAKDSGSADRWREVQAFEDSKLGVKGLVDSGVKSIPAMFHHPPESLKDVISPPALPSSDDAPAIPVVDLSVARREDLVAQVKHAAGTVGFFWVVNHGVPEELMASMLSGVRQFNEGSLEAKQALYSRDPARNVRFASNFDLFESAAADWRDTLYCKIAPDPAPRELVPEPLRNVMMEYGEELTKLARSMFELLSESLGMPSDHLHKMECMQQLHIVCQYYPPCPEPHLTIGVRKHSDTGFFTILLQDGMGGLQVLVDRGGGRQTWVDVTPRPGALMVNMGSFLQLVTNDRYKSVDHRVPANKSSDTARVSVAAFFNPDEKRTERLYGPIPDPSKPPLYRSVTFPDFIAKFNSIGLDGRVLDHFRLEDDGPTPLAAAAHHV

SEQ ID NO: 327 - DNA, 1149 bp, Glycine max
  CDS (1)..(1149)
atgagttgccaagcatggcccgaacccatagttcgagtccaatccttagctgaaagtggcctaagttcaatcccttcacgctacattaggcctcactcccaaagaccctccaataccacttcttttccaactcctaaaccttttcaaactgatcatcatcatggtcatgatcagaaaacttccgatcatgaccatgatcatgatcatgttaacattcccgtcattgacctgaaacatgttttctcggaggatccgatcctccgagaaaagatattccgacacgtggacgaggcgtgtcgggagtgggggttcttccaggtggtgaaccatggggttagccatgagttgatgaaaagttctagggaactgtggcgcgagttcttcaaccagccacttgaggtgaaggaggagtatgccaactcccccaccacttatgagggctatggaagtcgcttgggagtgcagaaaggtgccaccttggactggagtgactacttctttctccattacaggcctccctcacttaggaaccaagctaagtggcttgcatttccacaatcctttaggaaagtgattgctgaatatggggaggaagtggttaagctaggaggaaggatactcaaaatgatgtcaataaaccttggtttgaaagaagatttccttctcaatgcatttgggggagagagtgaggttggtgcatgcctaagggtgaatttctatccaaagtgccctcaacctgacctcacttttggactctcccctcactcagaccctggtggcatgaccattcttctctctgatgattttgtgtctggccttcaagtaagaagaggagatgaatgggtcatagttaagcctgtcccaaatgcattcgtcatcaacattggtgaccaaattcaggtgctgagcaatgcaatatacaagagtgtagaacacagggtgattgtgaactcaaacaaagatcgtgtgtccttggccttgttctacaacccgaggagtgatttactcattcaacctgccaaggagcttgtgacagaggagaagccagccttgtactcaccaatgacctatgatgaatacagactttacattaggctaaatggaccttgtggaaaggcccaagttgaatcattggcctcccaaacatga

SEQ ID NO: 328 - protein, 382 aa, Glycine max
MSCQAWPEPIVRVQSLAESGLSSIPSRYIRPHSQRPSNTTSFPTPKPFQTDHHHGHDQKTSDHDHDHDHVNIPVIDLKHVFSEDPILREKIFRHVDEACREWGFFQVVNHGVSHELMKSSRELWREFFNQPLEVKEEYANSPTTYEGYGSRLGVQKGATLDWSDYFFLHYRPPSLRNQAKWLAFPQSFRKVIAEYGEEVVKLGGRILKMMSINLGLKEDFLLNAFGGESEVGACLRVNFYPKCPQPDLTFGLSPHSDPGGMTILLSDDFVSGLQVRRGDEWVIVKPVPNAFVINIGDQIQVLSNAIYKSVEHRVIVNSNKDRVSLALFYNPRSDLLIQPAKELVTEEKPALYSPMTYDEYRLYIRLNGPCGKAQVESLASQT

SEQ ID NO: 329 - DNA, 1101 bp, Glycine max
  CDS (1)..(1101)
atggttcgttcttatccaatgcaagtagtaagcgacgaagccatcatgacgacgagggtgcaatccctggcccaatcgggtctctcccgggtcccaccccaatacatccaaccccctcaaacccgacccgtccgccacaccgcacccgaacccgattccattcccgtcatcgacctctcctccttcgaccccacccaacgcgcctccacccgcgactccatagctcgcgcctgccgcgaatggggcgccttccacgtcacgaaccacggcgtccccccttccctcctcgcctccctccgccgcgccggcctctccttcttctccgacacccccattcctgacaagctccgctactcctgctccgccgccgcctccgagggctacggcagcaaaatgctcgcaacaactacctccgatcaaaacgacgccgttcaggtcctcgattggagggactacttcgaccaccacacgctccccctctctcgccggaaccctacccggtggccggagtctccctccgattaccgtgagctggtggcgaggtacagcgacgagatgaatgttctggcgcaaaagttgctggctttgatttcggagagtcttgggttgcgagcttcgtgcattgaagatgctgttggggagttttatcagaacattacgattagttattaccctccgtgccccgaaccggatcttactctcgggttgcaatcgcattctgatatgggagcaatcacgcttctgattcaggatgatgtggggggtcttcaggttctcaagggtagtgacaagtgggtcactgttcagcctttgtcagatgctgttcttgttctattggctgaccaaactgagattataaccaatggaaagtacaggagctgtgagcatagggcaattactaatcctgatagagcaaggctctctgtggcaacatttcatgaccctgctaagacagccaagatctcccctgcttctgaactgataaacgactcatcgccggctaaataccgtgatgttgtttatggagactatgtttcatcatggtataccaaaggccctggaggaaaacgaaatattgatgcacttgtactggatccttaa

SEQ ID NO: 330 - protein, 366 aa, Glycine max
MVRSYPMQVVSDEAIMTTRVQSLAQSGLSRVPPQYIQPPQTRPVRHTAPEPDSIPVIDLSSFDPTQRASTRDSIARACREWGAFHVTNHGVPPSLLASLRRAGLSFFSDTPIPDKLRYSCSAAASEGYGSKMLATTTSDQNDAVQVLDWRDYFDHHTLPLSRRNPTRWPESPSDYRELVARYSDEMNVLAQKLLALISESLGLRASCIEDAVGEFYQNITISYYPPCPEPDLTLGLQSHSDMGAITLLIQDDVGGLQVLKGSDKWVTVQPLSDAVLVLLADQTEIITNGKYRSCEHRAITNPDRARLSVATFHDPAKTAKISPASELINDSSPAKYRDVVYGDYVSSWYTKGPGGKRNIDALVLDP

SEQ ID NO: 331 - DNA, 1017 bp, Glycine max
  CDS (1)..(1017)
atggacataaaagtgctttcttccggagttcagtactcaaatctaccggagagttacatccgacccgaatcggagcgacctcgtctttccgaggtttcggagtgcgaggatgttccaatcatcgacttgggttctcaaaatagagcccagattgttcaccagatcggtgaagcctgcagaaactatggttttttccaggtgattaatcacggggtggctttagaagccgcaaaggaaatggaagaagtggcacatggattcttcaagttaccagtggaggagaagctcaaattgtactcggaagacacatcaaagacaatgagactgtccactagttttaatgttaaaaaagagacggtgcataattggagggattatcttaggcttcactgctatccattggacaaatatgcgcctgaatggccttctaatccaccctctttcaaggaaactgttacagaatactgcacaataattagggaattggggttgaggatacaggaatacatatcagagagtttgggcctagaaaaagactacataaagaatgtattaggggaacaagggcagcacatggctgtgaactactatccaccatgcccagaaccagaacttacctatggattgccagggcacactgacccaaatgcacttacaattctgcttcaagaccttcaagttgctggccttcaggttctcaaagatggcaagtggcttgccgttagtccccaacctaatgcctttgtcattaacattggcgatcaacttcaggctttgagtaatgggctttataagagtgtgtggcaccgtgctgttgtcaatgttgagaaaccaaggctttctgtggcttcatttctttgtccaaatgacgaggcattgataagccctgcaaaaccactcaccgaacatggatccgaagccgtatacagaggatttacatatgcagaatactataagaagttttggagcaggaacttagaccaagaacactgtttggaacttttcaagaacaagtaa

SEQ ID NO: 332 - protein, 338 aa, Glycine max
MDIKVLSSGVQYSNLPESYIRPESERPRLSEVSECEDVPIIDLGSQNRAQIVHQIGEACRNYGFFQVINHGVALEAAKEMEEVAHGFFKLPVEEKLKLYSEDTSKTMRLSTSFNVKKETVHNWRDYLRLHCYPLDKYAPEWPSNPPSFKETVTEYCTIIRELGLRIQEYISESLGLEKDYIKNVLGEQGQHMAVNYYPPCPEPELTYGLPGHTDPNALTILLQDLQVAGLQVLKDGKWLAVSPQPNAFVINIGDQLQALSNGLYKSVWHRAVVNVEKPRLSVASFLCPNDEALISPAKPLTEHGSEAVYRGFTYAEYYKKFWSRNLDQEHCLELFKNK

SEQ ID NO: 333 - DNA, 1098 bp, Glycine max
  CDS (1)..(1098)
atgcctcccgtaccaatttcccccatcaaagttgggcacattgatgatgtccaagagctaagaaaaaccaagccaaggacaattcctcaaagatttgtacgagacttgacagaaagaccaacactcactacacctcttcccccaccacatagtgacatgccagtcattgatttctctaagcttagcaaagggaacaaagaggaagtcctcactgaacttttcaatcttgcaactgcttgtgaagagtggggattttttcaggtaattaatcatgaaattgacctcaatctgctggagagcatcgagaacctgagcagggagtttttcatgctacctttggaagagaaacagaaataccctatggctccaggaacagtccaagggtatggacaagcttttgttttctcagaggaccaaaaactggactggtgcaacatgtttgctcttggaattgaacctcaatatgttaggaacccaaatctatggccaaagaaaccagaaaaattcagcgaaactgtggaagaatactcaggagaaataaggaaactctgctataatctgttaacatacatagctttaggccttggtttgaaaggggatgagtttgaggagatgtttggcgtatcggtgcaagccgtgaggatgaactactaccctccatgttcaagacctgaccttgttttgggtctgagtccccattcagatggaagtgccctcactgttctgcagcaagcaaagggaggcccagtgggacttcagatactcaaggacaatacatgggttcctattcaaccaattccaaatgctcttgtcatcaacattggagacacaatagaagttcttacaaatgggaaatacaggagtgtggagcatagagctgtggctcatgaggagaaagctagactctcaattgtgacattttttgctcctagctatgaagtggagcttggtccaatgcctgagtttgtggatgaaaaccacccatgcaagtataaaagatacaatcatggagagtacagtaaacactatgtaacaaacaagttacaaggtaaaaagaccctggaatttgccaagatccaaaccaaaaacaaaaactag

SEQ ID NO: 334 - protein, 365 aa, Glycine max
MPPVPISPIKVGHIDDVQELRKTKPRTIPQRFVRDLTERPTLTTPLPPPHSDMPVIDFSKLSKGNKEEVLTELFNLATACEEWGFFQVINHEIDLNLLESIENLSREFFMLPLEEKQKYPMAPGTVQGYGQAFVFSEDQKLDWCNMFALGIEPQYVRNPNLWPKKPEKFSETVEEYSGEIRKLCYNLLTYIALGLGLKGDEFEEMFGVSVQAVRMNYYPPCSRPDLVLGLSPHSDGSALTVLQQAKGGPVGLQILKDNTWVPIQPIPNALVINIGDTIEVLTNGKYRSVEHRAVAHEEKARLSIVTFFAPSYEVELGPMPEFVDENHPCKYKRYNHGEYSKHYVTNKLQGKKTLEFAKIQTKNKN

SEQ ID NO: 335 - DNA, 1086 bp, Glycine max
  CDS (1)..(1086)
atggcattacaggcagttaatgacagaaaagctgaagttcaagcatttgatgattctaaaacgggtgtaaaaggtgtcctagattctggggtaacaaagatccctaccatgttccatgtcaagttagactcaactcacacctcaccaactcactccaacttcaccatcccaatcatagatcttcagaacataaacagcaattcaactctgcatgctgaagtggttgaccagcttaggagtgcatctcagaagtggggatttttccaagtgatcaatcatggcgttcctgtggaggttttggatgagatgatcagtggaatccgcaggtttcatgagcaagatgctgaggcaaggaagcccttttactcgagagatagcagtaagaaagtcaggtatttttctaatgggaagctgttcagagacatggctggtacttggagggacacaattgcatttgatgtgaatcctgatcccccaaacccacaagatataccagcagtgtgtagagatattgtggctgaatattcaaaacaagtaaaagcgttaggtaccacgatctttgagctactgtcagaggctcttggccttgatccttcttaccttgaagaaatggactgcactaaagcactttatgttatgggtcagtactatccaaaatgccctgaacctgaattaactatgggaatttcaaagcacactgattgtgacttcataacaatacttttgcaagatcagattggtggtctccaagttcttcatgagaatcattgggttaatgctcctccagtgcgaggagctcttgttgtcaacattggagatattctgcagcttatgactaatgacaagttcatcagtgtttatcaccgggtcttgtcgaggaatatgggccctagaatttctgtagcaaccttcttcatgaattttaccatatctaaatgtacatcgaagagttatggtccaataaaggaattgttatcagaagaaaaccccccagtctatagggacatgaatatgaaagaaatcttgacaaattattatgcaaaaggccttgatgggagctcctacttgctgcctttaaggttgtga

SEQ ID NO: 336 - protein, 361 aa, Glycine max
MALQAVNDRKAEVQAFDDSKTGVKGVLDSGVTKIPTMFHVKLDSTHTSPTHSNFTIPIIDLQNINSNSTLHAEVVDQLRSASQKWGFFQVINHGVPVEVLDEMISGIRRFHEQDAEARKPFYSRDSSKKVRYFSNGKLFRDMAGTWRDTIAFDVNPDPPNPQDIPAVCRDIVAEYSKQVKALGTTIFELLSEALGLDPSYLEEMDCTKALYVMGQYYPKCPEPELTMGISKHTDCDFITILLQDQIGGLQVLHENHWVNAPPVRGALVVNIGDILQLMTNDKFISVYHRVLSRNMGPRISVATFFMNFTISKCTSKSYGPIKELLSEENPPVYRDMNMKEILTNYYAKGLDGSSYLLPLRL

SEQ ID NO: 337 - DNA, 1050 bp, Glycine max
  CDS (1)..(1050)
atggccgaaaagttagtgctggtatcagacatggcttccactatgaagcaggttccctctaatttcatcaggccactcggtgaccgtccaaatcttcaaggcgtcgtccaatcctcagatgtttgcattcctctcatcgatctccaagaccttcatggccccaatcgctcccacatcatccaacagattgaccaagcttgccaaaattatggattttttcaggtgacaaatcatggagttccagagggtgtgattgaaaagataatgaaggtgacaagggagtttttcggtttaccagagagtgagaaattgaagagttactccactgatccattcaaggcaagcaggctgtccactagtttcaacgtgaatagtgagaaggtttccagctggagggacttcttgagacttcactgtcaccctatagaggattacataaaggaatggccctccaaccctccatctttaagagaagatgttgcagaatactgcaggaagatgagaggagtatcattgaaattggtggaggcaatttctgaaagcttaggtttggagagggattacattaacagggtagttggagggaagaaggggcaggaacaacagcacttggcaatgaactactatccagcgtgtccagagccagagctgacatatgggttgccagggcatactgatccgacggtgataaccatactcctccaagatgaggtaccgggattacaggttctcaaagatggcaagtgggtggctgtgaatcccatccccaacaccttcgtagtgaacgtgggtgatcaaattcaggtgataagcaatgacaagtataagagtgtactgcatcgagcagtggtgaattgcaacaaggacaggatttccattccaacattctattttccctcaaatgacgcaatcataggacccgctccacaactcatacatcatcatcaccatccgcctcagtacaacaactttacgtacaatgaatactaccagaatttttggaacaggggactttccaaagaaacttgcctcgatatcttcaaggcctaa

SEQ ID NO: 338 - protein, 349 aa, Glycine max
MAEKLVLVSDMASTMKQVPSNFIRPLGDRPNLQGVVQSSDVCIPLIDLQDLHGPNRSHIIQQIDQACQNYGFFQVTNHGVPEGVIEKIMKVTREFFGLPESEKLKSYSTDPFKASRLSTSFNVNSEKVSSWRDFLRLHCHPIEDYIKEWPSNPPSLREDVAEYCRKMRGVSLKLVEAISESLGLERDYINRVVGGKKGQEQQHLAMNYYPACPEPELTYGLPGHTDPTVITILLQDEVPGLQVLKDGKWVAVNPIPNTFVVNVGDQIQVISNDKYKSVLHRAVVNCNKDRISIPTFYFPSNDAIIGPAPQLIHHHHHPPQYNNFTYNEYYQNFWNRGLSKETCLDIFKA

SEQ ID NO: 339 - DNA, 1134 bp, Hordeum vulgare
  CDS (1)..(1134)
atgacacccacgccaccaccaaccatgtcggccgcgtcctctcccgtcgcctacgaccgcacggccgacctccgcgcgctggacgccaccttcgccggcgtcagcggcctcgtcgcctccggcctcacgcacgtcccccgcatcttccgcgtccctgaaggccaccacgacaaacaggacaccaccgccctcgcaggccgccaacaagaaccagctggggccatcccggtgatcgacctcgggtgcggcgaccgcgccgccgtggttgccgccgtccgcctggccgcggcagggtgcgggttctttcaggtgacgggccacggcgtgccggagccggcgatggccgctgcgaccgacgcggtgcgggcgttccacggtgccgacagcggcgagggcaccgagaaggcacggctctactcgcgtgaccccgttaagccggtcaagtaccagtgcaacttcgacctctacgagtcgccggtggccaattggcgcgacacgctccacgtccgcatggcccctgacccgcccgacgtcggagacatgccggagagctgccgtgaggcacttcttgaatatgcccagcaagtgaagaaattggggaacactttgtttgagctgctctccgaagctcttgggctcaaaccaagctacctaaaagacatggagtgcaaccaaggacagatcttactctgccactattaccctccctgccctcagcctgaactcgccatcgggacaagccggcattcagacgctggcttcctgaccatactcctccaagacgaagtcggcggactacagatcttcaacgagaaccggtgggtagacgtcacgccgacacccggagcattcattgtgaacgtcggcgatctcttacagctgatctccaacgatgggttcaggagtgtggaacatagggtgttggcaaagaacgctgctccgagggtctcgatcgcgttcttcttcagcacgcatttccatccggcctcgacgaggatgtatggtccgatcaaggagctgctgtccgacgagaacccgccgttgtacagggagaccctcgtcagagattacatcaagcattactactccatcgggttagatgcgaaaactgccatctctgatttcaggttgtga

SEQ ID NO: 340 - protein, 377 aa, Hordeum vulgare
MTPTPPPTMSAASSPVAYDRTADLRALDATFAGVSGLVASGLTHVPRIFRVPEGHHDKQDTTALAGRQQEPAGAIPVIDLGCGDRAAVVAAVRLAAAGCGFFQVTGHGVPEPAMAAATDAVRAFHGADSGEGTEKARLYSRDPVKPVKYQCNFDLYESPVANWRDTLHVRMAPDPPDVGDMPESCREALLEYAQQVKKLGNTLFELLSEALGLKPSYLKDMECNQGQILLCHYYPPCPQPELAIGTSRHSDAGFLTILLQDEVGGLQIFNENRWVDVTPTPGAFIVNVGDLLQLISNDGFRSVEHRVLAKNAAPRVSIAFFFSTHFHPASTRMYGPIKELLSDENPPLYRETLVRDYIKHYYSIGLDAKTAISDFRL

SEQ ID NO: 341 - DNA, 1023 bp, Hordeum vulgare
  CDS (1)..(1023)
atggcgtaccagcttctgtccaccgtcgcgcaccgcgataccctcccggagggttacacgcggcccgagaacgaccgtccgcagctcgccgatgtggtgacggacaccaacatccccctcatcgacctcgcgtcgctagacaagcacagcatcatcgccgagatcgatcaggcctgccgcacctacggcttcttccagatcgtaaaccatgggatatcagaggagctgctggagaaggtgatggctgtgggtctggagtttttccggctccctccggaagagaaggcgaagctctattctgacgagccatccaaaaagataaggctttctacaagcttcaacgtccgcaaggagacagtgcacaactggcgggactacctacgccttcattgccacccgttggaggagttcgttccagactggccatccaatcctgaaacgttcaaggagatcatcagcacctactgccgcgaagtccggctgcttgggctccgactcctgggcgcgatctccctgggcctgggtctcgacgaggactacatcgagaaagtgctgggcgagcaggagcagcacatggccgtgaactactacccgcggtgccccgagccagacctcacctacggcctccccaagcacacggaccccaacgccctcaccatcctcctcatggacccccacgtctccgggctgcaggtcctcaagggcggcgtccagtggattgccgtcgacccccggcccaacgccctcgtcgtcaacctaggcgaccagttgcaggcgctgagcaacggcgcgtacaagagcgtctggcaccgcgcggtggtcaatgcgtcgcgggagcgcctgtcggtggcatctttcctgtgcccgtgcaacagcgcggtgatcggcccggcggccaagctcgtcgccgacggggacgagcccgtgtaccgcagctacacctacgacgagtactacaagaagttctggagcaggaacctcgaccaggaccactgcctggagctcttcacggatcagaattga

SEQ ID NO: 342 - protein, 340 aa, Hordeum vulgare
MAYQLLSTVAHRDTLPEGYTRPENDRPQLADVVTDTNIPLIDLASLDKHSIIAEIDQACRTYGFFQIVNHGISEELLEKVMAVGLEFFRLPPEEKAKLYSDEPSKKIRLSTSFNVRKETVHNWRDYLRLHCHPLEEFVPDWPSNPETFKEIISTYCREVRLLGLRLLGAISLGLGLDEDYIEKVLGEQEQHMAVNYYPRCPEPDLTYGLPKHTDPNALTILLMDPHVSGLQVLKGGVQWIAVDPRPNALVVNLGDQLQALSNGAYKSVWHRAVVNASRERLSVASFLCPCNSAVIGPAAKLVADGDEPVYRSYTYDEYYKKFWSRNLDQDHCLELFTDQN

SEQ ID NO: 343 - DNA, 1062 bp, Brassica napus
  CDS (1)..(1062)
atggttgcaagctggcctgagcccattgtttcagttcaagccttgtcccaagccggcatatccaccgtcccaaaccgctatgtgaaacccacgcatcagagaccggtctacaagtccgatcaatccggtcttgacatggaaatccccgtgctagacatgagagacatgtggaggaacccggaggggctgaggcgagtgaggaatgcgtgtgaggagtggggtttcttccaagtggtgaaccatggtgtagaccatgcgctgatggagagtgtgaggggagcgtggcgagagttctttgatttacccgtagaggtgaaacgaaagtacgcaaactcaccagacacatatgaaggctatggaagcagggttggggttgtgaaagatgctaagttagattggagtgattatttctttctcaattacttgccttcttccattagaaacccttccaagtggccatctcagcctcctaagataagagaattgatcgaagagtacggagaagaagtgagaaaactgtgtgagaggctagtggagacattgtcagagagtttaggtttagaaccaaaccatctcatgaaggcctttggaggagaagacaaagttggagctaatctgagagcaaacttttacccaaaatgccctcagccacacctaactttaggtctctcttctcattctgacccgggtggcatcaccattgtcctccccgacgaggaggtcgctggcctccaggtccgtcgtggtgactgctgggtcaccattaaatccgtgcccaatgctttgatcgttaacattggagatcaagttcagatacttagcaacggaatttacaaaagcgtggagcatcaggtggtcgttaattccggtatggatcgagtctccttggcactcttctacaacccgagaagtgatatcccgatcggaccggttaaagcactattaaccaaagaccgacctgctctttataaaccgatcaggttcgacgagtgccgccttctgattcgacaaaagggtcctagtgggaaaaaccaagttgattcactgttggcaagcacatga

SEQ ID NO: 344 - protein, 353 aa, Brassica napus
MVASWPEPIVSVQALSQAGISTVPNRYVKPTHQRPVYKSDQSGLDMEIPVLDMRDMWRNPEGLRRVRNACEEWGFFQVVNHGVDHALMESVRGAWREFFDLPVEVKRKYANSPDTYEGYGSRVGVVKDAKLDWSDYFFLNYLPSSIRNPSKWPSQPPKIRELIEEYGEEVRKLCERLVETLSESLGLEPNHLMKAFGGEDKVGANLRANFYPKCPQPHLTLGLSSHSDPGGITIVLPDEEVAGLQVRRGDCWVTIKSVPNALIVNIGDQVQILSNGIYKSVEHQVVVNSGMDRVSLALFYNPRSDIPIGPVKALLTKDRPALYKPIRFDECRLLIRQKGPSGKNQVDSLLAST

SEQ ID NO: 345 - DNA, 1098 bp, Oryza sativa
  CDS (1)..(1098)
atggcgtcctccgccgccgccgccgcggcaacggaccgcgccgccctcgtcaaggccttcgacgagacacgcaccggcgtccgcggcctcgtcgagtccggtgtctccgccgtcccggacatcttccgccaccccgacccctacgcctccgtcccgctcgctccacccggcgtctccatccccgtcgtcgacctctccctccccgcgccgctcgccgccgaggccgcggcgggggccgcgcgcgagtgggggttcttctacctcgtcaaccaccacgccctcgtcccccccggcttcaccgacgggctcctcgccgccacgcgcgccttcaacgaactccccgccacggagcgcgccgcgcactacggccgctccgtggacggcggggtggactacttctccaacttcgacctgtaccggtccggcgccgcgagctggcgcgacaccatcgaggtcacgttcgggccctcgcgccccgacacggggcgcatcccggcggcgtgccgcgccgaggtcgtcggctgggacgcgcacgccaccgccgtgtcccgcgccgtcatggcgctgctctgcgaggggctcggcctcgccgccgacgcgctggaggaggcctcctgcctcgaggggagagtgatggtgtgccactactacccggtgtgccctgagcccgagcgcaccatgggggtcgtcccgcacacggaccccgtcgtgctcaccatcctcgcgcaggatgatgtcggtggcctgcaggtgaagcacacgaacgaggatggggagagctactgggtagatgcgaagcctgtgcccggcgctcttatgatcaatgttggggacctattgcagataatgtctaatgataagtacaagagcgtggaacaccgggtagtaatgaattcacatgaagaagccagagtttcaagtgccatcttctacaatcctggcaagagaggggactcagttttttatggaccattgccagagctggtttcttcggaaaaccctccaaagtacaggaattttactatgcctgagtttttggggaccttctttaaacgagagcttgcgagcaatgctcttatcgagcacttcaaaatatga

SEQ ID NO: 346 - protein, 365 aa, Oryza sativa
MASSAAAAAATDRAALVKAFDETRTGVRGLVESGVSAVPDIFRHPDPYASVPLAPPGVSIPVVDLSLPAPLAAEAAAGAAREWGFFYLVNHHALVPPGFTDGLLAATRAFNELPATERAAHYGRSVDGGVDYFSNFDLYRSGAASWRDTIEVTFGPSRPDTGRIPAACRAEVVGWDAHATAVSRAVMALLCEGLGLAADALEEASCLEGRVMVCHYYPVCPEPERTMGVVPHTDPVVLTILAQDDVGGLQVKHTNEDGESYWVDAKPVPGALMINVGDLLQIMSNDKYKSVEHRVVMNSHEEARVSSAIFYNPGKRGDSVFYGPLPELVSSENPPKYRNFTMPEFLGTFFKRELASNALIEHFKI

SEQ ID NO: 347 - DNA, 1059 bp, Oryza sativa
  CDS (1)..(1059)
atggctccagccattgccaagcctctcctgagcgatctggtggcacaatccgggcaagtcccctcgagccacattcgtccggttggcgaccgcccggacctcgacaacgtcgaccacgagtccggcgccggcattccggtcatcgacctgaaacagctcgacggcccggatcgccgcaaggttgtcgaggccatcggttcggcgtgcgaaaccgacggttttttcatggtgaagaatcacgggatcccggaggaggtggtggaagggatgctgcgcgtggcgagggagttcttccacatgccggagtcggagcggctcaagtgctattccgacgaccccaagaaggcgatccggctgtcgacgagcttcaacgtgcgcaccgagaaggtgagcaactggcgcgacttcctgcgcctgcattgctaccctctcgagagcttcatcgaccagtggccctccaacccaccctccttcaggcaagtggtcggcacctactcgagggaggcgagggcgctggcgctgcggttgctggaggcgatatctgagagcctcgggctggagaggggccacatggtgtcggccatggggcggcaggcgcagcacatggcggtgaactactatccgccatgcccgcagccggagctcacctacggcctgccggggcacaaggaccccaatgccatcacgctgctgctccaggacggcgtctccggcctgcaggtccagcgcaacggccgctgggtggccgtcaaccccgtgcccgacgccctggtcatcaacatcggagatcaaatccaggcgctgagcaacgaccggtacaagagcgtgctccaccgggtgatcgtgaacagcgagagcgagaggatctccgtgccgacgttctactgcccgtccccggacgcggtgatcgcgccggccggcgcgctggtggacggcgccctgcacccgctggcgtaccggcccttcacgtaccaggcctactacgacgaattctggaacatgggcctccagtccgccagctgcttagaccggttccggcctaacgatcaggccgtctga

SEQ ID NO: 348 - protein, 352 aa, Oryza sativa
MAPAIAKPLLSDLVAQSGQVPSSHIRPVGDRPDLDNVDHESGAGIPVIDLKQLDGPDRRKVVEAIGSACETDGFFMVKNHGIPEEVVEGMLRVAREFFHMPESERLKCYSDDPKKAIRLSTSFNVRTEKVSNWRDFLRLHCYPLESFIDQWPSNPPSFRQVVGTYSREARALALRLLEAISESLGLERGHMVSAMGRQAQHMAVNYYPPCPQPELTYGLPGHKDPNAITLLLQDGVSGLQVQRNGRWVAVNPVPDALVINIGDQIQALSNDRYKSVLHRVIVNSESERISVPTFYCPSPDAVIAPAGALVDGALHPLAYRPFTYQAYYDEFWNMGLQSASCLDRFRPNDQAV

SEQ ID NO: 349 - DNA, 1023 bp, Triticum aestivum
  CDS (1)..(1023)
atggcgaaccagcttctgtccaccgtcgcgcaccgcgataccctcccggagggttacacgcggcccgagaacgaccggccgcagctcgccgatgttgtgactgacagcaacatccccctcatcgacctcgcctcgccggacaagcatcgcgtcatcgctgagatcgaccaggcttgccgcacctacggcttcttccagatcataaaccatgggatatcagaggagctgctggagaaggtgatggctgtggggcttgagtttttccggctcccgccggaagagaaggccaagctctattctgatgagccatccaaaaagataaggctttctacaagcttcaacgtccgcaaggagacagtgcacaactggcgggactatctgcgccttcattgccacccgttggaggagttcgtgcccgactggccatccaatcctgaaacgttcaaggagatcatcagcacctactgccgcgaagtccggctgctcggcctccgactcctgggcgcgatctccctgggcctgggcctcgaggaggactacatcgagaatgtgctgggcgagcaggagcagcacatggccgtcaactactacccgcggtgccccgagccggacctcacctacggcctgcccaagcacacggaccccaacgccctcaccattctcctcatggacccccacgtctccggcctgcaggtcctcaaggacggcgcccagtggatcgccgtcgacccccggcccaacgccctcgtcgtcaacctaggcgaccagttacaggcagtgagcaacggcgcgtacaagagcgtctggcaccgcgcggtggtcaatgcggcgcgggagcgcctgtcggtggcatctttcctgtgcccgtgcaacagcgcggtgatcggcccggcggacaagctcgtcggcgacggggacgagcccgtgtaccgcagctacacctacgacgagtactacaagaagttctggagcaggaacctggaccaggaccactgcctggagctcttcacgggtcagaagtga

SEQ ID NO: 350 - protein, 340 aa, Triticum aestivum
MANQLLSTVAHRDTLPEGYTRPENDRPQLADVVTDSNIPLIDLASPDKHRVIAEIDQACRTYGFFQIINHGISEELLEKVMAVGLEFFRLPPEEKAKLYSDEPSKKIRLSTSFNVRKETVHNWRDYLRLHCHPLEEFVPDWPSNPETFKEIISTYCREVRLLGLRLLGAISLGLGLEEDYIENVLGEQEQHMAVNYYPRCPEPDLTYGLPKHTDPNALTILLMDPHVSGLQVLKDGAQWIAVDPRPNALVVNLGDQLQAVSNGAYKSVWHRAVVNAARERLSVASFLCPCNSAVIGPADKLVGDGDEPVYRSYTYDEYYKKFWSRNLDQDHCLELFTGQK

SEQ ID NO: 351 - DNA, 1053 bp, Triticum aestivum
  CDS (1)..(1053)
atggcctccgaccgcctcgccgccctcaaggccttcgacgagaccaaggccggcgtgaagggcctcgtggacgccggcgtcaaggccgtcccggacatcttccgccaccctcccgacccgctctccccgtgcaccaaggtcgccgccatcccggtcgtcgacctctcgggtccccgctcggaggtggtcgccgcggtgagggaggcggcgcggacggcgggcttcttccagctggtgaaccacggcgtgccggaggcggccatgtcggggatgctggcggcggtgcggcggttcaacgaggagcccgcggaggccaaggcgccctactacacgcgggacgccgcgcggcgcgtgcgctacaactgcaacgccgacctcttccggaccctggtgggcaagtggcgcgacaccatctacatggacgacgtggaccggctggcggcgggcgaggaggaggaggtcctcccgccggcgtgcaggggcgtcgcgcccaagtacacggcgcagatacggatgctggggcgcgcgctcttcgagctgctgtcggaggccctgggcgtgcggcgcgggtacctggaggaggaggccggctgcctggagacgctcagcgtcgccggccactactacccggcgtgcccggagccgcacctgacgctgggcgccgtcaggcacaacgaccccggcttcctcaccgtgctgctccaggacggggtcggcggcctccaggtgctcacggacgtcgaggacggcgaagggaacgtgtccgccgcgtgggccgacgtgccggcggtgccgggggcgctggtggtgaacgtcggcgacttcctgcagctggtgtccaacgacaggttcaggagcgtcgcgcaccgcgtggtggccaacagcgtggggccccggatgtcggtggcgtgcttcttcagggccaagggagcgaccgtgtgcgccccggtggtcatggacgggggtggcccgccgcgctaccggaccgtcacggcggaggagctgctccgctcgtccgggaagcagaacgggctccgcgacgtgaggctctag

SEQ ID NO: 352 - protein, 350 aa, Triticum aestivum
MASDRLAALKAFDETKAGVKGLVDAGVKAVPDIFRHPPDPLSPCTKVAAIPVVDLSGPRSEVVAAVREAARTAGFFQLVNHGVPEAAMSGMLAAVRRFNEEPAEAKAPYYTRDAARRVRYNCNADLFRTLVGKWRDTIYMDDVDRLAAGEEEEVLPPACRGVAPKYTAQIRMLGRALFELLSEALGVRRGYLEEEAGCLETLSVAGHYYPACPEPHLTLGAVRHNDPGFLTVLLQDGVGGLQVLTDVEDGEGNVSAAWADVPAVPGALVVNVGDFLQLVSNDRFRSVAHRVVANSVGPRMSVACFFRAKGATVCAPVVMDGGGPPRYRTVTAEELLRSSGKQNGLRDVRL

SEQ ID NO: 353 - DNA, 1113 bp, Triticum aestivum
  CDS (1)..(1113)
atggcttctgcggccgtctgctcccctaagcagcagcagcggcaggaggaggaggaggatggtggggttgttaagatcgggcgggttgacgacgtgcaggagctgcagagggcgtgcgtggacgacgtgccggagcggtacgtccgggacggggacgaccggccgggcggcgccaacgtgtgcgcgcacgcggagatccccgtgatcgacgccggcgagctccggcgcggcggcggcgatggggacgagctggagaagctcaggcgagcctgcgaggagtggggcttcttccaggttgtgaaccatggcatcgacggcgagctgctggacgagatggagaggttgtcgagggagttcttcatgctgccgctggaggagaaggagcggtaccccatggcgccgggcggcatccagggctacggccacgccttcgtcttctccgaggaccagaagctcgactggtgcaacatgctggcgctcggcgtgtccccggcgttcatccggcagcccaagctctggccgaccacgccggccgccttcaccgacaccctcgagaggtactccgccgaggtcagggcgctctgccatcgtctcctggagcacatcgccgagacgctgggcctggcgcccggcacgttcgcgggcatgttcggcgacgcggtgcaggcggtgcggatgaacttctacccgccgtgcccgcggccggacctggtgctggggctgagcgcgcactccgacgggagcgcggtcaccgtgctccagcaggacgccggccgcgcggggctgcaggtgctccgggacggcgcctgggtgcccgtccaccccgtcccgcacgccctcgtcgtcaacctcggcgactcgctcgaggtgctcaccaacggcaggtacaagagcgtggagcaccgggcggtgaccaacggcgagcaggaccgcctgtccatcgtgacgttctacgcgccagcctacgacgtcgagctcggcccactgccggagctagtcgccgacggggagccctgccggtaccggaggttcaagcacggcgagtacagccggcactacgtcaccagcaagctcgagggcaagaagacgctggacttcgccaagatcaactag

SEQ ID NO: 354 - protein, 370 aa, Triticum aestivum
MASAAVCSPKQQQRQEEEEDGGVVKIGRVDDVQELQRACVDDVPERYVRDGDDRPGGANVCAHAEIPVIDAGELRRGGGDGDELEKLRRACEEWGFFQVVNHGIDGELLDEMERLSREFFMLPLEEKERYPMAPGGIQGYGHAFVFSEDQKLDWCNMLALGVSPAFIRQPKLWPTTPAAFTDTLERYSAEVRALCHRLLEHIAETLGLAPGTFAGMFGDAVQAVRMNFYPPCPRPDLVLGLSAHSDGSAVTVLQQDAGRAGLQVLRDGAWVPVHPVPHALVVNLGDSLEVLTNGRYKSVEHRAVTNGEQDRLSIVTFYAPAYDVELGPLPELVADGEPCRYRRFKHGEYSRHYVTSKLEGKKTLDFAKIN

SEQ ID NO: 355 - DNA, 1125 bp, Zea mays
  CDS (1)..(1125)
atggctccaacgaccgccaccaaggacgacagtggctacggcgacgagcgccggcgcgagctgcaggcgttcgacgacacgaagctgggggtgaaaggcctggtggactccggcgtcaagtccatcccgtccatcttccaccacccgccggaagccctgagcgacataatttctccggcgcctctgccgccgtcgtcgtcgccctccgccgccgccatcccggtggtggacctctcggtgacgcgccgcgaggacctagtcgagcaggtgaggcacgcggccgggacggtgggcttcttctggctggtgaaccacggcgtggcggaggagctgatgggcggcatgctccgcggggtgcgccagttcaacgagggccccgtggaggcgaagcaggcgctctactcgagggacctcgctcgcaacctgcgcttcgcctccaacttcgacctcttcaaggctgctgcggccgactggcgcgacacgctcttctgcgaggtggctccgaacccgccgccgcgggaggagctgccggagccactcaggaacgtgatgctggagtacggcgcggcggtgacgaagctggcgcggttcgtgttcgagctgctgtccgagtccctcggcatgcccagcgaccacctgtacgagatggagtgcacgcagaacctgaacgtggtgtgccagtactacccgccgtgcccggagccgcaccgcaccgtgggcgtcaagaggcacacggaccctggcttcttcaccatcctcctgcaggacggcatgggcggcctgcaggtgcgcctcggcgacgggcagaacggcggctgctgggtggacatcgctccccggcctggggcgctcatggtcaacatcggtgaccttctgcagctcgtgaccaatgaccggttcaggagcgtggagcaccgggtgccggccaacaagagcagcgacacggcgagggtctccgtggcgtccttcttcaacacggacgtgaggaggtccgagaggctgtacggccccattccagaccccagcaagcccccgctgtacaggagcgtcagggcccgagacttcatcgcaaagttcaacaccataggactcgatggccgcgcgctcgaccacttcaggctctag

SEQ ID NO: 356 - protein, 374 aa, Zea mays
MAPTTATKDDSGYGDERRRELQAFDDTKLGVKGLVDSGVKSIPSIFHHPPEALSDIISPAPLPPSSSPSAAAIPVVDLSVTRREDLVEQVRHAAGTVGFFWLVNHGVAEELMGGMLRGVRQFNEGPVEAKQALYSRDLARNLRFASNFDLFKAAAADWRDTLFCEVAPNPPPREELPEPLRNVMLEYGAAVTKLARFVFELLSESLGMPSDHLYEMECTQNLNVVCQYYPPCPEPHRTVGVKRHTDPGFFTILLQDGMGGLQVRLGDGQNGGCWVDIAPRPGALMVNIGDLLQLVTNDRFRSVEHRVPANKSSDTARVSVASFFNTDVRRSERLYGPIPDPSKPPLYRSVRARDFIAKFNTIGLDGRALDHFRL

SEQ ID NO: 357 - DNA, 1020 bp, Zea mays
  CDS (1)..(1020)
atggcggagcagctcatctccacggccgtgcaccacacgctgcccgacagctacgtccggtcggaggcggaccggccgcgcctcgacgaggtcgtgcccgacgccgacatccccgtcgtcgacctcgccaaccccgaccgcgccgccgtcgtcgcccagatcggcgccgcctgcagctcccacggcttcttccaggtgctcaaccacgggctgccgctggaggtcatgctggcagcgatggcggtggcgcacgacttcttccgcctctcgccggaggagaaggccaagctctactccgacgacccggccaagaagatgcgcctctccaccagcttcaacgtgcgcaaggagaccgtgcacaactggcgcgactacctccgcctgcactgccacccgctcgagcagttcgtcccggagtggccagccaatccgccgcccttcagggatgtcatgagcacatactgcaaggaggtccggcagctcgggttccggctctacgccatgatatcggagagcctgggactggagcaggactacatcaagaaggtcctcggcgagcaggagcagcacatggcggtgaacttctacccaaagtgcccgtcgccggagctcacctacgggctccccgcgcacacggaccccaacgcgctcaccatcctgctcatggaccagcaggtggccggcctgcaggtgctcaaggacggccgctggatcgccgtgaacccgcggcccggcgcgctcgtcgtcaacatcggggaccagctgcaggcgctgagcaacggcaggtacaggagcgtgtggcaccgcgccgtcgtcaacgccgacaggccgaggatgtcggtggcgtcgttcctctgcccctgcaacgacgcgcgcatcggccccgccgccaggctcctcaccgacggcacgcccgccgtctacagggactacacctacgccgagtactacgccaagttctggagcaggaacctggaccaggagcactgcctcgagctcttcaggaccccgacctcctag

SEQ ID NO: 358 - protein, 339 aa, Zea mays
MAEQLISTAVHHTLPDSYVRSEADRPRLDEVVPDADIPVVDLANPDRAAVVAQIGAACSSHGFFQVLNHGLPLEVMLAAMAVAHDFFRLSPEEKAKLYSDDPAKKMRLSTSFNVRKETVHNWRDYLRLHCHPLEQFVPEWPANPPPFRDVMSTYCKEVRQLGFRLYAMISESLGLEQDYIKKVLGEQEQHMAVNFYPKCPSPELTYGLPAHTDPNALTILLMDQQVAGLQVLKDGRWIAVNPRPGALVVNIGDQLQALSNGRYRSVWHRAVVNADRPRMSVASFLCPCNDARIGPAARLLTDGTPAVYRDYTYAEYYAKFWSRNLDQEHCLELFRTPTS

SEQ ID NO: 359 - DNA, 1086 bp, Zea mays
  CDS (1)..(1086)
atgtccgtcgccgccgccttgggccgcgccgatgagctccgcgcgctggacgacaccctcgccggcgtccgcggccttgtagcgtctggtgcgaagcaagttcctcgcatctttcgcgtcccctacccggaggagctactccaccatgaacaaccgccagcggcggcgaccgtcccgatgatcgatctcagcggcgaccgcgcagccgtgatcgacgccgtccgtggggcggcggcggggtgggggttcttccaggtcacgggccacgcggtgcccgagcaggtgatgtcagcagccgtggcggcgatgcgggcgttccacgaagccgacggcggggagggcagcgacaaggcgcggctctactcgcgagggcccgggagggcggtcaagtaccactgcaacttcgacctgtaccagtctcccgtggccaactggcgcgacacggtctacctgcggatggcacctgaccctcccgccgccgacgatctgccggagatctgccgagatgcactgtttgaatacgccaaacaagtgaaagatttggggcagaggttgtttgggctgctctccgaatccctcgggctcaaaccgagctacttgacagatattgagtgcgaccagggacagattatacttgggcactactaccctccatgcccccagcctgaactcgccattgggacaagccggcattcagactccggcttcctgaccatactactgcaggacaaagttggcggcctccagatcctccatgatggtcagtgggtcgacgttgcaccgacgcctggagcattcatcgtcaacataggcgatctcttgcagctggtctctaacgacaagttcagcagcgtcgagcacagggtggtagccaagaatgctgaaccaagagtttcgatcgcgtgctttttcagcacccatttccatcccgcttcgacaagaacgtatgccccaatcaaggagctgctgtccgaggagaaccctcctttgtatagggaaacactcgtgagagagtatgttgcacgttactactctgttggcttggatggaaaaaagaagactgctctagctgatttcaggttgtga

SEQ ID NO: 360 - protein, 361 aa, Zea mays
MSVAAALGRADELRALDDTLAGVRGLVASGAKQVPRIFRVPYPEELLHHEQPPAAATVPMIDLSGDRAAVIDAVRGAAAGWGFFQVTGHAVPEQVMSAAVAAMRAFHEADGGEGSDKARLYSRGPGRAVKYHCNFDLYQSPVANWRDTVYLRMAPDPPAADDLPEICRDALFEYAKQVKDLGQRLFGLLSESLGLKPSYLTDIECDQGQIILGHYYPPCPQPELAIGTSRHSDSGFLTILLQDKVGGLQILHDGQWVDVAPTPGAFIVNIGDLLQLVSNDKFSSVEHRVVAKNAEPRVSIACFFSTHFHPASTRTYAPIKELLSEENPPLYRETLVREYVARYYSVGLDGKKKTALADFRL

SEQ ID NO: 361 - DNA, 1128 bp, Zea mays
  CDS (1)..(1128)
atggctccaacgaccgccaccaaggacgacagtggctacggcgacgagcgccggcgcgagctgcaggcgttcgacgacacgaagctgggggtgaaaggtctggtggactccggcgtcaagtccatcccgtccatcttccaccacccgccggaagccctgagcgacatgatttctccggcgccgcctctgccgccgtcgtcgccctccggcgccgccatcccggtggtggacctctcggtgacgcggcgcgaggacctagtcgagcaggtgaggcacgcggccgggacggtgggcttcttctggctggtgaaccacggcgtggcggaggagctgatgggcggcatgctccgcggggtgcgccagttcaacgagggccccgtggaggcgaagcaggcgctctactcgagggacctggctcgcaacctgcgcttcgcctccaacttcgacctcttcaaggctgctgcggccgactggcgcgacacgctcttctgcgaggtggctccgaatccgccgccgcgggaggagctgccggagccactgaggaacgtgatgctggagtacggcgcggcggtgacgaagctggcggggttcgtgttcgagctgctgtccgagtccctcggcatgcccagcgaccacctgtacgagatggagtgcatgcagaacctgaacgtggtgtgccagtactacccgccgtgcccggagccgcaccgcaccgtgggcgtcaagaggcacacggaccctggcttcttcaccatcctcctgcaggacggcatgggcggcctgcaggtgcgcctcggcaacaacgggcagagcggcggctgctgggtggacatcgctccccggcctggggcgctcatggtcaacatcggtgaccttctgcagctcgtgaccaatgaccggttcaggagcgtggagcaccgggtgccagccaacaagagcagcgacacggcgagggtctccgtggcgtccttcttcaacacggacgtgaggaggtccgagaggatgtacggccccattccagaccccagcaagcccccgctgtacaggagcgtcagggcccgagacttcatcgcaaagttcaacaccataggactcgatggccgcgcgctcgaccacttcaggctctag

SEQ ID NO: 362 - protein, 375 aa, Zea mays
MAPTTATKDDSGYGDERRRELQAFDDTKLGVKGLVDSGVKSIPSIFHHPPEALSDMISPAPPLPPSSPSGAAIPVVDLSVTRREDLVEQVRHAAGTVGFFWLVNHGVAEELMGGMLRGVRQFNEGPVEAKQALYSRDLARNLRFASNFDLFKAAAADWRDTLFCEVAPNPPPREELPEPLRNVMLEYGAAVTKLAGFVFELLSESLGMPSDHLYEMECMQNLNVVCQYYPPCPEPHRTVGVKRHTDPGFFTILLQDGMGGLQVRLGNNGQSGGCWVDIAPRPGALMVNIGDLLQLVTNDRFRSVEHRVPANKSSDTARVSVASFFNTDVRRSERMYGPIPDPSKPPLYRSVRARDFIAKFNTIGLDGRALDHFRL

SEQ ID NO: 363 - DNA, 1125 bp, Zea mays
  CDS (1)..(1125)
atggctccaacgaccgccaccaaggacgacagtggctacggcgacgagcgccggcgcgagctgcaggcgttcgacgacacgaagctgggggtgaaaggtctggtggactccggcgtcaagtccatcccgtccatcttccaccacccgccggaagccctgagcgacataatttctccggcgcctctgccgtcgtcgccaccctccggcgccgccatcccggtggtggacctctcggtgacgcggcgcgaggacctagtcgagcaggtgaggcacgcggccgggacggtgggcttcttctggctggtgaaccacggcgtggcggaggagctgatgggcggcatgctccgcggggtgcgccagttcaacgagggccccgtggaggcgaagcaggcgctctactccagggacctggctcgcaacctgcgcttcgcctccaacttcgacctcttcaaggccgctgcggccgactggcgcgacacgctcttctgcgaggtggctccgaacccgccgccgcgggaggagctgccggagccactgaggaacgtgatgctggagtacggcgcggcggtgacgaagctggcgcggttcgtgttcgagctgctgtccgagtccctcggcatgcccagcgaccacctgtacgagatggagtgcatgcagaacctgaacgtggtgtgccagtactacccgccgtgcccggagccgcaccgcaccgtgggcgtcaagaggcacacggaccctggcttcttcaccatcctcctgcaggacggcatgggcggcctgcaggtgcgcctcggcaacaacgggcagagcggcggctgctgggtggacatcgctccccggcctggggcgctcatggtcaacatcggtgaccttctgcagctcgtgaccaatgaccggttcaggagcgtggagcaccgggtgccggccaacaagagcagcgacacggcgagggtctccgtggcgtccttcttcaacacggacgtgaggaggtccgagaggctgtacggccccattccagaccccagcaagcccccgctgtacaggagcgtcagggcccgagacttcatcgcaaagttcaacaccataggactcgatggccgcgcgctcgaccacttcaggctctag

SEQ ID NO: 364 - protein, 374 aa, Zea mays
MAPTTATKDDSGYGDERRRELQAFDDTKLGVKGLVDSGVKSIPSIFHHPPEALSDIISPAPLPSSPPSGAAIPVVDLSVTRREDLVEQVRHAAGTVGFFWLVNHGVAEELMGGMLRGVRQFNEGPVEAKQALYSRDLARNLRFASNFDLFKAAAADWRDTLFCEVAPNPPPREELPEPLRNVMLEYGAAVTKLARFVFELLSESLGMPSDHLYEMECMQNLNVVCQYYPPCPEPHRTVGVKRHTDPGFFTILLQDGMGGLQVRLGNNGQSGGCWVDIAPRPGALMVNIGDLLQLVTNDRFRSVEHRVPANKSSDTARVSVASFFNTDVRRSERLYGPIPDPSKPPLYRSVRARDFIAKFNTIGLDGRALDHFRL

SEQ ID NO: 365 - DNA, 1128 bp, Zea mays
  CDS (1)..(1128)
atggcggactgcatgcaggagtggccggagcccgtcgtccgcgtgcaggcgctcgccgagagcggcctgtccgtcatcccgagctgctacgtcaagccgccgtgcgaccgccccgccgtgtccccggcggcggcaacgacagtccaggagaccacggagccctcggacatgagcattccggtcgtcgatctcggcgcgctgctggcggcggacggcggcgccaccgtcaccgaggccgtcgccgccgcgtgccgggactggggcttcttccaggtggtcaaccacggggtgcgccccgagctgatgcgcgcggcgcgggaggcctggcgcggcttcttccgccgcccgcccgccgagaagcagcgctacgccaactcgccccgcacctacgagggctacggcagccgcctcggcgtccagaagggcgccgccctcgactggggcgactacttcttcctccacctcgcgccggaggcggccaagagcacgcccaagttctggccggcccagcccagcaactgcaaggaggtgtccgaggagtacggacgcgaggtggtgcggctgtgcgagctgctgatgcgggtgatgtcagtgagcctagggctggacgaggcgcacctccagcgggcgttcggcggggcggactgctgcggcgccaccctgcgcgccaactactacccgcggtgcccgcagccggacctgacgctgggcctctccgcgcactcggaccccggcgccctcaccgccctcctcgccgacgagcacgtccgcggcctgcaggtccgacgcagggccgccgacgactgggtcaacgtgcaccccgtccgcgacgccttcatcgtcaacgtcggcgaccaagtccagataatgagcaactccgtgtacaagagcgtggagcacagggtggtcgtgaacgccgaggaggagcgcatatccctcgccatcttctacaaccccaagggcgacgtccccatcgccccggcgccggagctggtcacggccgcgaagctgccaccgctctacccgacgatgaccttcgacgagtacaggctctacgtgaggagtaagggcgccaggggcaaggcgcagatcgaggctctcaagggccaggcatcaccagaaaattaa

SEQ ID NO: 366 - protein, 375 aa, Zea mays
MADCMQEWPEPVVRVQALAESGLSVIPSCYVKPPCDRPAVSPAAATTVQETTEPSDMSIPVVDLGALLAADGGATVTEAVAAACRDWGFFQVVNHGVRPELMRAAREAWRGFFRRPPAEKQRYANSPRTYEGYGSRLGVQKGAALDWGDYFFLHLAPEAAKSTPKFWPAQPSNCKEVSEEYGREVVRLCELLMRVMSVSLGLDEAHLQRAFGGADCCGATLRANYYPRCPQPDLTLGLSAHSDPGALTALLADEHVRGLQVRRRAADDWVNVHPVRDAFIVNVGDQVQIMSNSVYKSVEHRVVVNAEEERISLAIFYNPKGDVPIAPAPELVTAAKLPPLYPTMTFDEYRLYVRSKGARGKAQIEALKGQASPEN

SEQ ID NO: 367 - DNA, 1086 bp, Zea mays
  CDS (1)..(1086)
atgtccgtcgccgccgccttgggccgcgccgatgagctccgcgcgctggacgacaccctcgccggcgtccgcggccttgtagcgtctggtgcgaagcaagttcctcgcatctttcgcgtcccctacccggaggagctactccaccatgaacaaccgccagcggcggcgaccgtcccgatgatcgatctcagcggcgaccgcgcagccgtgatcgacgccgtccgtggggcggcggcggggtgggggttcttccaggtcacgggccacgcggtgcccgagcaggtgatgtcagcagccgtggcggcgatgcgggcgttccacgaagccgacggcggggagggcagcgacaaggcgcggctctactcgcgagagcccgggagggcggtcaagtaccactgcaacttcgacctgtaccagtctcccgtggccaactggcgcgacacggtctacctgcggatggcacctgaccctcccgccgccgacgatctgccggagatctgccgagatgcactgtttgaatacgccaaacaagtgaaagatttggggcagaggttgtttgggctgctctccgaatccctcgggctcaaaccgagctacttgacagatattgagtgcgaccagggacagattatacttgggcactactaccctccatgcccccagcctgaactcgccattgggacaagccggcattcagactccggcttcctgaccatactactgcaggacaaagttggcggcctccagatcctccatgatggtcagtgggtcgacgttgcaccgacgcctggagcattcatcgtcaacataggcgatctcttgcagctggtctctaacgacaagttcagcagcgtcgagcacagggtggtagccaagaatgctgaaccaagagtttcgatcgcgtgctttttcagcacccatttccatcccgcttcgacaagaacgtatggcccaatcaaggagctgctgtccgaggagaaccctcctttgtatagggaaacactcgtgagagagtatgttgcacgttactactctgttggcttggatggaaaaaagaagactgctctagctgatttcaggttgtga

SEQ ID NO: 368 - protein, 361 aa, Zea mays
MSVAAALGRADELRALDDTLAGVRGLVASGAKQVPRIFRVPYPEELLHHEQPPAAATVPMIDLSGDRAAVIDAVRGAAAGWGFFQVTGHAVPEQVMSAAVAAMRAFHEADGGEGSDKARLYSREPGRAVKYHCNFDLYQSPVANWRDTVYLRMAPDPPAADDLPEICRDALFEYAKQVKDLGQRLFGLLSESLGLKPSYLTDIECDQGQIILGHYYPPCPQPELAIGTSRHSDSGFLTILLQDKVGGLQILHDGQWVDVAPTPGAFIVNIGDLLQLVSNDKFSSVEHRVVAKNAEPRVSIACFFSTHFHPASTRTYGPIKELLSEENPPLYRETLVREYVARYYSVGLDGKKKTALADFRL

SEQ ID NO: 369 - DNA, 1170 bp, Zea mays
  CDS (1)..(1170)
atggatagtcttttccaatgcgataaaatcaaccgacatggcggcgatgctagactggaggcggaaccgcgcacgacaccaagctgccgcgccggactgctgcacgcaagcgcagcgcaggaccgaccgacctccgtaggcacgcacggcgccggcggcatggcggagcacctcctgtcgacggccgtgcacgacacgctgccggggagctacgtgcggccggagccggagcgcccgcgcctcgcggaggtcgtgaccggcgcgcgcatccccgtggtggacctgggcagccccgaccgcggcgcggtcgtggccgccgtcggcgacgcctgccgctcgcacggcttcttccaggtcgtcaaccacgggatacacgccgccctggtcgcggcggtgatggccgcggggcgcgtcttcttccggctgccccccgaggagaaggccaagctctactccgacgaccccgccaggaagatccggctgtccaccagcttcaacgtgcgcaaggagacggtgcacaactggcgcgactacctccgcctgcactgccatcccctcgacgagttcctgcccgattggccgtccaacccgcccgatttcaaggagaccatgggcacctactgcaaggaggtccgggagctcgggttcaggctgtacgccgcgatctcggagagcctgggcctagaggcgagctacatgaaggaggcgctgggcgagcaggagcagcacatggcggtcaacttctacccgccgtgcccggagccggagctcacctacggactcccggcgcacaccgaccccaacgcgctcaccatcctgctcatggacccggacgtcgccggcctgcaggtgctccacgccggccagtgggtcgccgtcaacccgcagcccggcgcgctcatcatcaacatcggcgaccagctgcaggcgctgagcaacgggcagtaccggagcgtgtggcaccgcgcggtggtgaactcggaccgggagcgcatgtccgtggcgtcgttcctgtgcccgtgcaaccacgtcgtgctcggccccgcgcggaagctcgtcaccgaggacaccccggccgtgtacaggaactacacgtacgacaagtactacgccaagttctggagcaggaacctggaccaggagcactgcctcgagctcttcagaacctag

SEQ ID NO: 370 - protein, 389 aa, Zea mays
MDSLFQCDKINRHGGDARLEAEPRTTPSCRAGLLHASAAQDRPTSVGTHGAGGMAEHLLSTAVHDTLPGSYVRPEPERPRLAEVVTGARIPVVDLGSPDRGAVVAAVGDACRSHGFFQVVNHGIHAALVAAVMAAGRVFFRLPPEEKAKLYSDDPARKIRLSTSFNVRKETVHNWRDYLRLHCHPLDEFLPDWPSNPPDFKETMGTYCKEVRELGFRLYAAISESLGLEASYMKEALGEQEQHMAVNFYPPCPEPELTYGLPAHTDPNALTILLMDPDVAGLQVLHAGQWVAVNPQPGALIINIGDQLQALSNGQYRSVWHRAVVNSDRERMSVASFLCPCNHVVLGPARKLVTEDTPAVYRNYTYDKYYAKFWSRNLDQEHCLELFRT

SEQ ID NO: 371 - DNA, 1125 bp, Zea mays
  CDS (1)..(1125)
atggctccaacgaccgccaccaaggacgacagtggctacggcgacgagcgccggcgcgagctgcaggcgttcgacgacacgaagctgggggtgaaaggtctggtggactccggcgtcaagtccatcccgtccatcttccaccacccgccggaagccctgagcgacataatttctccggcgcctctgccgccgtcgccgccctccggcgccgccatcccggtggtggacctctcggtgacgcggcgcgaggacctagtcgagcaggtgaggcacgcggccgggacggtgggcttcttctggctggtgaaccacggcgtggcggaggagctgatgggcggcatgctccgcggggtgcgccagttcaacgagggccccgtggaggcgaagcaggcgctctactccagggacctggctcgcaacctgcgcttcgcctccaacttcgacctcttcaaggccgctgcggccgactggcgcgacacgctcttctgcgaggtggctccgaacccgccgccgcgggaggagctgccggagccactgaggaacgtgatgctggagtacggcgcggcggtgacgaagctggcgcggttcgtgttcgagctgctgtccgagtccctcggcatgcccagcgaccacctgtacgagatggagtgcatgcagaacctgaacgtggtgtgccagtactacccgccgtgcccggagccgcaccgcaccgtgggcgtcaagaggcacacggaccctggcttcttcaccatcctcctgcaggacggcatgggcggcctgcaggtgcgcctcggcaacaacgggcagagcggcggctgctgggtggacatcgctccccggcctggggcgctcatggtcaacatcggtgatcttctgcagctcgtgaccaatgaccggttcaggagcgtggagcaccgggtgccagccaacaagagcagcgacacggcgagggtctccgtggcgtccttcttcaacacggacgtgaggaggtccgagaggatgtacggccccattccagaccccagcaagcccccgctgtacaggagcgtcagggcccgagacttcatcgcaaagttcaacaccataggactcgatggccgcgcgctcgaccacttcaggctctag

SEQ ID NO: 372 - protein, 374 aa, Zea mays
MAPTTATKDDSGYGDERRRELQAFDDTKLGVKGLVDSGVKSIPSIFHHPPEALSDIISPAPLPPSPPSGAAIPVVDLSVTRREDLVEQVRHAAGTVGFFWLVNHGVAEELMGGMLRGVRQFNEGPVEAKQALYSRDLARNLRFASNFDLFKAAAADWRDTLFCEVAPNPPPREELPEPLRNVMLEYGAAVTKLARFVFELLSESLGMPSDHLYEMECMQNLNVVCQYYPPCPEPHRTVGVKRHTDPGFFTILLQDGMGGLQVRLGNNGQSGGCWVDIAPRPGALMVNIGDLLQLVTNDRFRSVEHRVPANKSSDTARVSVASFFNTDVRRSERMYGPIPDPSKPPLYRSVRARDFIAKFNTIGLDGRALDHFRL

SEQ ID NO: 373 - DNA, 1125 bp, Zea mays
  CDS (1)..(1125)
atggcggactgcatgcaggagtggccggagcccgtcgtccgcgtgcaggcgctggccgagagcggcctgtccgtcatcccgcgctgctacgtcaagccgccgtgcgaccgccccgccgtgtccccggcggcggcaacgacagtccaggagaccacggagccctcggacatgagcattccggtcgtcgatctcggcgcgctgctggcggcggacggcggcgccgccgtcaccgaggccgtcgccgccgcgtgccgggagtggggcttcttccaggtggtcggccacggggtgcgccccgagctgttgcgcgcggcgcgggaggcctggcgcggcttcttccgccgcccgctcgcggagaggcagcgctacgccaactcgccccgcacgtacgagggctacggcagccgcctcggcgtccagaagggcgccgccctcgactggggcgactacttcttcctccacctcgcgccggaggcggccaagagcacgcccaagttctggccggccgtgcccggcaactgcaaggaggtgtccgaggagtacggacgcgaggtggtgcggctgtgcgagctgctgatgcgggtgatgtcagtgagcctagggctggacgaggcgcaccttcagcgggcgttcggcggggcgggctgctgcggcgccaccctgcgcgccaactactacccgcggtgcccgcagccggacctgacgctgggcctctccgcgcactcggacccgggcgtcctcaccgccctcctcgccgacgagcacgtccgcggcctgcaggtccgccgtagcgccggcgactgggtcgacgtgcgccccgtccgcgacgccttcatcgtcaacgtcggcgaccaagtccagataatgagcaactccgtgtacaagagcgtggagcaccgggtggtcgtgaacgccgaggaggagcgcatatccctcgccattttttacaaccccaagggcgacgtccccatctccccggcgccggagctggtcacggccgcgaagctgccaccgctctacccgacgatgaccttcgacgagtacaggctctacgtgaggagtaagggcgccaggggcaaggcgcagatcgaggctctcaagggccaggcatccccagaaaattaa

SEQ ID NO: 374 - protein, 374 aa, Zea mays
MADCMQEWPEPVVRVQALAESGLSVIPRCYVKPPCDRPAVSPAAATTVQETTEPSDMSIPVVDLGALLAADGGAAVTEAVAAACREWGFFQVVGHGVRPELLRAAREAWRGFFRRPLAERQRYANSPRTYEGYGSRLGVQKGAALDWGDYFFLHLAPEAAKSTPKFWPAVPGNCKEVSEEYGREVVRLCELLMRVMSVSLGLDEAHLQRAFGGAGCCGATLRANYYPRCPQPDLTLGLSAHSDPGVLTALLADEHVRGLQVRRSAGDWVDVRPVRDAFIVNVGDQVQIMSNSVYKSVEHRVVVNAEEERISLAIFYNPKGDVPISPAPELVTAAKLPPLYPTMTFDEYRLYVRSKGARGKAQIEALKGQASPEN

SEQ ID NO: 375 - DNA, 1011 bp, Zea mays
  CDS (1)..(1011)
atggcggagcacctcctgtcgacggccgtgcacgacacgctgccggggagctacgtgcggccggagccggagcgcccgcgcctcgcggaggtcgtgaccggcgcgcgcatccccgtggtggacctgggcagccccgaccgcggcgcggtcgtggccgccgtcggcgacgcctgccgctcgcacggcttcttccaggtcgtcaaccacgggatacacgccgccctggtcgcggcggtgatggccgcggggcgcgtcttcttccggctgccccccgaggagaaggccaagctctactccgacgaccccgccaggaagatccggctgtccaccagcttcaacgtgcgcaaggagacggtgcacaactggcgcgactacctccgcctgcactgccatcccctcgacgagttcctgcccgattggccgtccaacccgcccgatttcaaggagaccatgggcacctactgcaaggaggtccgggagctcgggttcaggctgtacgccgcgatctcggagagcctgggcctagaggcgagctacatgaaggaggcgctgggcgagcaggagcagcacatggcggtcaacttctacccgccgtgcccggagccggagctcacctacggactcccggcgcacaccgaccccaacgcgctcaccatcctgctcatggacccggacgtcgccggcctgcaggtgctccacgccggccagtgggtcgccgtcaacccgcagcccggcgcgctcatcatcaacatcggcgaccagctgcaggcgctgagcaacgggcagtaccggagcgtgtggcaccgcgcggtggtgaactcggaccgggagcgcatgtccgtggcgtcgttcctgtgcccgtgcaaccacgtcgtgctcggccccgcgcggaagctcgtcaccgaggacaccccggccgtgtacaggaactacacgtacgacgagtactacgccaagttctggagcaggaacctggaccaggagcactgcctcgagctcttcagaacctag

SEQ ID NO: 376 - protein, 336 aa, Zea mays
MAEHLLSTAVHDTLPGSYVRPEPERPRLAEVVTGARIPVVDLGSPDRGAVVAAVGDACRSHGFFQVVNHGIHAALVAAVMAAGRVFFRLPPEEKAKLYSDDPARKIRLSTSFNVRKETVHNWRDYLRLHCHPLDEFLPDWPSNPPDFKETMGTYCKEVRELGFRLYAAISESLGLEASYMKEALGEQEQHMAVNFYPPCPEPELTYGLPAHTDPNALTILLMDPDVAGLQVLHAGQWVAVNPQPGALIINIGDQLQALSNGQYRSVWHRAVVNSDRERMSVASFLCPCNHVVLGPARKLVTEDTPAVYRNYTYDEYYAKFWSRNLDQEHCLELFRT

SEQ ID NO: 377 - DNA, 22 bp, Artificial sequence
  primer
atggagtcatcacttccccaag

SEQ ID NO: 378 - DNA, 23 bp, Artificial sequence
  primer
tcagatcttgagatagagtaatc

SEQ ID NO: 379 - protein, 772 aa, Artificial sequence
  consensus sequence
  Variant (3)..(5): Xaa in position 3 to 5 is any amino acid
  Variant (6)..(6): Xaa in position 6 is any or no amino acid
  Variant (9)..(9): Xaa in position 9 is any amino acid
  Variant (12)..(12): Xaa in position 12 is any amino acid
  Variant (13)..(344): Xaa in position 13 to 344 is any or no amino acid
  Variant (346)..(347): Xaa in position 346 to 347 is any amino acid
  Variant (349)..(356): Xaa in position 349 to 356 is any amino acid
  Variant (357)..(392): Xaa in position 357 to 392 is any or no amino acid
  Variant (394)..(395): Xaa in position 394 to 395 is any amino acid
  Variant (398)..(408): Xaa in position 398 to 408 is any amino acid
  Variant (409)..(421): Xaa in position 409 to 421 is any or no amino acid
  Variant (423)..(426): Xaa in position 423 to 426 is any amino acid
  Variant (431)..(432): Xaa in position 431 to 432 is any amino acid
  Variant (436)..(450): Xaa in position 436 to 450 is any amino acid
  Variant (451)..(452): Xaa in position 451 to 452 is any or no amino acid
  Variant (454)..(454): Xaa in position 454 is any amino acid
  Variant (456)..(460): Xaa in position 456 to 460 is any amino acid
  Variant (461)..(463): Xaa in position 461 to 463 is any or no amino acid
  Variant (465)..(466): Xaa in position 465 to 466 is any amino acid
  Variant (467)..(467): Xaa in position 467 is any or no amino acid
  Variant (469)..(469): Xaa in position 469 is any amino acid
  Variant (471)..(475): Xaa in position 471 to 475 is any amino acid
  Variant (476)..(483): Xaa in position 476 to 483 is any or no amino acid
  Variant (485)..(486): Xaa in position 485 to 486 is any amino acid
  Variant (488)..(492): Xaa in position 488 to 492 is any amino acid
  Variant (493)..(498): Xaa in position 493 to 498 is any or no amino acid
  Variant (502)..(508): Xaa in position 502 to 508 is any amino acid
  Variant (510)..(516): Xaa in position 510 to 516 is any amino acid
  Variant (517)..(522): Xaa in position 517 to 522 is any or no amino acid
  Variant (524)..(526): Xaa in position 524 to 526 is any amino acid
  Variant (528)..(532): Xaa in position 528 to 532 is any amino acid
  Variant (534)..(539): Xaa in position 534 to 539 is any amino acid
  Variant (541)..(542): Xaa in position 541 to 542 is any amino acid
  Variant (543)..(546): Xaa in position 543 to 546 is any or no amino acid
  Variant (548)..(548): Xaa in position 548 is any amino acid
  Variant (551)..(551): Xaa in position 551 is any amino acid
  Variant (555)..(558): Xaa in position 555 to 558 is any amino acid
  Variant (559)..(559): Xaa in position 559 is any or no amino acid
  Variant (561)..(572): Xaa in position 561 to 572 is any amino acid
  Variant (573)..(577): Xaa in position 573 to 577 is any or no amino acid
  Variant (581)..(581): Xaa in position 581 is any amino acid
  Variant (584)..(584): Xaa in position 584 is any amino acid
  Variant (586)..(586): Xaa in position 586 is any amino acid
  Variant (589)..(589): Xaa in position 589 is any amino acid
  Variant (591)..(593): Xaa in position 591 to 593 is any amino acid
  Variant (595)..(595): Xaa in position 595 is any amino acid
  Variant (597)..(600): Xaa in position 597 to 600 is any amino acid
  Variant (602)..(602): Xaa in position 602 is any amino acid
  Variant (607)..(607): Xaa in position 607 is any amino acid
  Variant (608)..(610): Xaa in position 608 to 610 is any or no amino acid
  Variant (615)..(620): Xaa in position 615 to 620 is any amino acid
  Variant (621)..(629): Xaa in position 621 to 629 is any or no amino acid
  Variant (631)..(632): Xaa in position 631 to 632 is any amino acid
  Variant (634)..(634): Xaa in position 634 is any amino acid
  Variant (636)..(637): Xaa in position 636 to 637 is any amino acid
  Variant (641)..(642): Xaa in position 641 to 642 is any amino acid
  Variant (644)..(644): Xaa in position 644 is any amino acid
  Variant (647)..(647): Xaa in position 647 is any amino acid
  Variant (649)..(651): Xaa in position 649 to 651 is any amino acid
  Variant (652)..(680): Xaa in position 652 to 680 is any or no amino acid
  Variant (682)..(682): Xaa in position 682 is any amino acid
  Variant (683)..(685): Xaa in position 683 to 685 is any or no amino acid
  Variant (687)..(688): Xaa in position 687 to 688 is any amino acid
  Variant (692)..(698): Xaa in position 692 to 698 is any amino acid
  Variant (699)..(701): Xaa in position 699 to 701 is any or no amino acid
  Variant (703)..(703): Xaa in position 703 is any amino acid
  Variant (705)..(705): Xaa in position 705 is any amino acid
  Variant (707)..(707): Xaa in position 707 is any amino acid
  Variant (709)..(710): Xaa in position 709 to 710 is any amino acid
  Variant (711)..(728): Xaa in position 711 to 728 is any or no amino acid
  Variant (730)..(732): Xaa in position 730 to 732 is any amino acid
  Variant (734)..(737): Xaa in position 734 to 737 is any amino acid
  Variant (738)..(746): Xaa in position 738 to 746 is any or no amino acid
  Variant (748)..(753): Xaa in position 748 to 753 is any amino acid
  Variant (754)..(771): Xaa in position 754 to 771 is any or no amino acid
FDXXXXGVXGLXXXXXXXXXXXXXXXXXXXXXXXXXXXXXXXXXXXXXXXXXXXXXXXXXXXXXXXXXXXXXXXXXXXXXXXXXXXXXXXXXXXXXXXXXXXXXXXXXXXXXXXXXXXXXXXXXXXXXXXXXXXXXXXXXXXXXXXXXXXXXXXXXXXXXXXXXXXXXXXXXXXXXXXXXXXXXXXXXXXXXXXXXXXXXXXXXXXXXXXXXXXXXXXXXXXXXXXXXXXXXXXXXXXXXXXXXXXXXXXXXXXXXXXXXXXXXXXXXXXXXXXXXXXXXXXXXXXXXXXXXXXXXXXXXXXXXXXXXXXXXXXXXXXXXXXXXXXXXXXXXXXXXXXXXXXXXPXXFXXXXXXXXXXXXXXXXXXXXXXXXXXXXXXXXXXXXXXXXXXXXPXXDLXXXXXXXXXXXXXXXXXXXXXXXXAXXXXGFFQXXNHGXXXXXXXXXXXXXXXXXFXEXXXXXXXXKXXXYXRXXXXXXXXXXXXXNXXLXXXXXXXXXXXWRDXXXXXXXPXXXXXXXXXXXXXPXXXRXXXXXYXXXXXXLXXXXXXLXSEXLGLXXXXXLXXXXXXXXXXXXXXXXXYYPXCPXPXLTXGXXXHXDXXXXTXLLQDXXXXGGLQXXXXXXXXXXXXXXXWXXVXPXXGALXXNXGDXLXXXXXXXXXXXXXXXXXXXXXXXXXXXXXXXXNXXXXSXXHRVXXXXXXXXXXRXSXAXFXXXXXXXXXXXXXXXXXXXXPXXXLXXXXXXXXXXXXXYXXXXXXXXXXXXXXXXXXXXXXXXL

SEQ ID NO: 380 - protein, 27 aa, Artificial sequence
  protein pattern
  Variant (2)..(2): Xaa in position 2 is Phe or Tyr
  Variant (4)..(4): Xaa in position 4 is any or no amino acid
  Variant (7)..(7): Xaa in position 7 is Glu or Gln
  Variant (9)..(10): Xaa in position 9 to 10 is any amino acid
  Variant (12)..(12): Xaa in position 12 is any amino acid
  Variant (14)..(16): Xaa in position 14 to 16 is any amino acid
  Variant (18)..(18): Xaa in position 18 is any amino acid
  Variant (20)..(22): Xaa in position 20 to 22 is any amino acid
  Variant (23)..(23): Xaa in position 23 is Phe, Ile, Leu, Met or Val
  Variant (25)..(25): Xaa in position 25 is any amino acid
  Variant (26)..(26): Xaa in position 26 is any or no amino acid
YXPXCPXPXXTXGXXXHXDXXXXTXXL

SEQ ID NO: 381 - protein, 20 aa, Artificial sequence
  protein pattern
  Variant (2)..(2): Xaa in position 2 is Phe, Ile, Leu, Met or Val
  Variant (3)..(3): Xaa in position 3 is any amino acid
  Variant (4)..(4): Xaa in position 4 is Ala, Ile, Leu or Val
  Variant (5)..(8): Xaa in position 5 to 8 is any amino acid
  Variant (9)..(9): Xaa in position 9 is Asp, Glu, Gly or Asn
  Variant (11)..(11): Xaa in position 11 is Phe or Leu
  Variant (12)..(12): Xaa in position 12 is Ile, Leu, Met or Val
  Variant (13)..(13): Xaa in position 13 is any amino acid
  Variant (15)..(15): Xaa in position 15 is any amino acid
  Variant (18)..(18): Xaa in position 18 is any amino acid
  Variant (19)..(19): Xaa in position 19 is Ile, Leu, Met or Val
WXXXXXXXXAXXXNXGDXXQ

SEQ ID NO: 382 - protein, 16 aa, Artificial sequence
  protein pattern
  Variant (2)..(2): Xaa in position 2 is Ala, Cys, Ser or Val
  Variant (3)..(5): Xaa in position 3 to 5 is any amino acid
  Variant (9)..(9): Xaa in position 9 is any amino acid
  Variant (10)..(10): Xaa in position 10 is any or no amino acid
  Variant (12)..(12): Xaa in position 12 is any or no amino acid
  Variant (15)..(15): Xaa in position 15 is any amino acid
  Variant (16)..(16): Xaa in position 16 is Ile, Leu, Met or Val
AXXXXGFFXXVXNHXX

SEQ ID NO: 383 - protein, 14 aa, Artificial sequence
  protein pattern
  Variant (3)..(3): Xaa in position 3 is any amino acid
  Variant (6)..(6): Xaa in position 6 is any amino acid
  Variant (7)..(7): Xaa in position 7 is Ala, Asp or Glu
  Variant (8)..(8): Xaa in position 8 is Ala, Glu, Gly, Asn, Ser or Thr
  Variant (9)..(9): Xaa in position 9 is any amino acid
  Variant (10)..(10): Xaa in position 10 is Ala, Ile, Leu or Val
  Variant (11)..(12): Xaa in position 11 to 12 is any amino acid
  Variant (13)..(13): Xaa in position 13 is Ile, Leu or Val
GVXGLXXXXXXXXP

SEQ ID NO: 384 - DNA, 792 bp, Arabidopsis thaliana
  CDS (1)..(792)
atggcgtacagtgcgtgtttcctacaccagagcgcattggcttcatcagccgcacgatcatcatcttcctcctcatcccagcgtcacgtgtcgctctccaaacctgttcagatcatctgtaaagctcaacagtctcatgaagacgataactccgccgtctcccgccgtcttgctctcactctcctcgtcggcgccgctgctgttggttccaaagtatctcctgctgatgccgcctacggtgaagctgcaaacgtgtttgggaagccaaagacgaacacagacttcttgccatacaatggagatgggttcaaagtgcaggttccagcaaaatggaacccaagcaaagagattgagtatccaggacaagtccttaggttcgaagacaacttcgatgctactagcaatctcaatgtcatggtcactcctaccgacaagaagtccatcactgattacggttctcccgaagagttcctctctcaggttaattacctcctagggaaacaagcttacttcggtgagactgcctctgagggaggctttgacaacaatgcagtggcaacagcaaacattctggagtcatcatctcaggaagttggtgggaaaccctactattacttgtctgtgttgacaagaacggctgatggagacgaaggtgggaagcatcagctgatcacagcaaccgtgaatggagggaagctttacatctgcaaagcacaagctggagacaagaggtggttcaagggagccaggaaatttgtcgagagcgcagccacttctttcagtgttgcttga

SEQ ID NO: 385 - protein, 263 aa, Arabidopsis thaliana
MAYSACFLHQSALASSAARSSSSSSSQRHVSLSKPVQIICKAQQSHEDDNSAVSRRLALTLLVGAAAVGSKVSPADAAYGEAANVFGKPKTNTDFLPYNGDGFKVQVPAKWNPSKEIEYPGQVLRFEDNFDATSNLNVMVTPTDKKSITDYGSPEEFLSQVNYLLGKQAYFGETASEGGFDNNAVATANILESSSQEVGGKPYYYLSVLTRTADGDEGGKHQLITATVNGGKLYICKAQAGDKRWFKGARKFVESAATSFSVA

SEQ ID NO: 386 - DNA, 932 bp, Arabidopsis thaliana
  CDS (51)..(842)
ataacttaatcacacacaaggagagaaagagagaaagagagacagagataatggcgtacagtgcgtgtttcctacaccagagcgcattggcttcatcagccgcacgatcatcatcttcctcctcatcccagcgtcacgtgtcgctctccaaacctgttcagatcatctgtaaagctcaacagtctcatgaagacgataactccgccgtctcccgccgtcttgctctcactctcctcgtcggcgccgctgctgttggttccaaagtatctcctgctgatgccgcctacggtgaagctgcaaacgtgtttgggaagccaaagacgaacacagacttcttgccatacaatggagatgggttcaaagtgcaggttccagcaaaatggaacccaagcaaagagattgagtatccaggacaagtccttaggttcgaagacaacttcgatgctactagcaatctcaatgtcatggtcactcctaccgacaagaagtccatcactgattacggttctcccggagagttcctctctcaggttaattacctcctagggaaacaagcttacttcggtgagactgcctctgagggaggctttgacaacaatgcagtggcaacagcaaacattctggagtcatcatctcaggaagttggtgggaaaccctactattacttgtctgtgttgacaagaacggctgatggagacgaaggtgggaagcatcagctgatcacagcaacggtgaatggagggaagctttacatctgcaaagcacaagctggagacaagaggtggttcaagggagccaggaaatttgtcgagagcgcagccacttctttcagtgttgcttgagtgaaagcaacacaacgtaacaatgctctgcttgctttcttcatttgtctcttgtaaaaaatggaaaatgaaactgagcttttgagaacc

SEQ ID NO: 387 - protein, 263 aa, Arabidopsis thaliana
MAYSACFLHQSALASSAARSSSSSSSQRHVSLSKPVQIICKAQQSHEDDNSAVSRRLALTLLVGAAAVGSKVSPADAAYGEAANVFGKPKTNTDFLPYNGDGFKVQVPAKWNPSKEIEYPGQVLRFEDNFDATSNLNVMVTPTDKKSITDYGSPGEFLSQVNYLLGKQAYFGETASEGGFDNNAVATANILESSSQEVGGKPYYYLSVLTRTADGDEGGKHQLITATVNGGKLYICKAQAGDKRWFKGARKFVESAATSFSVA

SEQ ID NO: 388 - DNA, 1003 bp, Glycine max
  CDS (96)..(887)
acttttgatgcattatcacactcgacaatcctcaaaaaccactttcatcgcaactcagccagccagagcttaggcgagagagacagagacagaagatggcgtacagcgcgtgtttcctacatcagagcgcactggcctcctccgccgctcgatcatcatcttcctcctcatcccagcgctacgtttcactctccaaacccgtccaggtagtgtgtaaagctcaacagtctcatgaagacgataatcccgccgtctctcgccgtctcgccctcacactcctcgtcggcgccgccgccgttgattccaaagtgtctcctgccgatgccgcctatggtgaagctgcaaatgtgtttgggaagccaaagaaaaacacagacttcacgccatacaatggagatggattccaagtgcaggttccagctaaatggaacccaagcagagaggtagagtatccaggacaagtccttaggtacgaagacaactttgatgctactagcaatctcaatgtcatggtcactcctaccgacaagaagtccatcactgattacggctctcctgaagagttcctctctcaggtcaactaccttcttgggaaacaagcttacttcggtgagactgcctccgagggaggctttgacaacaatgcagtggcaacagcaaacattctggagacaaatgttcaggacgttggtgggaaaccatactactacttgtccgtgttgacaagaacggccgatggagatgaaggtggtaagcatcagctgatcacagccaccgtgaacggaggcaagctttacatctgcaaagcacaagctggagacaagaggtggttcaagggagccaacaaatttgtcgagaaagcagccacttctttcagtgttgcttgaatcaaagcaacacaaacagaacaatgctctgctttctttttttttcatttgtctcttgtaaaaaaatggaaaatgaaactaagcttttgagaaactatcaagatgatgatgatgct

SEQ ID NO: 389 - protein, 263 aa, Glycine max
MAYSACFLHQSALASSAARSSSSSSSQRYVSLSKPVQVVCKAQQSHEDDNPAVSRRLALTLLVGAAAVDSKVSPADAAYGEAANVFGKPKKNTDFTPYNGDGFQVQVPAKWNPSREVEYPGQVLRYEDNFDATSNLNVMVTPTDKKSITDYGSPEEFLSQVNYLLGKQAYFGETASEGGFDNNAVATANILETNVQDVGGKPYYYLSVLTRTADGDEGGKHQLITATVNGGKLYICKAQAGDKRWFKGANKFVEKAATSFSVA

SEQ ID NO: 390 - DNA, 1080 bp, Triticum aestivum
  CDS (55)..(840)
agaacatcctaatcgaaaaaaccagacacagagcttgagagagagagagagaagatggcgtacaacgcgtgtttcctacatcagagcgcactagcctcctcctccgtcgcaagatcatcaccttcctcatcatcccagcgctacgtgtcactctctaaactagtctgcaaagcacaacagactcaagaagacgatacctccaccgtctctcgccgtctcgctctcgcacttctcgtcggcgccgctgcggttggttccaaagtgtctcccgccgatgctgcctacggtgaagctgcaaatgtgtttgggaagccaaagacaaacacagacttcactgcgtacaatggagatggattccaagtgcaggtgccagctaagtggaacccaagcagagaggtagagtatccaggacaagtccttaggtacgaagacaactttgacgctactagcaatctcaatgtcatggtcactcctaccgacaagaagtccatcactgattacggttctcctgaagagttcctctctcaggtcaactatcttctcgggaaacaagcgtacttcggtgagactgcctctgagggaggctttgacaacaatgcagtggcaacagcaaacattctggagacaaacattcaggacgttggtgggaaaccatactattacttgtcggtgttgacaagaacagccgatggagatgaaggtggtaagcatcagctgatcacagccaccgtgaatggagggaagctttatatctgcaaagcacaagctggagacaagaggtggttcaagggagccaataaatttgtggagaaagcagccatttctttcagtgttgcttgattaaaaaagctgcacaacagaagaactatatgctctgcttgttgttatcttcatttgtctcttgtaaagaatggaaaaatgaaacttagcttctgagaactatcaagatggtgatgttacctttgcggctttttcaaaattatattcggtagatctttgctcattagtataatggttgctcaaactaaagacactgactcaagaaaaagctatagactaattctaaatccttgaaaacct

SEQ ID NO: 391 - protein, 261 aa, Triticum aestivum
MAYNACFLHQSALASSSVARSSPSSSSQRYVSLSKLVCKAQQTQEDDTSTVSRRLALALLVGAAAVGSKVSPADAAYGEAANVFGKPKTNTDFTAYNGDGFQVQVPAKWNPSREVEYPGQVLRYEDNFDATSNLNVMVTPTDKKSITDYGSPEEFLSQVNYLLGKQAYFGETASEGGFDNNAVATANILETNIQDVGGKPYYYLSVLTRTADGDEGGKHQLITATVNGGKLYICKAQAGDKRWFKGANKFVEKAAISFSVA

SEQ ID NO: 392 - DNA, 1023 bp, Zea mays subsp. mays
  CDS (102)..(884)
aaaacacgtcgcggcctcgctaacgcgcccgcgctagcgcgagtggtggcacccacgcatactcttctcccccccagtccggaccccggaggagccaagccatggcgtccacctcctgctgcctcctccaccagtcaaccgcccgcctcggcgcgtcgccgcgcctggccgccgccccgccgcgcagcgcccagctgctcgtctgcaaggcccggaagcaggaagccgccgcggaccagagcgacgtctcgcgccgcgccacgctcgcgctcctcgccggcgtcacggccgccgccggcgccaaggtgggtcccgccgccgcggcatacggagaagcagccaacgtgttcggcaagcccaaggcgagcacggagtacatcgcgtacagcggcgacggcttcaagctgctgatcccgtccaagtggaaccccagcaaggagcgggagttccccgggcaggtgctccgctacgaggacaacttcgacgccaacagcaacgtgtccgtcatcatccagcccacgtccaagaagaccatcgccgactacggctctcccgaggagttcctctcccaggtcgactacctgctcggcaggcaggcctacggcggcaagaccgactccgagggcgggttcgagaccggcgccgtggccaccgccaacgtcctggagagctccacccccgtgatcgacggcaagcagtactacgccgtgtccgtgctcaccaggacggcggacggcgacgagggcggcaagcaccagctcatcgcggccaccgtctccgacggcaagctctacatctgcaaggcgcaggccggcgacaagaggtggttcaagggcgccaggaagggagtcgagaaggccgcctcctccttcagcgtcgcatgatgatgtaattttatttcttcgatgggatgggatgcacgcactacgtagagagcttggctaggccaggcctggctgagcacgcttgtgtgttccttcgactgtacatgagaacaaagactaaggagagctccattcccgt

SEQ ID NO: 393 - protein, 260 aa, Zea mays subsp. mays
MASTSCCLLHQSTARLGASPRLAAAPPRSAQLLVCKARKQEAAADQSDVSRRATLALLAGVTAAAGAKVGPAAAAYGEAANVFGKPKASTEYIAYSGDGFKLLIPSKWNPSKEREFPGQVLRYEDNFDANSNVSVIIQPTSKKTIADYGSPEEFLSQVDYLLGRQAYGGKTDSEGGFETGAVATANVLESSTPVIDGKQYYAVSVLTRTADGDEGGKHQLIAATVSDGKLYICKAQAGDKRWFKGARKGVEKAASSFSVA

SEQ ID NO: 394 - DNA, 765 bp, Oryza sativa
  CDS (1)..(765)
atggcgtccacctcctgcttcctccaccagtccacggcccgcgtcgccgcgcgcgtcgcctccccgtccccggcgacacggacccacctcctcgtctgccgcgcccagaagcaggacgacgccgacgtctcccgccgcgcggcgctcgcgctgctggccggagcgacggcggcggtgggggtgaaggtggcgcccgccgccgcggcctacggcgaggcggcgaacgtgttcgggaagcccaagacgaacacggagttcatcgcctacagcggcgaggggttcaagctgctgatcccgtccaagtggaaccccagcaaggagcgcgagttccccggacaggtcctccgctacgaggacaacttcgacgccaacagcaacgtctccgtcataatcaaccccaccaccaagaagaccatcaccgagttcggctcccccgaggagttcctcgcccaggtcgacttcttgcttggcaagcaggcctactccggcaagacagattccgagggtgggtttgagtcggacgcggtggcgacggcgaacatcctggagagctcggcgccggtggtgggagggaagcagtactacagcgtaacggtgctgacgaggacggcggacggcgacgagggcggcaagcaccagctgatcacggccaccgtcaacgacggcaagctgtacatctgcaaggcgcaggccggcgacaagaggtggttcaagggcgccaggaagttcgtcgagagcgcagccagctccttcagcgtcgcatga

SEQ ID NO: 395 - protein, 254 aa, Oryza sativa
MASTSCFLHQSTARVAARVASPSPATRTHLLVCRAQKQDDADVSRRAALALLAGATAAVGVKVAPAAAAYGEAANVFGKPKTNTEFIAYSGEGFKLLIPSKWNPSKEREFPGQVLRYEDNFDANSNVSVIINPTTKKTITEFGSPEEFLAQVDFLLGKQAYSGKTDSEGGFESDAVATANILESSAPVVGGKQYYSVTVLTRTADGDEGGKHQLITATVNDGKLYICKAQAGDKRWFKGARKFVESAASSFSVA

SEQ ID NO: 396 - DNA, 705 bp, Oryza sativa
  CDS (1)..(705)
atggcgtccacctcctgcttcctccaccagtccacggcccgcgtcgccgcgcgcgtcgcctccccgtccccggcgacacggacccacctcctcgtctgccgcgcccagaagcaggacgacgccgacgtggcgcccgccgccgcggcctacggcgaggcggcgaacgtgttcgggaagcccaagacgaacacggagttcatcgcctacagcggcgaggggttcaagctgctgatcccgtccaagtggaaccccagcaaggagcgcgagttccccggacaggtcctccgctacgaggacaacttcgacgccaacagcaacgtctccgtcataatcaaccccaccaccaagaagaccatcaccgagttcggctcccccgaggagttcctcgcccaggtcgacttcttgcttggcaagcaggcctactccggcaagacagattccgagggtgggtttgagtcggacgcggtggcgacggcgaacatcctggagagctcggcgccggtggtgggagggaagcagtactacagcgtaacggtgctgacgaggacggcggacggcgacgagggcggcaagcaccagctgatcacggccaccgtcaacgacggcaagctgtacatctgcaaggcgcaggccggcgacaagaggtggttcaagggcgccaggaagttcgtcgagagcgcagccagctccttcagcgtcgcatga

SEQ ID NO: 397 - protein, 234 aa, Oryza sativa
MASTSCFLHQSTARVAARVASPSPATRTHLLVCRAQKQDDADVAPAAAAYGEAANVFGKPKTNTEFIAYSGEGFKLLIPSKWNPSKEREFPGQVLRYEDNFDANSNVSVIINPTTKKTITEFGSPEEFLAQVDFLLGKQAYSGKTDSEGGFESDAVATANILESSAPVVGGKQYYSVTVLTRTADGDEGGKHQLITATVNDGKLYICKAQAGDKRWFKGARKFVESAASSFSVA

SEQ ID NO: 398 - DNA, 798 bp, Glycine max
  CDS (1)..(798)
atggcctcgacacaatgctttttgcaccaccacgccctcaccactccagctagagcttcaacacagcgcctagttgtgagcaccaaaccaaaccacattgtttgcaaggcagcacagaagcaggttactgtccaagagggtgaggacactactactggccttgtctctcgcaggttggccctcactgtgctcattggtgctgctgctgttggctctaaggtggcacctgctgatgcagcctatggagaagctgccaatgtgtttggaaaaccaaagacaaacacagacttcctttcatacaatgggaatggattcaaactctcaattccctcaaagtggaacccaagcaaagaggttgagtacccaggtcaggttcttagatatgaggacaattttgattcaaccagcaatgttgctgtcatggtcactgcaactgacaagaagtccatcactgactatggttcacctgaggagttcctatctcaggtggattacttgcttggaaaacaagccttctttggccaaactgatgctgagggtggttttgattccaatgctgtggcaactgcaaatatcttggagagttcaacgcctgtcgttgatgggaaacagtactacagtttgactgtgttgacaaggacagctgatggagatgaaggtggcaagcaccagctgattacagcaacagtgaaagatggcaaactatacatttgcaaggctcaagctggagacaagaggtggtttaagggagcaagaagatttgtggagagcacagcaagttctttcagtgttgcctaa

SEQ ID NO: 399 - protein, 265 aa, Glycine max
MASTQCFLHHHALTTPARASTQRLVVSTKPNHIVCKAAQKQVTVQEGEDTTTGLVSRRLALTVLIGAAAVGSKVAPADAAYGEAANVFGKPKTNTDFLSYNGNGFKLSIPSKWNPSKEVEYPGQVLRYEDNFDSTSNVAVMVTATDKKSITDYGSPEEFLSQVDYLLGKQAFFGQTDAEGGFDSNAVATANILESSTPVVDGKQYYSLTVLTRTADGDEGGKHQLITATVKDGKLYICKAQAGDKRWFKGARRFVESTASSFSVA

SEQ ID NO: 400 - DNA, 795 bp, Glycine max
  CDS (1)..(795)
atggcttctacccaatgtttcttgcaccaccatgctcttaccacccctgccagtgccagatccccatcactacgcatcttggttagcaccaagcctaaccagcttgtttgcaaggcacagaaacaacaaacaccacaagaggatattgatgtcagcccaatctctcgccgtttagctctaactgtgctcattggtgctgctgctgttggctccaaagtccaacctgctgatgcagcctatggtgaagctgccaatgtgtttggaaagccaaagacagacacagatttcctgccatacaatggagatggattcaaactatctattccctcaaagtggaacccaagcaaagaagttgagtacacgggtcaggttgttagatatgaggataactttgactcaaccaccaacgtggttgtcaccatcactccaactgataagaagtccatcactgactatggttcacccgaagagttcctctctaaggtggattatttactaggaaaacaggccttcttcggcgaaacacaagctgagggtggttttgatccaaatgcagtggccacggctaacatcttagagactgcaacacctgtgattgacgggaagccatactattttttgtctgtgttgacaagaactgctgatggagatgaaggtggcaagcaccacataattagagcaactgtaaaagatggaaaactgttcatttgcaaggctcaagctggagacaagaggtggtttaagggagcaagaagatttgtggagagcgcagcaagttctttcagtgttgcttaa

SEQ ID NO: 401 - protein, 264 aa, Glycine max
MASTQCFLHHHALTTPASARSPSLRILVSTKPNQLVCKAQKQQTPQEDIDVSPISRRLALTVLIGAAAVGSKVQPADAAYGEAANVFGKPKTDTDFLPYNGDGFKLSIPSKWNPSKEVEYTGQVVRYEDNFDSTTNVVVTITPTDKKSITDYGSPEEFLSKVDYLLGKQAFFGETQAEGGFDPNAVATANILETATPVIDGKPYYFLSVLTRTADGDEGGKHHIIRATVKDGKLFICKAQAGDKRWFKGARRFVESAASSFSVA

SEQ ID NO: 402 - DNA, 789 bp, Glycine max
  CDS (1)..(789)
atggcatccacacaatgcttcttgcaccaccatgccctcaccactccaaccagagcttcatcacagcgcttagttgtgagcaccaaaccaaaccacattgtttgcaaggcacaaaagcaggttgtccaagagggtgaggacactactaacattgtctctcgcaggttggccctcactgttctcattggtgctgctgctgttggctctaaggttgcacctgctgatgctgcctatggagaagctgccaatgtgtttggaaagccaaagacaaacactgacttccttccatacaatggggatggattcaaactctcaattccctcaaagtggaacccaagcaaagaggttgagtacccaggtcaggttcttagatatgaggacaattttgactcaaccagcaatgttgctgtcatggtcactgcaactgacaagaagtccatcactgactatggttcacctgaggagttcctatctcaggtggattacttgcttggaaaacaagccttctttggccaaactgatgctgagggtggttttgattccaatgctgtggcaactgcaaacatcttggagagttcaacgcctgtcattgatgggaaacagtactacagtttgactgtgttgacaaggacagctgatggagatgaaggtggcaagcaccagctgattgcagcaactgtgaaagatggcaaactatacatttgcaaggctcaagctggagacaagagatggtttaagggagcaagaagatttgtggagagcacagcaagttctttcagtgttgcctaa

SEQ ID NO: 403 - protein, 262 aa, Glycine max
MASTQCFLHHHALTTPTRASSQRLVVSTKPNHIVCKAQKQVVQEGEDTTNIVSRRLALTVLIGAAAVGSKVAPADAAYGEAANVFGKPKTNTDFLPYNGDGFKLSIPSKWNPSKEVEYPGQVLRYEDNFDSTSNVAVMVTATDKKSITDYGSPEEFLSQVDYLLGKQAFFGQTDAEGGFDSNAVATANILESSTPVIDGKQYYSLTVLTRTADGDEGGKHQLIAATVKDGKLYICKAQAGDKRWFKGARRFVESTASSFSVA

SEQ ID NO: 404 - DNA, 1015 bp, Glycine max
  CDS (45)..(824)
ctcacgcacagtcctgcctaagctaagctaaacagcagcgagcaatggcgtccacctcctgcttcctccaccagtccaccgcgcgcctggccgcctcggcgcgccctgcgcccgccgtcgggcgcacccagcttttcgtctgcaaggcgcagaagaatgacgaggctgcatctgacgctgccgtcgtcaccagccggcgcgccgcgctgtccctcctcgccggtgccgccgccatcgccgtcaaggtctcccccgccgccgccgcctacggagaagcagccaacgtgttcggcaaggcgaagaagaacacggacttcgtggcgtacagcggcgaggggttcaaactgatgatcccggccaagtggaaccccagcaaggagcgtgagttccctgggcaggtgctccgctacgaggacaacttcgacgccaccagcaacctctccgttataatcaaccccactaccaagaagaccatcaccgactacggttcccctgaggagttcctctcccaggtcggcttcctcctcggccagcagtcctacggtggcaagaccgactccgagggtgggttcgagtcagacgctgtggcgacggcgaacgtgctggagagctcggcgccggtggtggacggtaagcagtactacagcataacggtgctcacgaggaccgcggacggagacgagggagggaagcaccagctcatcaccgccaccgtcgccgacggcaagctctacgtctgcaaggcgcaagccggagacaagaggtggttcaagggcgccaagaagttcgtcgagaacgccgcaggatccttcagcgtcgcataaatatacacgaccgaccggcgagtttaatggaaatttcctcagggatgcaccatgtagagaccgatcgagggcatgcatgtgtgtttctttgatttgtacatgaggatggatgaactaagaggtcgatttccctcaaggattcatgtgtgcacaatgattaagaaatcttagtaataatgtttcatttttgc

SEQ ID NO: 405 - protein, 259 aa, Glycine max
MASTSCFLHQSTARLAASARPAPAVGRTQLFVCKAQKNDEAASDAAVVTSRRAALSLLAGAAAIAVKVSPAAAAYGEAANVFGKAKKNTDFVAYSGEGFKLMIPAKWNPSKEREFPGQVLRYEDNFDATSNLSVIINPTTKKTITDYGSPEEFLSQVGFLLGQQSYGGKTDSEGGFESDAVATANVLESSAPVVDGKQYYSITVLTRTADGDEGGKHQLITATVADGKLYVCKAQAGDKRWFKGAKKFVENAAGSFSVA

SEQ ID NO: 406 - DNA, 783 bp, Zea mays
  CDS (1)..(783)
atggcgtccacctcctgctgcctcctccaccagtccaccgcccgcctcggcgcgtcgccgcgcctggccgccgccccgccgcgcagcgcccagctgctcgtctgcaaggcccggaagcaggacgccgccgcggaccagagcgacgtctcgcgccgcgccgcgctcgcgctcctcgccggcgtcacggccgccgccggcgccaaggtgggtcccgccgccgcggcatacggagaagcagccaacgtgttcggcaagcccaaggcgagcacggagtacatcgcgtacagcggcgacggcttcaagctgctgatcccgtccaagtggaaccccagcaaggagcgggagttccccgggcaggtgctccgctacgaggacaacttcgacgccaacagcaacgtgtccgtcatcatccagcccacgtccaagaagaccatcgccgactacggctctcccgaggagttcctctcccaggtcgactacctgctcggcaggcaggcctacggcggcaagaccgactccgagggcgggttcgagaccggcgccgtggccaccgccaacgtcctggagagctccacccccgtgatcgacggcaagcagtactacgccgtgtccgtgctcaccaggacggcggacggcgacgagggcggcaagcaccagctcatcgcggccaccgtctccgacggcaagctctacatctgcaaggcgcaggccggcgacaagaggtggttcaagggcgccaggaagggagtcgagaaggccgccgcctccttcagcgtcgcatga

SEQ ID NO: 407 - protein, 260 aa, Zea mays
MASTSCCLLHQSTARLGASPRLAAAPPRSAQLLVCKARKQDAAADQSDVSRRAALALLAGVTAAAGAKVGPAAAAYGEAANVFGKPKASTEYIAYSGDGFKLLIPSKWNPSKEREFPGQVLRYEDNFDANSNVSVIIQPTSKKTIADYGSPEEFLSQVDYLLGRQAYGGKTDSEGGFETGAVATANVLESSTPVIDGKQYYAVSVLTRTADGDEGGKHQLIAATVSDGKLYICKAQAGDKRWFKGARKGVEKAAASFSVA

SEQ ID NO: 408 - DNA, 1126 bp, Zea mays
  CDS (142)..(924)
  misc_feature (16)..(16): n is a, g, c or t
gccggccgggcttcanaaaaaagagggcctccggccggccaaaacacgtcgcggcctcgctagcgcgcccgcgctagcgcgagtggtggcacccacgcatactcttctcccccccagtccggaccccggaggagccaagccatggcgtccacctcctgctgcctcctccaccagtcaaccgcccgcctcggcgcgtcgccgcgcctggccgccgccccgccgcgcagcgcccagctgctcgtctgcaaggcccggaagcaggaagccgccgcggaccagagcgacgtctcgcgccgcgccgcgctcgcgctcctcgccggcgtcacggccgccgccggcgccaaggtgggtcccgccgccgcggcatacggagaagcagccaacgtgttcggcaagcccaaggcgagcacggagtacatcgcgtacagcggcgacggcttcaagctgctgatcccgtccaagtggaaccccagcaaggagcgggagttccccgggcaggtgctccgctacgaggacaacttcgacgccaacagcaacgtgtccgtcatcatccagcccacgtccaagaagaccatcgccgactacggctctcccgaggagttcctctcccaggtcgactacctgctcggcaggcaggcctacggcggcaagaccgactccgagggcgggttcgagaccggcgccgtggccaccgccaacgtcctggagagctccacccccgtgatcgacggcaagcagtactacgccgtgtccgtgctcaccaggacggcggacggcgacgagggcggcaagcaccagctcatcgcggccaccgtctccgacggcaagctctacatctgcaaggcgcaggccggcgacaagaggtggttcaagggcgccaggaagggagtcgagaaggccgcctcctccttcagcgtcgcatgatgatgtaattttatttcttcgatgggatgggatgcacgcactacgtagagagcttggctaggccaggcctggctgagcacgcttgtgtgttccttcgactgtacatgagaacaaagactaaggagagctccattcccgtacaaaaaaaaaaaaaaaaaaaccggccgcccacgcgaaaaaaaaaaaaaaaaagggcggccgc

SEQ ID NO: 409 - protein, 260 aa, Zea mays
MASTSCCLLHQSTARLGASPRLAAAPPRSAQLLVCKARKQEAAADQSDVSRRAALALLAGVTAAAGAKVGPAAAAYGEAANVFGKPKASTEYIAYSGDGFKLLIPSKWNPSKEREFPGQVLRYEDNFDANSNVSVIIQPTSKKTIADYGSPEEFLSQVDYLLGRQAYGGKTDSEGGFETGAVATANVLESSTPVIDGKQYYAVSVLTRTADGDEGGKHQLIAATVSDGKLYICKAQAGDKRWFKGARKGVEKAASSFSVA

SEQ ID NO: 410 - DNA, 920 bp, Zea mays
  CDS (45)..(821)
atagtgctaggaaagtgagtgagagaaagagatcacatagcagaatggcttctactcaatgtttcttgcaccaccatgctcttaccacccctgccagatccccatcacaacgcatcatggttagcaccaagcctaaccagcttgtttgcaaggcacagaagcaagaggatattgatgtcagcccaatctctcgccggttagctctaaccgtgctcattggtgctgctgctgttggctccaaagtccaacctgctgatgcagcttatggggaagctgccaatgtgtttggaaagccaaagacagacacagatttcctgccatacaatggagatggattcaaactatcgattccctcaaagtggaacccaagcaaagaggttgagtacacaggtcaggttgttagatatgaggataactttgattcaaccaccaacgtggttgtcaccatcactccgactgataagaagtctatcactgactatggttcacccgaagagttcctctctaaggtggattatttactaggaaaacaggccttcttcggcgaaacacaagccgagggtggttttgatccaaatgcggtggccacggctaacatcttagagacggcaacacctgtgattgatgggaagccgtactattttctgtctgtgttgacaaggactgctgatggagatgaaggtggcaagcaccacataattagagcaactgtaaaagatggaaaactgttcatttgcaaggctcaagctggagacaagaggtggttcaagggagcaagaagatttgtggagagtgcagcaagttctttcagtgttgcttaaaaatcttcaataatagctggttatatatatctgctatgtgtaaatctaccttaagtgctatctatgtttgaagttgtctaaaaaaaaaaaaaaaaaaaa

SEQ ID NO: 411 - protein, 258 aa, Zea mays
MASTQCFLHHHALTTPARSPSQRIMVSTKPNQLVCKAQKQEDIDVSPISRRLALTVLIGAAAVGSKVQPADAAYGEAANVFGKPKTDTDFLPYNGDGFKLSIPSKWNPSKEVEYTGQVVRYEDNFDSTTNVVVTITPTDKKSITDYGSPEEFLSKVDYLLGKQAFFGETQAEGGFDPNAVATANILETATPVIDGKPYYFLSVLTRTADGDEGGKHHIIRATVKDGKLFICKAQAGDKRWFKGARRFVESAASSFSVA

SEQ ID NO: 412 - DNA, 1084 bp, Brassica napus
  CDS (73)..(864)
acaaccctcaaaagtcaaaacacacttccatcataaaccagagagagaaaaagaaaaggagagagagagaaaatggcgtacagcgcgtgtttcctacaccagagcgcactagcctcctccgccgcacgatcatcatcttccaactcatcccagcgccacttgtccctctccaaacccgtccagatagtgtgtaaagcacaacagcaccatgaagacgataactccgccgtctctcgccgtctcgctctcacactcttggtcggcggcgccgccgttggttccaaagtgtctcccgctgatgccgcctacggtgaagctgcaaatgtgtttgggaagccaaagaagaacacagacttcactgcatacagtggagatggattcatcgtgcaggtgccagctaaatggaacccaagcagagaggtagagtatccaggacaagtccttaggtacgaagacaactttgacgccactagcaatctcaatgtcatggtcactcctaccgacaagaagtccatcactgattacggctctcctgaagagttcctctctcaggtcaactaccttcttgggaaacaagcttacttcggtgagactgcctccgagggaggctttgacaacaatgcagtggcaacagcaaacattttggagacaaatgttcaggacgttggtgggaaaccatactactacttgtccgtgttgacaagaacggccgatggagatgaaggtggtaagcatcagctgatcacagcccccgtgaacggaggcaagctttacatttgcaaagcacaagctggagacaagaggtggttcaagggagccaacaaatttgtcgagaaagcagccacttctttcagtgttgcttgaatcaaagcaacacaaacagaacaatgctctgctttctttttttttcccccgtctcttgtaaaaaaatggaaaatgaaactaagcttttgagaaactatcaagatgatgatgatgctatatctttgctatagactagctttatatgcttgatcaaaaaaattgaatttggtaaaaaaaaaaaaaaaaaaaaaaaaaaaaaaaaaaaaaaaagggcggccgc

SEQ ID NO: 413 - protein, 263 aa, Brassica napus
MAYSACFLHQSALASSAARSSSSNSSQRHLSLSKPVQIVCKAQQHHEDDNSAVSRRLALTLLVGGAAVGSKVSPADAAYGEAANVFGKPKKNTDFTAYSGDGFIVQVPAKWNPSREVEYPGQVLRYEDNFDATSNLNVMVTPTDKKSITDYGSPEEFLSQVNYLLGKQAYFGETASEGGFDNNAVATANILETNVQDVGGKPYYYLSVLTRTADGDEGGKHQLITAPVNGGKLYICKAQAGDKRWFKGANKFVEKAATSFSVA

SEQ ID NO: 414 - DNA, 943 bp, Zea mays
  CDS (63)..(854)
aaaaaccactttcatcgcaactcagccagccagagcttaggcgagagagacagagacagaagatggcgtacagcgcgtgtttcctacatcagagcgcactggcctcctccgccgctcgatcatcatcttcctcctcatcccagcgctacgtttcactctccaaacccgtccaggtagtgtgtaaagctcaacagtctcatgaagacgataatcccgccgtctctcgccgtctcgccctcacactcctcgtcggcgccgccgccgttggttccaaagtgtctcctgccgatgccgcctatggtgaagctgcaaatgtgtttgggaagccaaagaaaaacacagacttcacgccatacaatggagatggattccaagtgcaggttccagctaaatggaacccaagcagagaggtagagtatccaggacaagtccttaggtacgaagacaactttgatgctactagcaatctcaatgtcatggtcactcctaccgacaagaagtccatcactgattacggctctcctgaagagttcctctctcaggtcaactaccttcttgggaaacaagcttacttcggtgagactgcctccgagggaggctttgacaacaatgcagtggcaacagcaaacattctggagacaaatgttcaggacgttggtgggaaaccatactactacttgtccgtgttgacaagaacggccgatggagatgaaggtggtaagcatcagctgatcacagccaccgtgaacggaggcaagctttacatctgcaaagcacaagctggagacaagaggtggttcaagggagccaacaaatttgtcgagaaagcagccacttctttcagtgttgcttgaatcaaagcaacacaaacagaacaatgctctgctttctttttttttcatttgtctcttgtaaaaaaatggaaaatgaaactaagcttttg

SEQ ID NO: 415 - protein, 263 aa, Zea mays
MAYSACFLHQSALASSAARSSSSSSSQRYVSLSKPVQVVCKAQQSHEDDNPAVSRRLALTLLVGAAAVGSKVSPADAAYGEAANVFGKPKKNTDFTPYNGDGFQVQVPAKWNPSREVEYPGQVLRYEDNFDATSNLNVMVTPTDKKSITDYGSPEEFLSQVNYLLGKQAYFGETASEGGFDNNAVATANILETNVQDVGGKPYYYLSVLTRTADGDEGGKHQLITATVNGGKLYICKAQAGDKRWFKGANKFVEKAATSFSVA

SEQ ID NO: 416 - DNA, 786 bp, Arabidopsis thaliana
  CDS (1)..(786)
atggcgtacagcccgagcttcttacaccagagtgcacttgcctcctctgccggacgatcatcatcttcatcttcatcgtcgtttcgtcatgtgtccctctcgagacccgtccatttagtatgtagagctcaacagtctcaggaaaacaataactctgctgttttccgccgtcttgcccttaccttactcgttggtgctgcagccatcggatccaaagtctctcctgcgccgcctatggtgaagccgctaatgtgtttgccaaagaagaacacagatttcctgccatacacaggagaaggattcaaaatccagatcccatcaaagtggaacccaagtaaagaaattgagtatccaggacaagtactaagattcgaggacaactttgacgccaccagcaatgtctctgtcatgatcactcctacagacaagaaatccatcactgattacggttctcctgaacagttcctctctcaggtgaattatctcctcgggaagcaagcttacgtcggcgaaacagcctctgagggagggtttgatgcaaatgcagtagcaactgcaaacattttggaaacatctacacaagaaatcggagggaaagaatactattacttgtcggttctgacaagaacagctgatggagatgaaggtgggaagcaccaactgataacagccactgtgaatggtggaaagctttacatttgcaaagctcaagcaggagacaagaggtggttcaaaggagctaggaagttcgttgagaatgctgctacgtccttcagtgttgcttga

SEQ ID NO: 417 - protein, 261 aa, Arabidopsis thaliana
MAYSPSFLHQSALASSAGRSSSSSSSSFRHVSLSRPVHLVCRAQQSQENNNSAVFRRLALTLLVGAAAIGSKVSPAPPMVKPLMCLPKKNTDFLPYTGEGFKIQIPSKWNPSKEIEYPGQVLRFEDNFDATSNVSVMITPTDKKSITDYGSPEQFLSQVNYLLGKQAYVGETASEGGFDANAVATANILETSTQEIGGKEYYYLSVLTRTADGDEGGKHQLITATVNGGKLYICKAQAGDKRWFKGARKFVENAATSFSVA

SEQ ID NO: 418 - DNA, 807 bp, Physcomitrella patens subsp. patens
  CDS (1)..(807)
atgtcgtgcaccgcagcgctgtcgtctggattcgccgtaaagtgcgcctccctggcgtgggccaagagtggcatctccggcgcctcggtcacctttgcggccccctccgtctctaccgttgtggccaggagctctgtcgttagatcatgcaggggtgacgagagtgagaccgtgagtcgccgcgcggcgctcgccttggttgctggtgtagtcgctgccagcgcgaggatcgcgcctgccaatgctgcgtatggagagagcgctaatgtttttggtgcccccaagcaatctactggcttctccccattcaccggcgatggcttttccctagatattccctcgaagtggaatcccagtaaagaaaaggaattccccggaacagtgctgagatttgaagataacttcgacgctaccaacaatctgtttgtgtctattacccccgccagtaagggcagcataacagaatatggatctccagagaagtttttggatgaggtctcctatctgttcgggaagcaagcctacaatggcaagactgcatccgaaggaggatttcagaacaattctgttgcaactgcagcgattctcgaggcgaaatcagtggaattaaaaggcagaccctactacaagttgagtgtgctcactagaaccgctgacggagatgaaggaggcaagcatcagctgatcgcagccactgtgaaggatggtaacctgtacatgttgaaggctcaagccggtgacaagagatggttcaagggtgtaaagaaattcgtagagggtgcatggaacacattcactgtggcttag

SEQ ID NO: 419 - protein, 268 aa, Physcomitrella patens subsp. patens
MSCTAALSSGFAVKCASLAWAKSGISGASVTFAAPSVSTVVARSSVVRSCRGDESETVSRRAALALVAGVVAASARIAPANAAYGESANVFGAPKQSTGFSPFTGDGFSLDIPSKWNPSKEKEFPGTVLRFEDNFDATNNLFVSITPASKGSITEYGSPEKFLDEVSYLFGKQAYNGKTASEGGFQNNSVATAAILEAKSVELKGRPYYKLSVLTRTADGDEGGKHQLIAATVKDGNLYMLKAQAGDKRWFKGVKKFVEGAWNTFTVA

SEQ ID NO: 420 - DNA, 810 bp, Physcomitrella patens subsp. patens
  CDS (1)..(810)
atggcgtgtgcggcgtgcgtgtcgtctggactggtcgtaaagagctctacctctctcgcttcggccaagagcgccatcaatggcgcctccgtgactgtggctgccccccgcgtggcccccgttgccgtccgcagccttgtagtgcgcgcttctaagggtgaggagggtgagacctttagccgtcgcgctgcgcttgccctcgtcgctggcgtccttgctgccggtgccaaggttgggtctgccaatgccgcctacggagagagcgccaatgtcttcggtgctcccaagatttccaccgggttcacccccttcgctggaaacggttttactctggatgttccctccaaatggaacccaagcaaggagcaggaattccccgggactgttgtgagattcgaagataacttcgatgccaccaacaacctcttcgtgtctattacccctgccacgaagggatccatcaccgaatacggcccacctgagaaattcttggatgaggtatcattcctcttcgggaagcaagcttattcaggaaagactgcctctgagggtggtttcgttaacaacgctgttgctactgccgctgtccttgaggccaactctgtggacatcaacggaaggccctactacaagctcagcgtcctgacccgcacagccgacggagatgaaggaggcaagcaccagctgatcgctgcgacagtgaaagacggccagctttacctcttcaaggctcaagctggtgacaagaggtggttcaagggtgtgaagaagttcgttgagggagcctggaacaccttcaacgtcgcctag

SEQ ID NO: 421 - protein, 269 aa, Physcomitrella patens subsp. patens
MACAACVSSGLVVKSSTSLASAKSAINGASVTVAAPRVAPVAVRSLVVRASKGEEGETFSRRAALALVAGVLAAGAKVGSANAAYGESANVFGAPKISTGFTPFAGNGFTLDVPSKWNPSKEQEFPGTVVRFEDNFDATNNLFVSITPATKGSITEYGPPEKFLDEVSFLFGKQAYSGKTASEGGFVNNAVATAAVLEANSVDINGRPYYKLSVLTRTADGDEGGKHQLIAATVKDGQLYLFKAQAGDKRWFKGVKKFVEGAWNTFNVA

SEQ ID NO: 422 - DNA, 807 bp, Physcomitrella patens subsp. patens
  CDS (1)..(807)
atggcgtgcatagcggctgtgtcgtctggacttgtcgtcaaaggtgcctccctggcttcagccaaaagtggcgtctctggtgcgtccgtcaccgttgctgctccctgcgtcggccccgttgcatccaggagtgtcaccgtgagagcctctaagggtgaagagagtgagatcgtgagtcgtcgaacggcgcttgctttggttgccggtgtcgttgccgctggagccaggatcgcacccgccaatgctgcctacggtgaaagtgccaatgtgttcggtgctcccaagcaatccactggcttcaacccctacagcggcaatggattctctctggagattccgtctaagtggaaccccagcaaggaaaaagagtttcccggaacagtgttgagatatgaggacaactttgattccaccactaacttgtttgtgtccattacccctgcaaccaagggaagcatcactgaatacggccctccagagaaattcttggatgaggtctcttaccttttcggaaagcaagcttacagtggtaagaccgcttccgagggaggctttgagaacaacgccgttgcaactgcagcagtacttgaagctaactcaatggaggtgaatggaagaccttactacaagctcagcgtactcacacgtactgctgatggagacgaaggaggcaagcatcagttgatcgccgctaccgtgaaggacgggaacttgtacttgtttaaggcccaagctggtgataagagatggttcaagggtgtgaagaaattcgtggagggatcatggaactcattcaccgtggcttag

SEQ ID NO: 423 - protein, 268 aa, Physcomitrella patens subsp. patens
MACIAAVSSGLVVKGASLASAKSGVSGASVTVAAPCVGPVASRSVTVRASKGEESEIVSRRTALALVAGVVAAGARIAPANAAYGESANVFGAPKQSTGFNPYSGNGFSLEIPSKWNPSKEKEFPGTVLRYEDNFDSTTNLFVSITPATKGSITEYGPPEKFLDEVSYLFGKQAYSGKTASEGGFENNAVATAAVLEANSMEVNGRPYYKLSVLTRTADGDEGGKHQLIAATVKDGNLYLFKAQAGDKRWFKGVKKFVEGSWNSFTVA

SEQ ID NO: 424 - DNA, 780 bp, Vitis vinifera
  CDS (1)..(780)
atggcctccacagcatgcttcctccaccaccacgccctctccacccccacaagagtgtcttcacagcgccaactcccctccctcagaccctcccagctagtctgccgtgcccaaaagcaggctgccaatgaagacgatggcgccgccgtctcccgccgcttggccctcaccgtcctcattggtgctgctgccattggcaccaaggtcaaccctgctgatgccgcctatggtgaagctgccaatgtttttggcaaaccgaagacgaacaccgacttcttgccctacaacggagagggtttcaaattgtcgataccatcaaagtggaatccaagcaaagagagggaattcccaggacaggtcctgagatatgaggacaacttcgactccaacagcaatgtctccgtcataatcactccaactgacaagaaatccatcactgactatggttcacccgaagagttcctctctaaagtggactttttgctggggaaacaagccttctttggcaatgccaatgagggtggtttcgacgcagatgcggttgcaacagcaaacatactggagagttcaaccacaacagttggtgggaaaccatactacaccatcacggtgttgacgaggactgctgacggagatgaaggtgggaaacaccagctaattactgctgctgtggcggacggaaagctctacatttgcaaggtacaggctggggacaagagatggtttaagggagcaaggaagtacgttgagagcactgcaagttccttcagtattgcttaa

SEQ ID NO: 425 - protein, 259 aa, Vitis vinifera
MASTACFLHHHALSTPTRVSSQRQLPSLRPSQLVCRAQKQAANEDDGAAVSRRLALTVLIGAAAIGTKVNPADAAYGEAANVFGKPKTNTDFLPYNGEGFKLSIPSKWNPSKEREFPGQVLRYEDNFDSNSNVSVIITPTDKKSITDYGSPEEFLSKVDFLLGKQAFFGNANEGGFDADAVATANILESSTTTVGGKPYYTITVLTRTADGDEGGKHQLITAAVADGKLYICKVQAGDKRWFKGARKYVESTASSFSIA

SEQ ID NO: 426 - DNA, 789 bp, Populus trichocarpa
  CDS (1)..(789)
atggcctccactgcatgcttcttgcaccaccatgcactaaccactcctgccagatcaacctcatcatcacagcgccaagtggttaacctcaagcccgcccagctggtttgcagggcacagaagcaggcagtacaggaagaggatgacggtgttgtgtctcgtagattggcactcactgtgctcattggtgctgctgcccttggctcaaaggttgctcccgctgatgctgcctatggtgaatctgccaatattttcgggaagccaaagacaaacacagacttcttgccctacaatggagatggattcaagttgtcagttccagcaaaatggaatccaagcaaagagagagagttccctggtcaggttctgagatatgaggacaattttgatgccaccagcaacctttctgtcatggtcaccccaactgacacgaaatccatcgccgactacggttcccctgaggaattcctctcgaaggtggattacttgcttggaaaacaatcctccttgtttgcgacttcatctgagggtggtttcgacaccaataccgtagcaacggctaacatattggagacctcaactccggtgatcgatgggaaacaatattacttcttgtcagtgctgacaaggactgctgatggagatgaaggtggcaagcaccaacttatcacagccactgtgaaagatggtaagctttacatttgcaaggcacaagctggagacaagagatggttcaagggagcaagaaagttcgtggagagcgctgcaagttctttcagtgttgcttaa

SEQ ID NO: 427 - protein, 262 aa, Populus trichocarpa
MASTACFLHHHALTTPARSTSSSQRQVVNLKPAQLVCRAQKQAVQEEDDGVVSRRLALTVLIGAAALGSKVAPADAAYGESANIFGKPKTNTDFLPYNGDGFKLSVPAKWNPSKEREFPGQVLRYEDNFDATSNLSVMVTPTDTKSIADYGSPEEFLSKVDYLLGKQSSLFATSSEGGFDTNTVATANILETSTPVIDGKQYYFLSVLTRTADGDEGGKHQLITATVKDGKLYICKAQAGDKRWFKGARKFVESAASSFSVA

SEQ ID NO: 428 - DNA, 789 bp, Populus trichocarpa
  CDS (1)..(789)
atggcctccacttcatgcttcttgcaccaccatgcactaaccactcctgctagatcaaccccatcatcacaacgccaagtggctaacctcaagcccacccagctggcttgcagagcccaaaagcaggcagtacaggaggaggataatggtgctgtgtctcgcagattggctctcacagtgctcattggtgctgctgcccttggctccaaggtagctcctgctgatgctgcctatggtgaatctgccaatattttcgggaagccaaagacagacacagatttcttgccctacaatggagatggattcaagttgtcagttccatcaaaatggaatccaagcaaggagagagagttccctggtcaggttcttagatacgaggacaacttcgatgccaccagcaacgtttctgtcatggtcatcccaaccgataagaaatccatcaccgactacggttcccctgaggaattcctctccaaggtggatttcttgcttggaaaacaatcctccttgtttgcaaccgcatctgagggtggtttcgaccccaataccgtggcaacagctaacatattggagacatcaactccagtggttggtgggaagcaatatttcttcttgtcagtactgacaaggactgctgatggagatgaaggtggcaagcaccaactgatcacagccactgtgaaagatggcaagctttacatttgcaaggcacaagctggagacaagaggtggttcaagggagcaagaaagttcgtggagagcactgcaagttctttcagtgttgcttaa

SEQ ID NO: 429 - protein, 262 aa, Populus trichocarpa
MASTSCFLHHHALTTPARSTPSSQRQVANLKPTQLACRAQKQAVQEEDNGAVSRRLALTVLIGAAALGSKVAPADAAYGESANIFGKPKTDTDFLPYNGDGFKLSVPSKWNPSKEREFPGQVLRYEDNFDATSNVSVMVIPTDKKSITDYGSPEEFLSKVDFLLGKQSSLFATASEGGFDPNTVATANILETSTPVVGGKQYFFLSVLTRTADGDEGGKHQLITATVKDGKLYICKAQAGDKRWFKGARKFVESTASSFSVA

SEQ ID NO: 430 - DNA, 807 bp, Limonium bicolor
  CDS (1)..(807)
atggcgtcaacagcatgcttctcgcatcattatgctctctcctcatcttctaactccgccagaaattcattggcgtcgcagcgccaaggcctgagtacctctaaatcgggagccttggtaatctgcaatgctcaaaagcaggatcagattagcaataccgccgtgaacgagtcaatttcacggcgtctggctcttacattgtttgttggcgctgcggcggttgggtctaaggttaatccagctgacgccgcctatggcgaatctgcaaatgtttttgggaagcagaagaccaccgactttacggcatatgttggcgagggattcaagctgcagatccctgctaaatggaaccctagcagagagattgaattccctggtcaggtcctccgatttgaggacaactttgacacaaccagcaacgtaagcgtcatgatcaaccccaccgacaagaaatccatcactgattttggaacacctgaagagttcctctctactgttaactacttgtttggctctcaggcttacttcggtaaaactgattccgagggtggtttcgattcgggcgtggtggcctcggccaacatactggagacatcatccccgactattgatggtaagccatactacattctatccgtcttgacgaggactgctgatggagatgaagggggaaagcaccagctgatcagtgcgaccgtgaatggcggcaagctctacatttgcaaggcccaggctggagacaagagatggttcaagggtgcaaagaagtttgtcgagaacgctgcaacttcttttagcgttgcttga

SEQ ID NO: 431 - protein, 268 aa, Limonium bicolor
MASTACFSHHYALSSSSNSARNSLASQRQGLSTSKSGALVICNAQKQDQISNTAVNESISRRLALTLFVGAAAVGSKVNPADAAYGESANVFGKQKTTDFTAYVGEGFKLQIPAKWNPSREIEFPGQVLRFEDNFDTTSNVSVMINPTDKKSITDFGTPEEFLSTVNYLFGSQAYFGKTDSEGGFDSGVVASANILETSSPTIDGKPYYILSVLTRTADGDEGGKHQLISATVNGGKLYICKAQAGDKRWFKGAKKFVENAATSFSVA

SEQ ID NO: 432 - DNA, 1005 bp, Picea sitchensis
  CDS (70)..(888)
cgactccacggcaaccgataagcagagcagaacagagcagagcagagcaaagcaagggaaaggaaggaaatggcttctgctacaccagcgattgtgttccgcactccctcattgtcctcccgcaggagttccttcaacgggtcatctctacccgccgcatacgtcaagtctgcgtcccttactccttccaagaattccatctcttgccgtgcggtcaagcaagccgacgcagaaatcgtaacatcccccgcaacgcgcaggcagatcgctctcactttactcgctggagcagcagcccttaccagcaaagtctctcccgcagacgcagcctacggcgaagctgcgaacgtgttcggagccccgaagaagaacaccgatttcatcacctacagtggcaagggattcaccatacaaatcccgtcaaagtggaaccccagcaaagaggttgagtatcctgggcaggtgctcatatatgaggacaacggagataccgtcagcaacgtctccgtcatggtcattcccaccgacaagaaatccatcaaggatttcggtcctccccagcaattcctttctcaggtggattttttgcttgggaaacaggcatactctggaaagacacagtcagagggaggatttgaccctgatgcagtggcagttgcatctttactagaggcatcaagctctgtgaccaatgggaaggaatattacaatatttctgtattaacaagaacagccgacggtgacgaaggagggaggcaccagttaatcactgcaactgtttcagatggaaagttgtacgtgtgtaaggctcaggctggtgacaagagatggtttaaaggagcaaggaaatttgtagaaagcactgctagttccttcaatgttgcttaaattccaacgttaaaacattttatcatatgtatgtactatgtatatgaccatagatttgtttttgtctgttttccgataaaatatttcaatgttgtcatgacaaaaaaaaaaaaaaaa

SEQ ID NO: 433 - protein, 272 aa, Picea sitchensis
MASATPAIVFRTPSLSSRRSSFNGSSLPAAYVKSASLTPSKNSISCRAVKQADAEIVTSPATRRQIALTLLAGAAALTSKVSPADAAYGEAANVFGAPKKNTDFITYSGKGFTIQIPSKWNPSKEVEYPGQVLIYEDNGDTVSNVSVMVIPTDKKSIKDFGPPQQFLSQVDFLLGKQAYSGKTQSEGGFDPDAVAVASLLEASSSVTNGKEYYNISVLTRTADGDEGGRHQLITATVSDGKLYVCKAQAGDKRWFKGARKFVESTASSFNVA

SEQ ID NO: 434 - DNA, 819 bp, Picea sitchensis
  CDS (1)..(819)
atggcttctgctacaccagcgattgtgttccgcactccctcattgtcctcccgcaggagttccttcaacgggtcatctctacctgccgcatacgtcaagtctgcgtcccttactccttccaagaattccatctcttgccgtgcggtcaagcaagccgacgcagaaatcgtaacatcccccgcaacgcgcaggcagatcgctctcactttactcgctggagcagcagcccttaccagcaaagtctctcccgcagacgcagcctacggcgaagctgcgaacgtgttcggagccccgaagaagaacaccgatttcatcacctacagtggcaagggattcaccatacaaatcccgtcaaagtggaaccccagcaaagaggttgagtatcctgggcaggtgctcagatatgaggacaacggagataccgtcagcaacgtctccgtcatggtcattcccaccgacaagaaatccatcaaggatttcggtcctccccagcaattcctttctcaggtggattttttgcttgggaaacaggcatactctggaaagacacagtcagagggaggatttgaccctgatgcagtggcagttgcatctttactagaggcatcaagctctgtgaccaatgggaaggaatattacaatatttctgtattaacaagaacagccgacggtgacgaaggagggaggcaccagttaatcactgcaactgtttcagatggaaagttgtacgtgtgtaaggctcaggctggtgacaagagatggtttaaaggagcaaggaaatttgtagaaagcactgctagttccttcaatgttgcttaa

SEQ ID NO: 435 - protein, 272 aa, Picea sitchensis
MASATPAIVFRTPSLSSRRSSFNGSSLPAAYVKSASLTPSKNSISCRAVKQADAEIVTSPATRRQIALTLLAGAAALTSKVSPADAAYGEAANVFGAPKKNTDFITYSGKGFTIQIPSKWNPSKEVEYPGQVLRYEDNGDTVSNVSVMVIPTDKKSIKDFGPPQQFLSQVDFLLGKQAYSGKTQSEGGFDPDAVAVASLLEASSSVTNGKEYYNISVLTRTADGDEGGRHQLITATVSDGKLYVCKAQAGDKRWFKGARKFVESTASSFNVA

SEQ ID NO: 436 - DNA, 1058 bp, Picea sitchensis
  CDS (52)..(870)
gaagcagagcagaacagagcagagcagagcaaagcaagggaaaggaaggaaatggcttctgctacaccagcgattgtgttccgcactccctcattgtcctcccgcaggagttccttcaacgggtcatctctacccgccgcatacgtcaagtctgcgtcccttactccttccaagaattccatctcttgccgtgcggtcaagcaagccgacgcagaaatcgtaacatcccccgcaacgcgcaggcagatcgctctcactttactcgctggagcagcagcccttaccagcaaagtctctcccgcagacgcagcctacggcgaacctgcgaacgtgttcggagccccgaagaagaacaccgatttcatcacctacagtggcaagggattcaccatacaaatcccgtcaaagtggaaccccagcaaagaggttgagtatcctgggcaggtgctcagatatgaggacaacggagataccgtcagcaacgtctccgtcatggtcattcccaccgacaagaaatccatcaaggatttcggtcctccccagcaattcctttctcaggtggattttttgcttgggaaacaggcatactctggaaagacacagtcagagggaggatttgaccctgatgcagtggcagttgcatctttactagaggcatcaagctctgtgaccaatgggaaggaatattacaatatttctgtattaacaagaacagccgacggtgacgaaggagggaggcaccagttaatcactgcaactgtttcagatggaaagttgtacgtgtgtaaggctcaggctggtgacaagagatggtttaaaggagcaaggaaatttgtagaaagcactgctagttccttcaatgttgcttaaattccaacgttaaaacattttatcatatgtatgtactatgtatatgaccatagatttgtttttgtctgttttccgataaaatatttcaatgttgtcatggtattttgtagctttgtcggaaatagaacaatatgaagaggatctttgatttcgtatcctttatgaaaaaaaaaaaaaaaagaggtctt

SEQ ID NO: 437 - protein, 272 aa, Picea sitchensis
MASATPAIVFRTPSLSSRRSSFNGSSLPAAYVKSASLTPSKNSISCRAVKQADAEIVTSPATRRQIALTLLAGAAALTSKVSPADAAYGEPANVFGAPKKNTDFITYSGKGFTIQIPSKWNPSKEVEYPGQVLRYEDNGDTVSNVSVMVIPTDKKSIKDFGPPQQFLSQVDFLLGKQAYSGKTQSEGGFDPDAVAVASLLEASSSVTNGKEYYNISVLTRTADGDEGGRHQLITATVSDGKLYVCKAQAGDKRWFKGARKFVESTASSFNVA

SEQ ID NO: 438 - DNA, 798 bp, Salicornia europaea
  CDS (1)..(798)
atggcatcaacagcatgtttcttacaccaccatgcagccatctctgggccagcttcagcccgaaacccggcccaaaaataccaggctgtaagcatgaagcccaaccagattgtttgcaaggttcaaaagcaagatgatgaggcccaagccctaaacagtagtgtctcaagaaggttagccctcactgttcttattggtgctgctgctgttggctctaaggtttcccctgctgatgctgcttatggagaagctgccaatgtatttgggaagccaaagaaagacaccgagttttcttcgtacaacggtgatggattcaagttgttggtcccttcaaaatggaacaagagcaaagaggtagagtacccgggtcaagttttgaggttcgaagacaacttcgatgccaccagcaatttagctgtcatggttagctccactgacaagaaatccatcaccgactttggttcccctgaacaattccttggccaagttgactacttgttgggcaaacaagcctattttggacagactgattctgagggtggttttgactcgggtgtcgttgcaagtgcaaacgtccttgagagcagcacaccagtaatagatggaaagcaatactacagcattacagtgctaacaagaacagcagacggtgatgagggcggcaaacaccaaataattacagccactgtcaaggatggtaagctttacatctgcaaggctcaggctggtgacaagagatggttcaagggtgctaggaagtttgtcgagagtgctgccagttctttcagcgttgcttaa

SEQ ID NO: 439 - protein, 265 aa, Salicornia europaea
MASTACFLHHHAAISGPASARNPAQKYQAVSMKPNQIVCKVQKQDDEAQALNSSVSRRLALTVLIGAAAVGSKVSPADAAYGEAANVFGKPKKDTEFSSYNGDGFKLLVPSKWNKSKEVEYPGQVLRFEDNFDATSNLAVMVSSTDKKSITDFGSPEQFLGQVDYLLGKQAYFGQTDSEGGFDSGVVASANVLESSTPVIDGKQYYSITVLTRTADGDEGGKHQIITATVKDGKLYICKAQAGDKRWFKGARKFVESAASSFSVA

SEQ ID NO: 440 - DNA, 786 bp, Medicago truncatula
  CDS (1)..(786)
atggcctctacacaatgcttcttgcacccccaatatgctcttacaactccatctagaagtttgtctcagcgccaaattgttaccaacaaaccaaaccatattgtttgcaaggcacagaaacaagatgttgaggatgttgctgtcagtgttgtttctcgtaggttagcactttctgtactccttggtgctgctgctgttggctcaaaggtttcacctgctgatgctgcctatggagaagctgccaatgtctttggaaaggcaaagacaaacacagactttttgccatacaatggagatggattcaaactgttggttccagcaaagtggaatccaagcaaagagagagagttccctggtcaggttcttagatacgaggataattttgatgcaacaagcaatgtttccgttcttgtccaaacaactgacaagaagtccatcaccgactatggttcacctgaagagttcctatccaaggtggactatttgcttggaaaacaagccttctttggccaaactgattcagagggtggttttgatacaaatgccgtagctgtggcaaacatcttagagagttcagcaccagtgattggtgggaaacagtatttcaacatatcagttttgacaaggactgctgatggcgatgaaggtggaaagcaccagctgattacagcaactgtaaatgatggaaaactatacatttgcaaggctcaagctggagacaagaggtggtttaagggagcaagaaagtttgttgaggacactgcaagttctttcagtgttgcctaa

SEQ ID NO: 441 - protein, 261 aa, Medicago truncatula
MASTQCFLHPQYALTTPSRSLSQRQIVTNKPNHIVCKAQKQDVEDVAVSVVSRRLALSVLLGAAAVGSKVSPADAAYGEAANVFGKAKTNTDFLPYNGDGFKLLVPAKWNPSKEREFPGQVLRYEDNFDATSNVSVLVQTTDKKSITDYGSPEEFLSKVDYLLGKQAFFGQTDSEGGFDTNAVAVANILESSAPVIGGKQYFNISVLTRTADGDEGGKHQLITATVNDGKLYICKAQAGDKRWFKGARKFVEDTASSFSVA

SEQ ID NO: 442 - DNA, 819 bp, Picea sitchensis
  CDS (1)..(819)
atggcttctgctacaccagcgattgtgttccgcactccctcattgtcctcccgcaggagttccttcaacgggtcatctctacccgccgcatacgtcaagtctgcgtcccttactccttccaagaattccatctcttgccgtgcggtcaagcaagccgacgcagaaatcgtaacatcccccgcaacgcgcaggcagatcgctctcactttactcgctggagcagcagcccttaccagcaaagtctctcccgcagacgcagcctacggcgaagctgcgaacgtgttcggagccccgaagaagaacaccgatttcatcacctacagtggcaagggattcaccatacaaatcccgtcaaagtggaaccccagcaaagaggttgagtatcctgggcaggtgctcagatatgaggacaacagagataccgtcagcaacgtctccgtcatggtcattcccaccgacaagaaatccatcaaggatttcggtcctccccagcaattcctttctcaggtggattttttgcttgggaaacaggcatactctggaaagacacagtcagagggaggatttgaccctgatgcagtggcagttgcatctttactagaggcatcaagctctgtgaccaatgggaaggaatattacaatatttctgtattaacaagaacagccgacggtgacgaaggagggaggcaccagttaatcactgcaactgtttcagatggaaagttgtacgtgtgtaaggctcaggctggtgacaagagatggtttaaaggagcaaggaaatttgtagaaagcactgctagttccttcaatgttgcttaa

SEQ ID NO: 443 - protein, 272 aa, Picea sitchensis
MASATPAIVFRTPSLSSRRSSFNGSSLPAAYVKSASLTPSKNSISCRAVKQADAEIVTSPATRRQIALTLLAGAAALTSKVSPADAAYGEAANVFGAPKKNTDFITYSGKGFTIQIPSKWNPSKEVEYPGQVLRYEDNRDTVSNVSVMVIPTDKKSIKDFGPPQQFLSQVDFLLGKQAYSGKTQSEGGFDPDAVAVASLLEASSSVTNGKEYYNISVLTRTADGDEGGRHQLITATVSDGKLYVCKAQAGDKRWFKGARKFVESTASSFNVA

SEQ ID NO: 444 - DNA, 798 bp, Ricinus communis
  CDS (1)..(798)
atggctaccactggatgcttcttacaccaccctgcacttactagtactcctaatagattatcttcagtgtcccaacgccaagtttccaacaccaccaagcccacccagttcatctgccgagcctccaccaagcagccactgcaggaggaggatcttagccttgtctctcgaagattggctctcactgttctcattggtgctgcagccgttggctccaaggtttctcctgctgatgctgcttatggtgaagctgccaatgtttttggaaagccaaaaacaaacacggacttcatgccgtacaatggagatggattccaattgtcagttccatcaaaatggaacccaagcaaagagagagagttcccaggtcaggttcttagatatgaagacaattttgactccaacagcaatctctctgtcatgatcaccccaactgataagaaatccatcaccgactttggtaccccagaggaatttcttgctaaggtggattatttgcttggaaaacaggcgtattttggcaaaaccgcctctgagggaggtttcgacccgaatgctgtggcaacagctaacatattagacagttcaactcaagtggtgggtgggaaagaatattactttttgtcagtgttaacaaggactgctgacggagatgaaggcggcaagcaccaactgatcacagccgctgtgaaagatggcaagctttacatttgcaaggcacaagctggagataagaggtggtttaagggagcaagaaagtttgtagagagcgctgctagctccttcagtgttgcttaa

SEQ ID NO: 445 - protein, 265 aa, Ricinus communis
MATTGCFLHHPALTSTPNRLSSVSQRQVSNTTKPTQFICRASTKQPLQEEDLSLVSRRLALTVLIGAAAVGSKVSPADAAYGEAANVFGKPKTNTDFMPYNGDGFQLSVPSKWNPSKEREFPGQVLRYEDNFDSNSNLSVMITPTDKKSITDFGTPEEFLAKVDYLLGKQAYFGKTASEGGFDPNAVATANILDSSTQVVGGKEYYFLSVLTRTADGDEGGKHQLITAAVKDGKLYICKAQAGDKRWFKGARKFVESAASSFSVA

SEQ ID NO: 446 - DNA, 765 bp, Oryza sativa
  CDS (1)..(765)
atggcgtccacctcctgcttcctccaccagtccacggcccgcgtcgccgcgcgcgtcgcctccccgtccccggcgacacggacccacctcctcgtctgccgcgcccagaagcaggacgacgccgacttctcccgccgcgcggcgctcgcgctgctggccggaacaacggcggcggtgggggttaatgtggccccgcccgccgcggcctacggcgaggcggcgaacgtgttcgggaagcccaaaacaaacacggagttcatcccctacagcggcgaggggttcaagctgctgatcccgtccaagtggaaccccagcaaggagcgcgagttccccggacaggtcctccgctacaaagagaacttccacgccgacagcaacgtctccgtcataatcaacccccccaccaagaagaccgtcgccgagttcggctccccccaagaattcctcccccaagtcgacttcttgcttggcaagcaggcctactccggcaagacagattccgagggtgggtttgagtcggacgcggtggcgacggcgaacatcctggagagctcggcgccggtggtgggagggaagcagtaccacagcgtaacggtgctgacgaggacggcggacggcgacgagggcggcaagcaccagctgatcacggccaccgtcaacgacggcaagctgaacatctgcaaggcgcagcccggcgacaagaggtggttcaagggcgccaggaagtttgtcgagagcgcagccagctccttcagcgtcgcatga

SEQ ID NO: 447 - protein, 254 aa, Oryza sativa
MASTSCFLHQSTARVAARVASPSPATRTHLLVCRAQKQDDADFSRRAALALLAGTTAAVGVNVAPPAAAYGEAANVFGKPKTNTEFIPYSGEGFKLLIPSKWNPSKEREFPGQVLRYKENFHADSNVSVIINPPTKKTVAEFGSPQEFLPQVDFLLGKQAYSGKTDSEGGFESDAVATANILESSAPVVGGKQYHSVTVLTRTADGDEGGKHQLITATVNDGKLNICKAQPGDKRWFKGARKFVESAASSFSVA

SEQ ID NO: 448 - DNA, 807 bp, Nicotiana tabacum
  CDS (1)..(807)
atggcttcaacacaatgtttcttgcaccagcatgcactctctagctcagcagctagaacaacatcctcagtgtcatcacagaggtacgtttcatcccttaagcctaaccaattggtttgccgtgcccaaaaacagtcctcacctcaagaagatgatggcaacagcgtcgtcgtctctcgacgattggctctcactgtccttattggtgctgcggccattggttccaaggtttcccctgcagatgctgcttatggagaagctgcaaatgtttttggtaagccaaagaaaaacactgatttcttggcatacaacggagatggattcaagttgcaagtcccagctaaatggaaccccagcaaagaagttgagttccctggtcaagttctcagatatgaagacaactttgattccaccagcaatctcattgtcactgtcactccaactgataagaaatccatcactgactacggctcccctgaagagttcctcactcaagtggactttttgctaggaaaacaagcttacaaaactgattcagagggtggatttgaatctggtgcagtggcaactgcaactgcaaacctattggagacatcaagctcaactgtaggaggaaaagagtactacatcttgtcagtattaacaagaactgcagatggagatgaaggtggtaagcaccaattgatctcagctacagtaaatggtggcaaactttacatttgcaaagctcaagctggtgacaagagatggtttaagggtgctaggaagtttgtggagaatgctgccacttctttcagtgttgcttaa

SEQ ID NO: 449 - protein, 268 aa, Nicotiana tabacum
MASTQCFLHQHALSSSAARTTSSVSSQRYVSSLKPNQLVCRAQKQSSPQEDDGNSVVVSRRLALTVLIGAAAIGSKVSPADAAYGEAANVFGKPKKNTDFLAYNGDGFKLQVPAKWNPSKEVEFPGQVLRYEDNFDSTSNLIVTVTPTDKKSITDYGSPEEFLTQVDFLLGKQAYKTDSEGGFESGAVATATANLLETSSSTVGGKEYYILSVLTRTADGDEGGKHQLISATVNGGKLYICKAQAGDKRWFKGARKFVENAATSFSVA

SEQ ID NO: 450 - DNA, 759 bp, Oryza sativa
  CDS (1)..(759)
atggcgtccacctcctgcttcctccaccagtccacggcccgcgtcgccgcgcgtcgcctccccgtccccggcgacacggacccacctcctcgtctgccgcgcccagaagcaggacgacgccgacgtctcccgccgcgcgcgctcgcgctgctggccggagcgacggcggcggtgggggtgaaggtggcgcccgccgccgcggcctacggcgaggcggcgaacgtgttcgggaagcccaagacgaacacggagttcatcgcctacagcggcgaggggttcaagctgctgatcccgtccaagtggaaccccagcaaggagcgcgagttccccggacaggtcctccgctacgaggacaacttcgacgccaacagcaacgtctccgtcataatcaaccccaccaccaagaagaccatcaccgagttcggctcccccgaggagttcctcgcccaggtcgacttcttgcttggcaagcaggcctactccggcaagacagattccgagggtgggtttgagtcggacgcggtggcgacggcgaacatcctggagagctcggcgccggtggtggagggaagcgtactacagcgtaacggtgctgacgaggacggcggacggcgacgagggcgcaagcaccagctgatcacggccaccgtcaacgacggcaagctgtacatctgcaaggcgcaggccggcgacaagaggtggttcaagggcgccaggaagttcgtcgagagcgcagccagctccttcagcgtcgcatga

SEQ ID NO: 451 - protein, 252 aa, Oryza sativa
MASTSCFLHQSTARVAARRLPVPGDTDPPPRLPRPEAGRRRRLPPRALALLAGATAAVGVKVAPAAAAYGEAANVFGKPKTNTEFIAYSGEGFKLLIPSKWNPSKEREFPGQVLRYEDNFDANSNVSVIINPTTKKTITEFGSPEEFLAQVDFLLGKQAYSGKTDSEGGFESDAVATANILESSAPVVEGSVLQRNGADEDGGRRRGRKHQLITATVNDGKLYICKAQAGDKRWFKGARKFVESAASSFSVA

SEQ ID NO: 452 - DNA, 798 bp, Nicotiana tabacum
  CDS (1)..(798)
atggcttccacacaatgcttcttgcaccatcatgcattgtcaactccagctagaactcccttagtaaggagtattgttccatcactcaagcctaaccaattattggtgtgccgtgcccaaaaacagtctgctccccaagaagataatgtcaacagcgtctctgtctctcgtagattggctctcacagtcctcattggtgctgctgccgttggttccaaggtttcccctgctgatgctgcttatggagaagctgcaaatgtttttgggaagccaaagacagacacggatttccaaacatacaacggagatggattcaagctgcaaattccatcaaaatggaacccaaacaaggaagtagagtaccctggtcaggttcttagatttgaagacaactttgatgccaccagcaatgtcattgtcgctatcacccctactgacaagaagtctatcactgactttggttcccctgaacagttcctctctcaagtggactatctgctaggaagacaagcttactctggcaaaactgattcagagggtggatttgaatcagatgcagtggcaattgcaaacgtattggagacatctagtgcagaagtgggagggaaaccgtattactacttgtctgtattgacaagaactgctgatggaaatgaaggtgggaagcaccagttgatcacagccacagtaaatgatggcaaactttatatttgcaaagcacaagctggtgacaagagatggttcaagggagctaaaaagtttgtggagaatactgccacttctttcagtcttgcttaa

SEQ ID NO: 453 - protein, 265 aa, Nicotiana tabacum
MASTQCFLHHHALSTPARTPLVRSIVPSLKPNQLLVCRAQKQSAPQEDNVNSVSVSRRLALTVLIGAAAVGSKVSPADAAYGEAANVFGKPKTDTDFQTYNGDGFKLQIPSKWNPNKEVEYPGQVLRFEDNFDATSNVIVAITPTDKKSITDFGSPEQFLSQVDYLLGRQAYSGKTDSEGGFESDAVAIANVLETSSAEVGGKPYYYLSVLTRTADGNEGGKHQLITATVNDGKLYICKAQAGDKRWFKGAKKFVENTATSFSLA

SEQ ID NO: 454 - DNA, 801 bp, Nicotiana tabacum
  CDS (1)..(801)
atggcttccactcaatgcttcttgcaccatcatgcattgtcaactccagctagaacttccttagttaggggtattgttccatcactcaagtctaaccaattattggtgtgccgtgcccaaaacaaacagtctgcacctcaacaagataatgtcaacagtgtctctgtctctcgtagattggctcttacactcctcattggtgctgctgccgttggttccaaggtttcccctgctgatgctgcttatggagaagctgcaaatgtttttgggaagccaaagacagacacggatttccagacatacaacggggatggattcaagctgcaaattccatccaaatggaacccaaacaaggaagtagagtaccctggtcaggttcttagatttgaagacaactttgatgccaccagcaatgtcattgtcgctatcacccctactgacaagaagtccatcactgactttggttcccctgaacagttcctctctcaagtggactatctgctaggaagacaagcctactctggcaaaactgattcagagggtggatttgaatctgatgcagtggctattgcaaacgtattggagacatctactgcagaagtgggagggaaacagtattactacttgtctatattgacaagaactgctgatggaaatgaaggtgggaagcaccagttggtcacagccacagtaaatgatggcaaactttacatttgcaaagcacaagctggtgacaagagatggttcaaaggagctaaaaagtttgtggagaatactgccacttctttcagtcttgcttaa

SEQ ID NO: 455 - protein, 266 aa, Nicotiana tabacum
MASTQCFLHHHALSTPARTSLVRGIVPSLKSNQLLVCRAQNKQSAPQQDNVNSVSVSRRLALTLLIGAAAVGSKVSPADAAYGEAANVFGKPKTDTDFQTYNGDGFKLQIPSKWNPNKEVEYPGQVLRFEDNFDATSNVIVAITPTDKKSITDFGSPEQFLSQVDYLLGRQAYSGKTDSEGGFESDAVAIANVLETSTAEVGGKQYYYLSILTRTADGNEGGKHQLVTATVNDGKLYICKAQAGDKRWFKGAKKFVENTATSFSLA

SEQ ID NO: 456 - DNA, 792 bp, Cucumis sativus
  CDS (1)..(792)
atggcttccacctcctgtttccttcaccaccacgccctcaccgccgccgcaagatcctcgtcttccccacgccaggccgccctgcccaagtctccccagctgctcgtctgccgtgcccagaagcagcaacccgctcaggaggaggaaggcggtgttgtctctcgtcgattggctctcactgtcctcatcggcgccgctgctcttggctccaaggtttctccggctgatgctgcttatggagaagctgccaatgtgtttggaaagccaaagtccaacacagattacttgccatacagtggagatggattcaagctttcaattccttctaagtggaatccaagcaaagaaagggaattcccaggccaagttcttagatatgaagacaactttgattccaacagcaatcttagtgtaattatcaacccaactgacaaaaaatccatcaaagactttggctcccctgaagaattcctttccaaggttgactatttgctgggaaagcaagcttactttggaaagactgcttctgagggtgggttcgacccggatgcagtagcaacagcaaacatattggaggctacagcgtccaacgtgaatggaaaggactactacttcgtatctgtgttgacaagaactgcagatggagatgaaggtgggaagcatcagctgatcacagcaactgtgaatgatggaaagctttacatttgcaaggcacaagcaggagacaagaggtggtttaaaggagcaaggaagtttgtggagggtgcagctagttctttcagtgttgcttaa

SEQ ID NO: 457 - protein, 263 aa, Cucumis sativus
MASTSCFLHHHALTAAARSSSSPRQAALPKSPQLLVCRAQKQQPAQEEEGGVVSRRLALTVLIGAAALGSKVSPADAAYGEAANVFGKPKSNTDYLPYSGDGFKLSIPSKWNPSKEREFPGQVLRYEDNFDSNSNLSVIINPTDKKSIKDFGSPEEFLSKVDYLLGKQAYFGKTASEGGFDPDAVATANILEATASNVNGKDYYFVSVLTRTADGDEGGKHQLITATVNDGKLYICKAQAGDKRWFKGARKFVEGAASSFSVA

SEQ ID NO: 458 - DNA, 795 bp, Fritillaria agrestis
  CDS (1)..(795)
atggcctcatctgcatgcttcctcctccaccatgctccgtccacccctgccaccacctctaggaccccatctcatcgcctggtaccaaccatcaagccctctcagctcatctgtcgggcgcagaagagctccgacacagacgaaaacagctcaaccgctgtcagccgtcggttggctctgaccatcctcatcggctctgccgccgtcggcaccaagatcgcgcctgccaatgctgcctacggagaagctgctaatgttttcggaaaggcgaagactaacacagacttccttccatacaccggtgatggattcaatctgttgataccagcaaagtggaacccgagtaaggaggtcgagttcccaggtcaggtgctaaggtacgaggacaacttcgacgtcaccagcaatgttagtgtcaccgtcacccccacctccaagaagtcaatcactgactacggcaccccagaggagttcctctctacagttgattacttgctagggaaacaggcttactctggcaaaaccgcatctgagggcggatttgaccccgactcagtggcgactgccaacatcctcgaggtgtccacccccgtggtgggtggcaaacagtactacaacatctcagttttgaccaggactgctgacggagatgaaggaggcaagcaccatgttatctccgcaactgtcacagatggtaagctctacatctgcaaggcacaggccggggacaagagatggttcaagggagccaagaagtttgtggagagcactaccacctccttcaatgttgcatga

SEQ ID NO: 459 - protein, 264 aa, Fritillaria agrestis
MASSACFLLHHAPSTPATTSRTPSHRLVPTIKPSQLICRAQKSSDTDENSSTAVSRRLALTILIGSAAVGTKIAPANAAYGEAANVFGKAKTNTDFLPYTGDGFNLLIPAKWNPSKEVEFPGQVLRYEDNFDVTSNVSVTVTPTSKKSITDYGTPEEFLSTVDYLLGKQAYSGKTASEGGFDPDSVATANILEVSTPVVGGKQYYNISVLTRTADGDEGGKHHVISATVTDGKLYICKAQAGDKRWFKGAKKFVESTTTSFNVA

SEQ ID NO: 460 - DNA, 798 bp, Narcissus pseudonarcissus
  CDS (1)..(798)
atggcatcaactgcttgcttcctccaccaccatgcaccgtcccccgctaccagcaacctctctcgtacccgatccgccacgaatcgtgacgagcaacagcaagaacactcagctcgtctgcagagcccagaagcagactgcgccaccgagaacgatgcgttactctcgcgccgtcttgcactgaccatcctgattggtggtgcagctctcggttccagagtgtccgctgccgatgctgcctacggagagtctgctaatgtgtttgggaagccaaagacgaacacagacttccagaccgtcactggcgacggattcaagatactgataccgtcgaagtggaacccgagcaaggaggttgagttccctggtcaggtgttgcggtacgaagacaacttcgataccaccagcaatgttggtgtcatggtgaatcccacagacaagaaatccatcaaggactatggctcacccgagcaatttctctcacaggttgattacctgctggggaaacaagcatactttggcaagacaatttctgagggtggatttgagcccaatgccgtgcgaactgccaacatccttgaaacctcgacaccggtggtgggaggcaaagattactacagcatccacgtcttaacaagaacggccgacggggacgaaggcggcaagcatctgctgatcactgcgacggtatcggatgggaagctttacatctgcaaagctcaggctggcgacaagagatggttcaagggagccaagaagtttgtggaaagcgctgccagttccttcagtgcagcttag

SEQ ID NO: 461 - protein, 265 aa, Narcissus pseudonarcissus
MASTACFLHHHAPSPATSNLSRTRSATNRDEQQQEHSARLQSPEADCATENDALLSRRLALTILIGGAALGSRVSAADAAYGESANVFGKPKTNTDFQTVTGDGFKILIPSKWNPSKEVEFPGQVLRYEDNFDTTSNVGVMVNPTDKKSIKDYGSPEQFLSQVDYLLGKQAYFGKTISEGGFEPNAVRTANILETSTPVVGGKDYYSIHVLTRTADGDEGGKHLLITATVSDGKLYICKAQAGDKRWFKGAKKFVESAASSFSAA

SEQ ID NO: 462 - DNA, 780 bp, Pisum sativum
  CDS (1)..(780)
atggcatctacacaatgtttcttgcaccaccaatatgctattacaactccaactagaaccttatctcaacgccaagtagttaccaccaaaccaaaccatattgtttgcaaggcacagaaacaagatgatgttgttgatgctgttgtgtctcgtaggttagcactttctgttctcattggtgctgctgctgttggctccaaggtttcacctgcagatgctgcttatggagaagctgctaatgtgtttggaaaggcaaagacaaacacagattacttgccatacaatggagatggattcaagctgctggtgccagcaaaatggaatccaagcaaagagagagagttccctggtcaggttcttagatatgaggataattttgatgcaacaagcaatgtttcggttttagtccaaacaactgataagaagtccatcactgactatggttcacctgaagagttcctatctaaggtggactatttgcttggaaaacaagccttctttggacaaactgattcagagggaggtttcgatacaaatgctgtagctgttgcaaacatcttagagagctcagcaccagtgattggtggaaaacagtattacaacatttcggtattgacaaggactgctgatggagatgaaggtggaaagcatcagctgattacagcaactgtaaaggatggaaaattatacatctgcaaggctcaagctggtgacaagaggtggtttaagggagcaagaaagtttgtggaggacactgcaagttctttcagtgttgcctaa

SEQ ID NO: 463 - protein, 259 aa, Pisum sativum
MASTQCFLHHQYAITTPTRTLSQRQVVTTKPNHIVCKAQKQDDVVDAVVSRRLALSVLIGAAAVGSKVSPADAAYGEAANVFGKAKTNTDYLPYNGDGFKLLVPAKWNPSKEREFPGQVLRYEDNFDATSNVSVLVQTTDKKSITDYGSPEEFLSKVDYLLGKQAFFGQTDSEGGFDTNAVAVANILESSAPVIGGKQYYNISVLTRTADGDEGGKHQLITATVKDGKLYICKAQAGDKRWFKGARKFVEDTASSFSVA

SEQ ID NO: 464 - DNA, 783 bp, Sinapis alba
  CDS (1)..(783)
atggcgtacagcgcgtgtttcctacatcaaagcgcactagcctcctccaccgcaagatcatcaccttcctcatcatcccagcgctacgtgtcaatctctaaactagtgtgtaaagctcaacagactcatgaagaagataactccaccgtctctcgccgtctcgctctcacactcctcgtcggcgctgctgcagttggttccaaagtgtctcctgccgatgctgcctacggtgaagctgcaaatgtgtttgggaagccaaagaaaaacacagacttcaccgcatacagtggagatggattccaagtgcaggtgccagctaagtggaacccaagcagagaggttgagtatccaggacaagttcttaggtatgaagacaactttgacgctactagcaatctcaatgtcatggtcactcctactgacaagaagtccatcactgattacggttctcctgaagagttcctctctcaggtcaattatcttctagggaaacaagcttacttcggtgagactgcctctgagggaggatttgacaacaatgcagtggcaacagcaaacattctggagacaaatattcaggacgttggtgggaaaccatactactacttgtcggtgttgacaagaacggccgatggagacgaaggcggtaagcatcagctgatcacagccaccgtgaatggaggcaagctttatatctgcaaagcacaagctggagacaagaggtggttcaaaggagccaataaatttgtggagaaagcagccacttctttcagtgttgcttaa

SEQ ID NO: 465 - protein, 260 aa, Sinapis alba
MAYSACFLHQSALASSTARSSPSSSSQRYVSISKLVCKAQQTHEEDNSTVSRRLALTLLVGAAAVGSKVSPADAAYGEAANVFGKPKKNTDFTAYSGDGFQVQVPAKWNPSREVEYPGQVLRYEDNFDATSNLNVMVTPTDKKSITDYGSPEEFLSQVNYLLGKQAYFGETASEGGFDNNAVATANILETNIQDVGGKPYYYLSVLTRTADGDEGGKHQLITATVNGGKLYICKAQAGDKRWFKGANKFVEKAATSFSVA

SEQ ID NO: 466 - DNA, 777 bp, Solanum lycopersicum
  CDS (1)..(777)
atggctgcttccacacaatgtttcttgcaccaatatcatgcactaagatctagccctgctagaacatcctctgtttcatctcctaagcctaaccaattgatttgccgtgcacaaaagcaagatgatgccagcaacgccgccgtctcgagacgattggctcttactctcctcattggtactgctgccattggttccaaggtttcccctgcagatgctgcctatggagaagctgcaaatgtttttggtaagccaaaggaaaacactgatttcttgccatacaacggagatggattcaagctccaagtcccagccaaatggaaccccagcaaagaagttgagtaccctggtcaggttctcagatatgaagacaactttgattccacaagtaatcttattgttgcagttactccaactgacaagaagtccatcaccgactacggctcccctgaagagttcctctctaaagtggactatctgctaggaaagcaagcttactttggcaaaactgattcagagggaggatttgaatctggtgcagtggcaactcgtaacctgttggaggcatcaagcgcaacagtgggaggaaaagagtactactacttgtcagtattgacaagaactgcagatggagatgaaggtggaaagcaccagttgatcacagccacagtgaatgatggcaaactttacatttgcaaggcacaagctggtgacaagagatggtttaagggtgctaaaaagtttgtggagaatgctgccacttctttcagtattgcttaa

SEQ ID NO: 467 - protein, 258 aa, Solanum lycopersicum
MAASTQCFLHQYHALRSSPARTSSVSSPKPNQLICRAQKQDDASNAAVSRRLALTLLIGTAAIGSKVSPADAAYGEAANVFGKPKENTDFLPYNGDGFKLQVPAKWNPSKEVEYPGQVLRYEDNFDSTSNLIVAVTPTDKKSITDYGSPEEFLSKVDYLLGKQAYFGKTDSEGGFESGAVATRNLLEASSATVGGKEYYYLSVLTRTADGDEGGKHQLITATVNDGKLYICKAQAGDKRWFKGAKKFVENAATSFSIA

SEQ ID NO: 468 - DNA, 783 bp, Solanum tuberosum
  CDS (1)..(783)
atggctgcttccacacaatgtttcttgcaccaatatcatgcactaagatctagccctgctagaacatcatctgttccatcccctaagcctaaccaattgatttgccgtgcacaaaagcaagatgatgccaacaacaccagcaacgccgtctctcgccgattggctcttactctcctcattggtactgctgccattggttccaaagtttcccctgcagatgctgcctatggagaagctgcaaatgtttttggtaagccaaaggagaacactgatttcttgccatacaatggagatggattcaagctccaaatcccagccaaatggaacccaagcaaagaaattgagttccctggtcaggttctcagatatgaagacaactttgattccaccagtaatctcatggttgcagtcactccaactgacaagaagtccatcaccgactacggctcccctgaagaattcctctctaaagtggactatctgctaggaaagcaagcttactttggtaaaactgattcagagggtggatttgaatctggtgcagtggcaactgctaacctgttggaggcatcaagcgcaacagtgggaggaaaacagtactactacttgtcagtattgacaagaactgcagatggagatgaaggtgggaagcaccagttgatcacagccacagtgaatgatggcaaactttacatttgcaaggcacaagctggtgacaagagatggtttaagggtgccaaaaagtttgtggagaatgctgccacttctttcagtattgcttaa

SEQ ID NO: 469 - protein, 260 aa, Solanum tuberosum
MAASTQCFLHQYHALRSSPARTSSVPSPKPNQLICRAQKQDDANNTSNAVSRRLALTLLIGTAAIGSKVSPADAAYGEAANVFGKPKENTDFLPYNGDGFKLQIPAKWNPSKEIEFPGQVLRYEDNFDSTSNLMVAVTPTDKKSITDYGSPEEFLSKVDYLLGKQAYFGKTDSEGGFESGAVATANLLEASSATVGGKQYYYLSVLTRTADGDEGGKHQLITATVNDGKLYICKAQAGDKRWFKGAKKFVENAATSFSIA

SEQ ID NO: 470 - DNA, 804 bp, Spinacia oleracea
  CDS (1)..(804)
atggcatctactgcatgcttcttacatcaccatgcagccatctccagcccagctgctggtagaggctcggccgcacagcgataccaggccgtaagcatcaagcctaatcagatcgtctgcaaagctcaaaagcaggatgataatgaggccaatgttcttaacagtggcgtctcgaggcgattggcccttactgttctcattggtgctgctgctgttggctctaaggtttcccctgcagatgcagcctatggagaagctgctaatgtattcgggaagccaaagaaaaacaccgaattcatgccctacaacggagatggattcaagttgttggtaccttcaaaatggaacccaagcaaagagaaagagttccctggtcaagttttgaggtacgaggacaactttgatgccaccagcaatttatctgtcctggttcaacccactgacaagaaatccatcacagacttcggttcccctgaagatttcctctcccaagtggattacttgttgggtaaacaagcctactttggaaagactgattctgagggtggtttcgattcgggtgttgttgcaagtgcaaacgtccttgaaagcagcaccccagtagttgatgggaagcaatactacagcattactgtgctaacaagaacagcagatggtgatgagggtggaaaacaccaagtaattgcagcgactgtcaaggacggtaagctttacatctgcaaggctcaagctggagacaagagatggttcaagggtgctaagaagtttgtcgagagtgctaccagttctttcagtgttgcttaa

SEQ ID NO: 471 - protein, 267 aa, Spinacia oleracea
MASTACFLHHHAAISSPAAGRGSAAQRYQAVSIKPNQIVCKAQKQDDNEANVLNSGVSRRLALTVLIGAAAVGSKVSPADAAYGEAANVFGKPKKNTEFMPYNGDGFKLLVPSKWNPSKEKEFPGQVLRYEDNFDATSNLSVLVQPTDKKSITDFGSPEDFLSQVDYLLGKQAYFGKTDSEGGFDSGVVASANVLESSTPVVDGKQYYSITVLTRTADGDEGGKHQVIAATVKDGKLYICKAQAGDKRWFKGAKKFVESATSSFSVA

SEQ ID NO: 472 - DNA, 777 bp, Triticum aestivum
  CDS (1)..(777)
atggcgtccacctcctgcttcctccaccagtccaccgcgcgcctggccgcctcggcgcgccctgcgcccgccgtcgggcgcacccagcttttcgtctgcaaggcgcagaagaatgacgaggctgcatctgacgctgccgtcgtcaccagccggcgcgccgcgctgtccctcctcgccggtgccgccgccatcgccgtcaaggtctcccccgccgccgccgcctacggagaagcagccaacgtgttcggcaaggcgaagaagaacacggacttcgtggcgtacagcggcgaggggttcaaactgatgatcccggccaagtggaaccccagcaaggagcgtgagttccctgggcaggtgctccgctacgaggacaacttcgacgccaccagcaacctctccgttataatcaaccccactaccaagaagaccatcaccgactacggttcccctgaggagttcctctcccaggtcggcttcctcctcggccagcagtcctacggtggcaagaccgactccgagggtgggttcgagtcagacgctgtggcgacggcgaacgtgctggagagctcggcgccggtggtggacggtaagcagtactacagcataacggtgctcacgaggaccgcggacggagacgagggagggaagcaccagctcatcaccgccaccgtcgccgacggcaagctctacgtctgcaaggcgcaacgagacaagaggtggttcaagggcgccaagaagttcgtcgagaacgccgcaggatccttcagcgtcgcataa

SEQ ID NO: 473 - protein, 258 aa, Triticum aestivum
MASTSCFLHQSTARLAASARPAPAVGRTQLFVCKAQKNDEAASDAAVVTSRRAALSLLAGAAAIAVKVSPAAAAYGEAANVFGKAKKNTDFVAYSGEGFKLMIPAKWNPSKEREFPGQVLRYEDNFDATSNLSVIINPTTKKTITDYGSPEEFLSQVGFLLGQQSYGGKTDSEGGFESDAVATANVLESSAPVVDGKQYYSITVLTRTADGDEGGKHQLITATVADGKLYVCKAQRDKRWFKGAKKFVENAAGSFSVA

SEQ ID NO: 474 - DNA, 786 bp, Brassica napus
  CDS (1)..(786)
atggcgtacaacgcgtgtttcctacatcagagcgcactagcctcctcctccgtcgcaagatcatcaccttcctcctcatcccagcgctacgtgtcactctctaaactagtgtgcaaagcgcaacaaactcaagaagacgatacctccaccgtctctcgccgtctcgctctcacactcctcgtcggcgccgctgcagttggttccaaagtgtctcccgccgaggcagcctacggtgaagctgcaaatgtgtttgggaagccaaagacaaacacagacttcactgcatacagtggagatggattccaagtgcaggtgccagctaagtggaacccaagcagagaggtagagtatccaggacaagtccttaggtacgaagacaactttgacgctactagcaatctcaatgtcatggtcactcctaccgacaagaagtccatcactgattacggttctcctgaagagttcctctctcaggtcaactatcttctaggtaaacaagcttacttcggtgagactgcctctgagggaggctttgacaacaatgcagtggcaacagcaaacattctggagacaaacattcaggacgttggtgggaaaccatactattacttgtcggtgttgacaagaacagccgatggagatgaaggtggtaagcatcagctgatcacagccaccgtgaatggagggaagctttatatctgcaaagcacaagctggagacaagaggtggttcaagggagccaataaatttgtggagaaagcagccacttctttcagtgttgcttga

SEQ ID NO: 475 - protein, 261 aa, Brassica napus
MAYNACFLHQSALASSSVARSSPSSSSQRYVSLSKLVCKAQQTQEDDTSTVSRRLALTLLVGAAAVGSKVSPAEAAYGEAANVFGKPKTNTDFTAYSGDGFQVQVPAKWNPSREVEYPGQVLRYEDNFDATSNLNVMVTPTDKKSITDYGSPEEFLSQVNYLLGKQAYFGETASEGGFDNNAVATANILETNIQDVGGKPYYYLSVLTRTADGDEGGKHQLITATVNGGKLYICKAQAGDKRWFKGANKFVEKAATSFSVA

SEQ ID NO: 476 - DNA, 792 bp, Brassica napus
  CDS (1)..(792)
atggcgtacagcgcgtgtttcctacaccagagcgcactagcctcctccgccgcgcgatcatcatcttccaactcatcccagcgccacttgtcactctccaaacccgttcagatagtgtgtaaagcacaacaacaccatgaagacgataactccgccgtctctcgccgtctcgctctcacactcttggtcggcgccgccgccgttggctccaaagtatcacccgctgatgccgcctacggtgaagctgcaaatgtgtttgggaagccaaagaagaacacagacttcactgcatacagtggggatgggttcattgtgcaggtgccagctaaatggaacccaagcagagaggtagagtatccaggacaagtccttaggtatgaagacaactttgacgccactagtaatctcaatgtcatggtcactcctactgacaagaagtccatcactgactatggttcccctgaagagttcctctctcaggtcaactatctcctaggtaaacaagcttactttggtgaaactgcctctgagggaggttttgacaacaatgcagtggcgacagcaaacattttggacacaaacattcaggacgttggtgggaaaccatactattacttgtcggtgttgacaagaacagcagatggagacgaaggcggtaagcatcagctgatcacagccactgtgaatggagggaagctatatatctgcaaagcacaagctggagacaagaggtggttcaagggagccaataaattcgtcgagaaagcagccacttctttcagtgttgcttaa

SEQ ID NO: 477 - protein, 263 aa, Brassica napus
MAYSACFLHQSALASSAARSSSSNSSQRHLSLSKPVQIVCKAQQHHEDDNSAVSRRLALTLLVGAAAVGSKVSPADAAYGEAANVFGKPKKNTDFTAYSGDGFIVQVPAKWNPSREVEYPGQVLRYEDNFDATSNLNVMVTPTDKKSITDYGSPEEFLSQVNYLLGKQAYFGETASEGGFDNNAVATANILDTNIQDVGGKPYYYLSVLTRTADGDEGGKHQLITATVNGGKLYICKAQAGDKRWFKGANKFVEKAATSFSVA

SEQ ID NO: 478 - DNA, 792 bp, Brassica napus
  CDS (1)..(792)
atggcgtacagcgcgtgtttcctacatcagagcgcactggcctcctccgccgctcgatcatcatcttcctcctcatcccagcgctacgtttcactctccaaacccgtccaggtagtgtgtaaagctcaacagtctcatgaagacgataatcccgccgtctctcgccgtctcgccctcacactcctcgtcggcgccgctgccgttggttccaaagtgtctcctgccgatgccgcctatggtgaagctgcaaatgtgtttgggaagccaaagaaaaacacagacttcacgccatacaatggagatggattccaagtgcaggttccagctaaatggaacccaagcagagaggtagagtatccaggacaagtccttaggtacgaagacaactttgatgctactagcaatctcaatgtcatggtcactcctaccgacaagaagtccatcactgattacggctctcctgaagagttcctctctcaggtcaactacctcctagggaaacaagcttacttcggtgagactgcctctgagggaggctttgacaacaatgcagtggcaacagcaaacattctggagacaaatgtttcggacgttggtgggaaaccatactactacttgtccgtgttgacaagaaccgccgatggagacgaaggtggtaagcatcagctgatcacagccaccgtgaacggaggcaagctttacatctgcaaagcacaagctggagacaagaggtggttcaagggagccaacaaatttgtcgagaaagcagccacttctttcagtgttgcttaa

SEQ ID NO: 479 - protein, 263 aa, Brassica napus
MAYSACFLHQSALASSAARSSSSSSSQRYVSLSKPVQVVCKAQQSHEDDNPAVSRRLALTLLVGAAAVGSKVSPADAAYGEAANVFGKPKKNTDFTPYNGDGFQVQVPAKWNPSREVEYPGQVLRYEDNFDATSNLNVMVTPTDKKSITDYGSPEEFLSQVNYLLGKQAYFGETASEGGFDNNAVATANILETNVSDVGGKPYYYLSVLTRTADGDEGGKHQLITATVNGGKLYICKAQAGDKRWFKGANKFVEKAATSFSVA

SEQ ID NO: 480 - DNA, 795 bp, Glycine max
  CDS (1)..(795)
atggcatccacacaatgcttcttgcaccaccatgccctcaccactccaaccagagcttcatcacagcgcttagttgtgagcaccaaaccaaaccacattgtttgcaaggcacagaagcaggttactgtccaagagggtgaggacactactactggccttgtctctcgcaggttggccctcactgtgctcattggtgctgctgctgttggctctaaggtggcacctgctgatgcagcctatggagaagctgccaatgtgtttggaaaaccaaagacaaacacagacttcctttcatacaatgggaatggattcaaactctcaattccctcaaagtggaacccaagcaaagaggttgagtacccaggtcaggttcttagatatgaggacaattttgattcaaccagcaatgttgctgtcatggtcactgcaactgacaagaagtccatcactgactatggttcacctgaggagttcctatctcaggtggattacttgcttggaaaacaagccttctttggccaaactgatgctgagggtggttttgattccaatgctgtggcaactgcaaatatcttggagagttcaacgcctgtcgttgatgggaaacagtactacagtttgactgtgttgacaaggacagctgatggagatgaaggtggcaagcaccagctgattacagcaacagtgaaagatggcaaactatacatttgcaaggctcaagctggagacaagaggtggtttaagggagcaagaagatttgtggagagcacagcaagttctttcagtgttgcctaa

SEQ ID NO: 481 - protein, 264 aa, Glycine max
MASTQCFLHHHALTTPTRASSQRLVVSTKPNHIVCKAQKQVTVQEGEDTTTGLVSRRLALTVLIGAAAVGSKVAPADAAYGEAANVFGKPKTNTDFLSYNGNGFKLSIPSKWNPSKEVEYPGQVLRYEDNFDSTSNVAVMVTATDKKSITDYGSPEEFLSQVDYLLGKQAFFGQTDAEGGFDSNAVATANILESSTPVVDGKQYYSLTVLTRTADGDEGGKHQLITATVKDGKLYICKAQAGDKRWFKGARRFVESTASSFSVA

SEQ ID NO: 482 - DNA, 780 bp, Hordeum vulgare
  CDS (1)..(780)
atggcgtccacctcctgcttcctccaccagtccaccgcgcgcctggctgcctcggcgcgccctgctcccgccgtcgggcgcacccagctgttcgtctgcaaggcgcacaagaatgacgaggctgcatctgacgctgctgtcgtcaccagccggcgcgccgcgctgtccctcctcgccggtgccgccgccgtcgccgtcaaggtctctcccgccgctgccgcctacggagaagcagcgaacgtgttcggcaaggcgaagaagaacacggacttcgtggcgtacagcggcgaggggttcaaactgatgatcccggccaagtggaaccccagcaaggagcgtgagttccctgggcaggtgctccgttacgaggacaacttcgacgccaccagcaacctctccgttataatcaaccccaccaccaagaagaccatcaccgactacggttcccctgaggagttcctctcccaggtcggcttcctcctcggccagcagtcctacggcggcaagaccgactccgagggcggcttcgagtcagacgctgtggcgacggccaacgtgctcgagagctcggcgccggtggtggacggtaagcagtactacagcataacggtgctcaccaggaccgcggacggagacgagggagggaagcaccagctcatcaccgccaccgtcgccgacggcaagctctacgtctgcaaggcgcaagccggagacaagaggtggttcaagggcgccaagaagttcgtcgagaacgccgcaggatccttcagtgtcgcataa

SEQ ID NO: 483 - protein, 259 aa, Hordeum vulgare
MASTSCFLHQSTARLAASARPAPAVGRTQLFVCKAHKNDEAASDAAVVTSRRAALSLLAGAAAVAVKVSPAAAAYGEAANVFGKAKKNTDFVAYSGEGFKLMIPAKWNPSKEREFPGQVLRYEDNFDATSNLSVIINPTTKKTITDYGSPEEFLSQVGFLLGQQSYGGKTDSEGGFESDAVATANVLESSAPVVDGKQYYSITVLTRTADGDEGGKHQLITATVADGKLYVCKAQAGDKRWFKGAKKFVENAAGSFSVA

SEQ ID NO: 484 - DNA, 801 bp, Linum usitatissimum
  CDS (1)..(801)
atggcatccacagcatgcttcctccaccacgccgcactcaccacctccaccaggacctccgctgccggtcaacgccttcaatctccttcctcctcccctgccgcagccaggctagtctgccgcgctcagaaacagcagtccactgaagatcaggacaccggcgccgtgtctcgtagattcgccctcactctcctcgccggagctgccgcaatcggatccaagaccgcccccgccgaggccgcctatggcgaaaccgcgaacattttcgggaagccgaagacgaacactgagttccaggagtacagtggagcagggttcaagctctcgatcccctccaagtggaaccctagcaaagaggttgagtatccaggtcaggtgatgagatacgaagacaacttcgacgccaacagctacctcgctgtgatggttaaccctactgacaaaaaatccatcaccgattacggatcccctgaagacttcctttctcaggtcgccttcttgctcggaaagcaggcctacttcggcaagaccgattctgagggagggttccagtcaggggaggtggccactgccaacatcctggagacatcggcaccggtggtgggaggaaagcagtactacatcgtgtcggtgctgacgaggacggccgacggagacgaaggagggaagcaccagctgatcagcgctacggtgacagatgggaagctttacatttgcaaggcacaagctggagacaagaggtggttcaaaggtgctaggaagttcgttgagagtgctgctacttccttcagcgtcgcctaa

SEQ ID NO: 485 - protein, 266 aa, Linum usitatissimum
MASTACFLHHAALTTSTRTSAAGQRLQSPSSSPAAARLVCRAQKQQSTEDQDTGAVSRRFALTLLAGAAAIGSKTAPAEAAYGETANIFGKPKTNTEFQEYSGAGFKLSIPSKWNPSKEVEYPGQVMRYEDNFDANSYLAVMVNPTDKKSITDYGSPEDFLSQVAFLLGKQAYFGKTDSEGGFQSGEVATANILETSAPVVGGKQYYIVSVLTRTADGDEGGKHQLISATVTDGKLYICKAQAGDKRWFKGARKFVESAATSFSVA

SEQ ID NO: 486 - DNA, 783 bp, Zea mays
  CDS (1)..(783)
atggcgtccacctcctgctgcctcctccaccaggcaaccgcccgcctcagcgcgtcaccgcgcctggccaccgccccgccgcgcagcgcccagctgctcgtctgcaaagcccagaagcaggacgccgccgcggaccagagagacgtatcgcgccgcgccgagctcgcgctcctcgacggagtcaccgccgccgccggcgccaaggtggatcccgccaccgcagcatacggaaaagcagacaacgtgttaaccaagcccaaggagagcacggagtacatcgcgtacagcggcgacagcttcaagctgctgatcccgtccaagtggaaccccaacaaggagcgggagttcccccgccaggtgctccgctacgaggacaacttcgacgccaacagcaacgtgtccgtcatcatccagcccacgtccaagaagaccatcgccgactacggctctcccgaggagttcctctcccaggtcgactacctgctcggcaggcaggcctacggcggcaagaccgactccgagggcgggttcgagaccggcgccgtggccaccgccaacgtcctggagagctccacccccgtgatcgacggcaagcagtactacgccgtgtccgtgctcaccaggacggcggacggcgacgagggcggcaagcaccagctcatcgcggccaccgtctccgacggcaagctctacatctgcaaggcgcaggccggcgacaagaggtggttcaagggcgccaggaagggagtcgagaaggccgccgcctccttcagcgtcgcatga

SEQ ID NO: 487 - protein, 260 aa, Zea mays
MASTSCCLLHQATARLSASPRLATAPPRSAQLLVCKAQKQDAAADQRDVSRRAELALLDGVTAAAGAKVDPATAAYGKADNVLTKPKESTEYIAYSGDSFKLLIPSKWNPNKEREFPRQVLRYEDNFDANSNVSVIIQPTSKKTIADYGSPEEFLSQVDYLLGRQAYGGKTDSEGGFETGAVATANVLESSTPVIDGKQYYAVSVLTRTADGDEGGKHQLIAATVSDGKLYICKAQAGDKRWFKGARKGVEKAAASFSVA

SEQ ID NO: 488 - DNA, 777 bp, Zea mays
  CDS (1)..(777)
atggcgtccacctcgtgcttcctccaccagtccaccgcccgcgtggccgcgccgtcgccgcgcctcgccgccccgccgcgcagcgcgcaactgttcgtctgcaaggcccagaagcagcaggccgccccggcggagagcgacgtgtcgcgccgcgccgcgctcgcgctcctcgccggcgtcgcggccgtcggcgccaaggcgagccccgccgccgccgcctacggggaagcagccaacgtgttcggcaagaccaagaagaacacggacttcatctcctacgtcggcgacggcttcaagctgctgatcccgtccaagtggaaccccagcaaggagcgggagttccccgggcaggtgctccgctacgaggacaacttcgacgccaacagcaacgtgtccgtcatcatccagcccacctccaagaagaccatcaccgagtacggctcccccgaggagttcctctcgcaggtcgactacctgctcggcaagcaggcctacggcggcaagaccgactccgagggcgggttcgagaccgacgccgtggccaccgccaacgtgctggagagctccacccccgtggtggacggcaagcagtactacagcatcaccgtgctgaccaggacggcggacggcgacgagggcggcaagcaccagctcatcaccgccaccgtctccgacggcaagctctacatctgcaaggcgcaggccggcgacaagcggtggttcaagggcgccaggaagggcgtcgagaaggccgccgcctccttcagcgtcgcgtga

SEQ ID NO: 489 - protein, 258 aa, Zea mays
MASTSCFLHQSTARVAAPSPRLAAPPRSAQLFVCKAQKQQAAPAESDVSRRAALALLAGVAAVGAKASPAAAAYGEAANVFGKTKKNTDFISYVGDGFKLLIPSKWNPSKEREFPGQVLRYEDNFDANSNVSVIIQPTSKKTITEYGSPEEFLSQVDYLLGKQAYGGKTDSEGGFETDAVATANVLESSTPVVDGKQYYSITVLTRTADGDEGGKHQLITATVSDGKLYICKAQAGDKRWFKGARKGVEKAAASFSVA

SEQ ID NO: 490 - DNA, 780 bp, Zea mays
  CDS (1)..(780)
atggcgtccacctcgtgcttcctccaccagtccaccgcccgcgtggccgcgccgtcgccgcgcctcgccgccccgccgcgcagcgcccagctgctcgtctgcaaggcccggaagcaggaagccgccgcggaccagagcgacgtctcgcgccgcgccgcgctcgcgctcctcgccggcgtcacggccgccgccggcgccaaggtgggtcccgccgccgcggcatacggagaagcagccaacgtgttcggcaagcccaaggcgagcacggagtacatcgcgtacagcggcgacggcttcaagctgctgatcccgtccaagtggaaccccagcaaggagcgggagttccccgggcaggtgctccgctacgaggacaacttcgacgccaacagcaacgtgtccgtcatcatccagcccacgtccaagaagaccatcgccgactacggctctcccgaggagttcctctcccaggtcgactacctgctcggcaggcaggcctacggcggcaagaccgactccgagggcgggttcgagaccggcgccgtggccaccgccaacgtcctggagagctccacccccgtgatcgacggcaagcagtactacgccgtgtccgtgctcaccaggacggcggacggcgacgagggcggcaagcaccagctcatcgcggccaccgtctccgacggcaagctctacatctgcaaggcgcaggccggcgacaagaggtggttcaagggcgccaggaagggagtcgagaaggccgcctcctccttcagcgtcgcatga

SEQ ID NO: 491 - protein, 259 aa, Zea mays
MASTSCFLHQSTARVAAPSPRLAAPPRSAQLLVCKARKQEAAADQSDVSRRAALALLAGVTAAAGAKVGPAAAAYGEAANVFGKPKASTEYIAYSGDGFKLLIPSKWNPSKEREFPGQVLRYEDNFDANSNVSVIIQPTSKKTIADYGSPEEFLSQVDYLLGRQAYGGKTDSEGGFETGAVATANVLESSTPVIDGKQYYAVSVLTRTADGDEGGKHQLIAATVSDGKLYICKAQAGDKRWFKGARKGVEKAASSFSVA

SEQ ID NO: 492 - DNA, 777 bp, Zea mays
  CDS (1)..(777)
atggcgtccacctcgtgcttcctccaccagtccaccgcccgcgtggccgcgccgtcgccgcgcctcgccgccccgccgcgcagcgcgcaactgttcgtctgcaaggcccagaagcagcaggccgccgcggcggagagcgacgtgtcgcgccgcgccgcgctcgcgctcctcgccggcgtcgcggccgtcggcgccaaggcgagccccgccgccgccgcctacggggaagcagccaacgtgttcggcaagaccaagaagaacacggacttcatctcctacgtcggcgacggcttcaagctgctgatcccgtccaagtggaaccccagcaaggagcgggagttccccgggcaggtgctccgctacgaggacaacttcgacgccaacagcaacgtgtccgtcatcatccagcccacctccaagaaggccatcaccgagtacggctcccccgaggagttcctctcgcaggtcgactacctgctcggcaagcaggcctacggcggcaagaccgactccgagggcgggttcgagaccgacgccgtggccaccgccaacgtgctggagagctccacccccgtggtggacggcaagcagtactacagcatcaccgtgctgaccaggacggcggacggcgacgagggcggcaagcaccagctcatcaccgccaccgtctccgacggcaagctctacatctgcaaggcgcaggccggcgacaagcggtggttcaagggcgccaggaagggcgtcgagaaggccgccgcctccttcagcgtcgcgtga

SEQ ID NO: 493 - protein, 258 aa, Zea mays
MASTSCFLHQSTARVAAPSPRLAAPPRSAQLFVCKAQKQQAAAAESDVSRRAALALLAGVAAVGAKASPAAAAYGEAANVFGKTKKNTDFISYVGDGFKLLIPSKWNPSKEREFPGQVLRYEDNFDANSNVSVIIQPTSKKAITEYGSPEEFLSQVDYLLGKQAYGGKTDSEGGFETDAVATANVLESSTPVVDGKQYYSITVLTRTADGDEGGKHQLITATVSDGKLYICKAQAGDKRWFKGARKGVEKAAASFSVA

SEQ ID NO: 494 - DNA, 21 bp, Artificial sequence
  primer
atggcgtacagtgcgtgtttc

SEQ ID NO: 495 - DNA, 20 bp, Artificial sequence
  primer
tcaagcaacactgaaagaag

SEQ ID NO: 496 - protein, 284 aa, Artificial sequence
  consensus sequence
  Variant (3)..(5): Xaa in position 3 to 5 is any amino acid
  Variant (6)..(6): Xaa in position 6 is any or no amino acid
  Variant (11)..(33): Xaa in position 11 to 33 is any amino acid
  Variant (34)..(45): Xaa in position 34 to 45 is any or no amino acid
  Variant (47)..(56): Xaa in position 47 to 56 is any amino acid
  Variant (57)..(67): Xaa in position 57 to 67 is any or no amino acid
  Variant (70)..(70): Xaa in position 70 is any amino acid
  Variant (73)..(74): Xaa in position 73 to 74 is any amino acid
  Variant (76)..(76): Xaa in position 76 is any amino acid
  Variant (78)..(78): Xaa in position 78 is any amino acid
  Variant (79)..(79): Xaa in position 79 is any or no amino acid
  Variant (82)..(82): Xaa in position 82 is any amino acid
  Variant (84)..(84): Xaa in position 84 is any amino acid
  Variant (87)..(87): Xaa in position 87 is any amino acid
  Variant (90)..(90): Xaa in position 90 is any amino acid
  Variant (105)..(106): Xaa in position 105 to 106 is any amino acid
  Variant (108)..(108): Xaa in position 108 is any amino acid
  Variant (110)..(111): Xaa in position 110 to 111 is any amino acid
  Variant (113)..(113): Xaa in position 113 is any amino acid
  Variant (115)..(115): Xaa in position 115 is any amino acid
  Variant (118)..(121): Xaa in position 118 to 121 is any amino acid
  Variant (123)..(123): Xaa in position 123 is any amino acid
  Variant (131)..(131): Xaa in position 131 is any amino acid
  Variant (133)..(133): Xaa in position 133 is any amino acid
  Variant (146)..(147): Xaa in position 146 to 147 is any amino acid
  Variant (150)..(151): Xaa in position 150 to 151 is any amino acid
  Variant (153)..(155): Xaa in position 153 to 155 is any amino acid
  Variant (158)..(158): Xaa in position 158 is any amino acid
  Variant (161)..(161): Xaa in position 161 is any amino acid
  Variant (163)..(163): Xaa in position 163 is any amino acid
  Variant (165)..(165): Xaa in position 165 is any amino acid
  Variant (170)..(170): Xaa in position 170 is any amino acid
  Variant (174)..(174): Xaa in position 174 is any amino acid
  Variant (176)..(177): Xaa in position 176 to 177 is any amino acid
  Variant (185)..(185): Xaa in position 185 is any amino acid
  Variant (187)..(187): Xaa in position 187 is any amino acid
  Variant (189)..(189): Xaa in position 189 is any amino acid
  Variant (195)..(197): Xaa in position 195 to 197 is any amino acid
  Variant (203)..(204): Xaa in position 203 to 204 is any amino acid
  Variant (206)..(206): Xaa in position 206 is any amino acid
  Variant (209)..(215): Xaa in position 209 to 215 is any amino acid
  Variant (218)..(218): Xaa in position 218 is any amino acid
  Variant (221)..(221): Xaa in position 221 is any amino acid
  Variant (222)..(223): Xaa in position 222 to 223 is any or no amino acid
  Variant (236)..(240): Xaa in position 236 to 240 is any amino acid
  Variant (246)..(246): Xaa in position 246 is any amino acid
  Variant (250)..(251): Xaa in position 250 to 251 is any amino acid
  Variant (271)..(271): Xaa in position 271 is any amino acid
  Variant (276)..(277): Xaa in position 276 to 277 is any amino acid
  Variant (279)..(279): Xaa in position 279 is any amino acid
MAXXXXCFLHXXXXXXXXXXXXXXXXXXXXXXXXXXXXXXXXXXXCXXXXXXXXXXXXXXXXXXXXXRRXALXXLXGXXAAXGXKVXPAXAAYGEAANVFGKPKXXTXFXXYXGXGFXXXXPXKWNPSKEXEXPGQVLRYEDNFDXXSNXXVXXXPTXKKXIXDXGSPEXFLSXVXXLLGKQAYXGXTXSEGGFXXXAVATAXXNXLEXXXXXXXGKXYYXXXVLTRTADGDEGGXXXXXKHQLIXATVXXGKLYICKAQAGDKRWFKGAXKFVEXXAXSFSVA

SEQ ID NO: 497 - protein, 61 aa, Artificial sequence
  protein pattern
  Variant (2)..(2): Xaa in position 2 is Ala or Ser
  Variant (6)..(6): Xaa in position 6 is any amino acid
  Variant (7)..(7): Xaa in position 7 is Asn or Ser
  Variant (8)..(8): Xaa in position 8 is Lys or Arg
  Variant (10)..(10): Xaa in position 10 is any amino acid
  Variant (12)..(12): Xaa in position 12 is Phe or Tyr
  Variant (19)..(19): Xaa in position 19 is Phe or Tyr
  Variant (23)..(23): Xaa in position 23 is any amino acid
  Variant (25)..(25): Xaa in position 25 is Ala, Ser, Thr or Val
  Variant (26)..(26): Xaa in position 26 is Asn, Thr or Val
  Variant (29)..(30): Xaa in position 29 to 30 is any or no amino acid
  Variant (32)..(35): Xaa in position 32 to 35 is any amino acid
  Variant (36)..(37): Xaa in position 36 to 37 is any or no amino acid
  Variant (39)..(39): Xaa in position 39 is Asp, Ser or Thr
  Variant (42)..(42): Xaa in position 42 is Ala, Ser or Thr
  Variant (44)..(44): Xaa in position 44 is any amino acid
  Variant (45)..(45): Xaa in position 45 is Asp or Glu
  Variant (46)..(46): Xaa in position 46 is Phe or Tyr
  Variant (48)..(48): Xaa in position 48 is Pro, Ser or Thr
  Variant (50)..(50): Xaa in position 50 is Glu, Gly or Gln
  Variant (51)..(51): Xaa in position 51 is Asp, Glu or Gln
  Variant (54)..(54): Xaa in position 54 is Ala, Gly, Ser or Thr
  Variant (55)..(55): Xaa in position 55 is any amino acid
  Variant (57)..(57): Xaa in position 57 is Asp, Gly or Asn
  Variant (58)..(58): Xaa in position 58 is Phe or Tyr
PXKWNXXXEXEXPGQVLRXEDNXDXXSNXXVXXXXXXTXKKXIXXXGXPXXFLXXVXXLLG

SEQ ID NO: 498 - protein, 22 aa, Artificial sequence
  protein pattern
  Variant (2)..(2): Xaa in position 2 is Lys or Arg
  Variant (4)..(4): Xaa in position 4 is any amino acid
  Variant (5)..(5): Xaa in position 5 is Ile, Leu or Val
  Variant (6)..(6): Xaa in position 6 is Ile or Val
  Variant (7)..(7): Xaa in position 7 is Ala, Ser or Thr
  Variant (11)..(11): Xaa in position 11 is any amino acid
  Variant (12)..(12): Xaa in position 12 is Asp or Gly
  Variant (17)..(17): Xaa in position 17 is Ile or Val
GXHXXXXATVXXGKLYXCKAQA

SEQ ID NO: 499 - protein, 20 aa, Artificial sequence
  protein pattern
  Variant (8)..(8): Xaa in position 8 is any amino acid
  Variant (10)..(10): Xaa in position 10 is any amino acid
  Variant (13)..(13): Xaa in position 13 is any amino acid
  Variant (14)..(14): Xaa in position 14 is any or no amino acid
  Variant (16)..(16): Xaa in position 16 is Ala, Gly, Ser or Thr
  Variant (19)..(19): Xaa in position 19 is Asn or Ser
  Variant (20)..(20): Xaa in position 20 is Ala, Ile, Leu or Val
KRWFKGAXKXVEXXAXSFXX

SEQ ID NO: 500 - protein, 21 aa, Artificial sequence
  protein pattern
  Variant (3)..(3): Xaa in position 3 is Asp, Glu, Pro or Gln
  Variant (6)..(7): Xaa in position 6 to 7 is any or no amino acid
  Variant (9)..(10): Xaa in position 9 to 10 is any or no amino acid
GKXYYXXSXXVLTRTADGDEG

SEQ ID NO: 501 - protein, 22 aa, Artificial sequence
  protein pattern
  Variant (2)..(2): Xaa in position 2 is Ala or Pro
  Variant (3)..(3): Xaa in position 3 is Ala, Asp, Glu or Asn
  Variant (15)..(16): Xaa in position 15 to 16 is any or no amino acid
  Variant (18)..(18): Xaa in position 18 is any or no amino acid
  Variant (20)..(20): Xaa in position 20 is Ala, Asp, Glu, Asn, Ser or Thr
  Variant (21)..(21): Xaa in position 21 is Asp, Asn, Ser or Thr
  Variant (22)..(22): Xaa in position 22 is Asp, Glu or Thr
PXXAAYGEAANVFGXXKXKXXX

SEQ ID NO: 502 - protein, 15 aa, Artificial sequence
  protein pattern
  Variant (5)..(5): Xaa in position 5 is any amino acid
  Variant (6)..(6): Xaa in position 6 is Ala, Asn, Pro, Ser or Thr
  Variant (7)..(7): Xaa in position 7 is Asp, Gly or Asn
  Variant (11)..(11): Xaa in position 11 is any amino acid
  Variant (13)..(13): Xaa in position 13 is Ala, Asn or Ser
  Variant (14)..(14): Xaa in position 14 is Ile, Leu or Val
EGGFXXXAVAXAXXL

SEQ ID NO: 503 - protein, 16 aa, Artificial sequence
  protein pattern
  Variant (4)..(5): Xaa in position 4 to 5 is any or no amino acid
  Variant (9)..(10): Xaa in position 9 to 10 is any amino acid
  Variant (11)..(12): Xaa in position 11 to 12 is any or no amino acid
  Variant (14)..(14): Xaa in position 14 is Ala, Gly, Ser, Thr or Val
  Variant (15)..(15): Xaa in position 15 is any amino acid
SRRXXLALXXXXGXXA

SEQ ID NO: 504 - DNA, 927 bp, Arabidopsis thaliana
  CDS (1)..(927)
atgggggaactaaacggagtcatcattccgactatagacttggaagaggtttctgataagattctgaatcagaaaatccgtgaagccagtgagagatggggatgtttcagggtgataaaccatggagtttcattgtctttgatggctgagatgaagaagactgttattgatctctttcaacgtccatacgaggtgaaagtgcgtaacaccgatgtgctcctagggagtggttacagagctccaaacgaaatcaatccttactatgaagcattaggtctctatgacatggcttctcctcatgctgtcaataccttttgtgaccaactcgaagcttctgcagatcaaagggagattatggtgaagtatgcgaaggctatcaatggacttgcaacggatttagcgaggaaattagcagagagttacgggctggttgagaccgactttttcaaagaatggccgagccagtttcggattaacaaatatcattttaaacccgaaacagtcgggaaactcggtgtgcaactacacacggattcagggttcttgacgattcttcaagatgatgaaaatgttggtggacttgaagctatggacaattcttcaggaacctttttccccatagacccgttgccaaacacgcttgctatcaacctcggggacatggctacgatatggagcaacggaagattgtgcaatgtgaagcatagagtgcaatgcaaagaagcaacaatgaggtattccatcgcctcgttcttattaggaccaatggatacagatttggaacctccaagtgagtttgtggatgcagaacatccgcgactatacaagcctattagtcacgaaggggtacgaaatattagaatgactaaaaaattgcatgatggagaagctctcaagcttataacccatgcaggactagataaatga

SEQ ID NO: 505 - protein, 308 aa, Arabidopsis thaliana
MGELNGVIIPTIDLEEVSDKILNQKIREASERWGCFRVINHGVSLSLMAEMKKTVIDLFQRPYEVKVRNTDVLLGSGYRAPNEINPYYEALGLYDMASPHAVNTFCDQLEASADQREIMVKYAKAINGLATDLARKLAESYGLVETDFFKEWPSQFRINKYHFKPETVGKLGVQLHTDSGFLTILQDDENVGGLEAMDNSSGTFFPIDPLPNTLAINLGDMATIWSNGRLCNVKHRVQCKEATMRYSIASFLLGPMDTDLEPPSEFVDAEHPRLYKPISHEGVRNIRMTKKLHDGEALKLITHAGLDK

SEQ ID NO: 506 - DNA, 903 bp, Oryza sativa
  CDS (1)..(903)
atggtggagatcccggcgatcgacctgcggctggccggcggcggcggcggcgcggaggagacggcgaggctgcgcgacgcgtgcgcgcggctgggctgcttccgggtgtcggggcacggcgtgccgccggggctccaggccgagatgaaggccgcggtgcgcgcgctcttcgacctccccgacgacgccaagcgccgcaacgccgacatcatcccgggcagcggctacgtcccgcccggcacagccaacccgctctacgaggccttcggcctctgcgacgccgccgcccccgccgacgtcgacgccttctgcgcccgcctcgacgcgccgccccacgtcagggagaccgtgaaggcgtacgccgagaggatgcactcgctgatcgtggacgtcgccggcaaggtcgccgcgagcctggggctgcacggcgcctcgttccaggactggccgtgccagttccgcatgaacaggtacaactacacgcaggactccgtgggctcccccggcgtgcaggtccacacggactccggcttcctcaccgtgctccaggaggacgagtgcgttggcgggctcgaggtgctcgaccccgccgccggcgagttcgtccccgtcgaccccctccccggctcgttcgtcgtcaacgtcggcgacgtcggccaggcgtggagcaacgggaggctgcacaacgtgaagcacagggtgcagtgcgtggcggcggtgccgcgcgtgtcgatcgccatgttcctgctggcgcccaaggacgacacggtgagcgcgccgggggagctggtggacggcgagcacccgcgccggtacagggagttcaagtacgacgactaccggaggctccggctgtccaccggcgagcgcgccggcgaggcgctcgcgcgtctggcggcctga

SEQ ID NO: 507 - protein, 300 aa, Oryza sativa
MVEIPAIDLRLAGGGGGAEETARLRDACARLGCFRVSGHGVPPGLQAEMKAAVRALFDLPDDAKRRNADIIPGSGYVPPGTANPLYEAFGLCDAAAPADVDAFCARLDAPPHVRETVKAYAERMHSLIVDVAGKVAASLGLHGASFQDWPCQFRMNRYNYTQDSVGSPGVQVHTDSGFLTVLQEDECVGGLEVLDPAAGEFVPVDPLPGSFVVNVGDVGQAWSNGRLHNVKHRVQCVAAVPRVSIAMFLLAPKDDTVSAPGELVDGEHPRRYREFKYDDYRRLRLSTGERAGEALARLAA

SEQ ID NO: 508 - DNA, 900 bp, Glycine max
  CDS (1)..(900)
atggaggaaattgttccagtggtggatttccagaggctttcagaggaagaggagcgcaagaagctgagaaaaacatgtgagaaaccagggtgtttcagaatcatcaaccactcaattccactaacactcatggctgacatgaagtcagtggttaaatacttgcatgaccttcccgcggaaatcaaaatgcgcaacaaaccctcctccgtccctgagagtggctatagggcggcatcgccaacaagtcctctatacgagggcatgggaatatatgacatgcatgcatcaccacaagcatttgaagatttctgctccaacttgaatgtgtcaccccgtcacaggcaaataataaaggaatatggtcaagcaattcatgacttggcatcaaatgtatcccaaaaaatggctgagtctttgggtatagtcgataatgatttcaaggactggccattcattttgaggactattaaatttagttttaccccagatgttataggctccatggcagcacaattgcactcagatacaggatttatcactctacttcaagatgatgaacatgttagtggtcttgagatgatagatgattttggcacatttaaggcagttcctcccataccaggggccttcctttgcattgttggagatgttggacatgtttggagcaatggaaatttttggaatgctagacatcgtgtaatatgcaaggaaacgggtactggttattcatttggtgcatatatgttatcaccaagggatggtaatgttgaggcgcctaaaaaattggtggaagttgaccatgtacaacgctatcgaccatttaagtacgaagatttgagggatttcaaaatcaccacaggaaagagagttgaagtccttgatcaatatcgcatttgttag

SEQ ID NO: 509 - protein, 299 aa, Glycine max
MEEIVPVVDFQRLSEEEERKKLRKTCEKPGCFRIINHSIPLTLMADMKSVVKYLHDLPAEIKMRNKPSSVPESGYRAASPTSPLYEGMGIYDMHASPQAFEDFCSNLNVSPRHRQIIKEYGQAIHDLASNVSQKMAESLGIVDNDFKDWPFILRTIKFSFTPDVIGSMAAQLHSDTGFITLLQDDEHVSGLEMIDDFGTFKAVPPIPGAFLCIVGDVGHVWSNGNFWNARHRVICKETGTGYSFGAYMLSPRDGNVEAPKKLVEVDHVQRYRPFKYEDLRDFKITTGKRVEVLDQYRIC

SEQ ID NO: 510 - DNA, 900 bp, Glycine max
  CDS (1)..(900)
atggaggcgattgttccagtggtggatttccagaggctttcagaggaagaggagcgcaagaagctgagaaaaacatgtgagaaaccagggtgtttcagaatcatcaaccactcaattccactaacactcatggctgacatgaagtcagtggttaaatacttgcatgaccttcccacggaaatcaaaatgcgcaacaaaccctccgtccctgagagtggctatagggcggcatcgccaacaagtcctctatacgagggcatgggaatatatgacatgcatgcctcaccacaagcatttgaagatttctgctccaacttgaatgtgtcaccccgtcacaggcaaataataaaggaatatggtcaagcaattcatgacttggcatcaaatttatcacaaaaaatggctgagtctttgggtataatggataatgatttcaaggactggccattcattttgaggactattaaatatagttttaccccagatgttataggctccacgggagcacaattgcactcagatacaggatttatcactctacttcaagatgatgaacatgttagtggtcttgagatgatggatgattttggctcatttaaggcagttcctcccataccaggggccttcctttgcattgttggagatgttggacatgtttggagcaatggaaaattttggaatgccagacatcgtgtaatatgcaaggaaacgggtactcgttattcatttggtgcatttatgttatcaccaagggatggtaatgttgaggccccaaaaaaattggtggaagttgaccatgtacaacgctatcgaccatttaagtacgaagatttgagggatttcagaatcaccacaggaaagagggatggcgaagtccttgatcaatatcgcatttgttag

SEQ ID NO: 511 - protein, 299 aa, Glycine max
MEAIVPVVDFQRLSEEEERKKLRKTCEKPGCFRIINHSIPLTLMADMKSVVKYLHDLPTEIKMRNKPSVPESGYRAASPTSPLYEGMGIYDMHASPQAFEDFCSNLNVSPRHRQIIKEYGQAIHDLASNLSQKMAESLGIMDNDFKDWPFILRTIKYSFTPDVIGSTGAQLHSDTGFITLLQDDEHVSGLEMMDDFGSFKAVPPIPGAFLCIVGDVGHVWSNGKFWNARHRVICKETGTRYSFGAFMLSPRDGNVEAPKKLVEVDHVQRYRPFKYEDLRDFRITTGKRDGEVLDQYRIC

SEQ ID NO: 512 - DNA, 900 bp, Glycine max
  CDS (1)..(900)
atggaggcgattgttccagtggtggatttccagaggctttcagaggaagaggagcgcaagaagctgagaaaaacatgtgagaaaccagggtgtttcagaatcatcaaccactcaattccactaacactcatggctgacatgaagtcagtggttaaatacttgcatgaccttcccacggaaatcaaaatgcgcaacaaaccctccgtccctgagagtggctatagggcggcaatgccaacaagtcctctatacgagggcatgggaatatatgacatgcatgcctcaccacaagcatttgaagatttctgctccaacttgaatgtgtcaccccgtcacaggcaaataataaaggaatatggtcaagcaattcatgacttggcatcaaatttatcacaaaaaatggctgagtctttgggtataatggataatgatttcaaggactggccattcattttgaggactattaaatatagttttaccccagatgttataggctccacgggagcacaattgcactcagatacaggatttatcactctacttcaagatgatgaacatgttagtggtcttgagatgatggatgattttggctcatttaaggcagttcctcccataccaggggccttcctttgcattgttggagatgttggacatgtttggagcaatggaaaattttggaatgccagacatcgtgtaatatgcaaggaaacgggtactcgttattcatttggtgcatttatgttatcaccaagggatggtaatgttgaggccccaaaaaaattggtggaagttgaccatgtacaacgctatcgaccatttaagtacgaagatttgagggatttcagaatcaccacaggaaagagggatggcgaagtccttgatcaatatcgcatttgttag

SEQ ID NO: 513 - protein, 299 aa, Glycine max
MEAIVPVVDFQRLSEEEERKKLRKTCEKPGCFRIINHSIPLTLMADMKSVVKYLHDLPTEIKMRNKPSVPESGYRAAMPTSPLYEGMGIYDMHASPQAFEDFCSNLNVSPRHRQIIKEYGQAIHDLASNLSQKMAESLGIMDNDFKDWPFILRTIKYSFTPDVIGSTGAQLHSDTGFITLLQDDEHVSGLEMMDDFGSFKAVPPIPGAFLCIVGDVGHVWSNGKFWNARHRVICKETGTRYSFGAFMLSPRDGNVEAPKKLVEVDHVQRYRPFKYEDLRDFRITTGKRDGEVLDQYRIC

SEQ ID NO: 514 - DNA, 900 bp, Glycine max
  CDS (1)..(900)
atggaggagaccattccagtgattgatgtggagaagattaattctgatgaaggagaatgcaagaagctaagagaagcatgtgaaagatggggttgtttcaggatcattaaccactctattcctgcaaccctcatggctgacatgaaaaaagtcattgaagctcttcttgatcttcctatggagatcaagaagcgcaacacagaagtcattgctggcagtggttacatggcaccaagcaaagtcaaccctttctatgaagccttgggcctctatgacttgggttcatcacaggctatgcacaatttctgctctcagcttgatgcttcacaccaccagaggcaaatattggaggcatatggccaagccattcatggtttggcagtgaaaataggacaaaaaatggctgaatctctaggcgtactagttgctgattttgaggactggccatgccagttcagaattaacaaatataacttcgccccagaagcggtagggtccactggtgttcaaatacacactgattcaggcttcctaactattcttcaagatgatgaaaatgttggaggccttgaagtgctccacagttctacttcttttgtgccaatccctcttttccctggatcccttctagtcaatcttggagatattgctcgtgtgtggagcaatggaaggttttgcaatttgacacaccgggtacaatgcaaggaagcgaccaaacgtttttcaattgctacatttatgatagcacccaggaataggaatgttgaggccccagcagaattggtggaccatgatcacccacgtttgtatcaaccttttatttatgaagactacaggaagctcagaattagcaataagatgcacactggtgaagccctggagttattacgcttggcctag

SEQ ID NO: 515 - protein, 299 aa, Glycine max
MEETIPVIDVEKINSDEGECKKLREACERWGCFRIINHSIPATLMADMKKVIEALLDLPMEIKKRNTEVIAGSGYMAPSKVNPFYEALGLYDLGSSQAMHNFCSQLDASHHQRQILEAYGQAIHGLAVKIGQKMAESLGVLVADFEDWPCQFRINKYNFAPEAVGSTGVQIHTDSGFLTILQDDENVGGLEVLHSSTSFVPIPLFPGSLLVNLGDIARVWSNGRFCNLTHRVQCKEATKRFSIATFMIAPRNRNVEAPAELVDHDHPRLYQPFIYEDYRKLRISNKMHTGEALELLRLA

SEQ ID NO: 516 - DNA, 1365 bp, Arabidopsis thaliana
  CDS (192)..(1118)
ataataaagtagacttctgtgaacgcgaaaaaaaaaaaaaaaactgtatccaattttctgatttcgtttttccttctttccttcaataagtaactctacactgaatcaactcctctgatttctcgataaaaatctagaggcaagattccccacggaattaaggtttctttgttaacctctccattgaagatatgggggaactaaacggagtcatcattccgactatagacttggaagaggtttctgataagattctgaatcagaaaatccgtgaagccagtgagagatggggatgtttcagggtgataaaccatggagtttcattgtctttgatggctgagatgaagaagactgttattgatctctttcaacgtccatacgaggtgaaagtgcgtaacaccgatgtgctcctagggagtggttacagagctccaaacgaaatcaatccttactatgaagcattaggtctctatgacatggcttctcctcatgctgtcaataccttttgtgaccaactcgaagcttctgcagatcaaagggagattatggtgaagtatgcgaaggctatcaatggacttgcaacggatttagcgaggaaattagcagagagttacgggctggttgagaccgactttttcaaagaatggccgagccagtttcggattaacaaatatcattttaaacccgaaacagtcgggaaactcggtgtgcaactacacacggattcagggttcttgacgattcttcaagatgatgaaaatgttggaggacttgaagctatggacagttcttcaggaacctttttccccatagacccgttgcctaacacgcttgctatcaacctcggggacatggctacgatatggagcaacggaagattgtgcaatgtgaagcatagagtgcaatgcaaagaagcaacaatgaggtattccatcgcctcgttcttattaggaccaatggatacagatttggaacctccaagtgagtttgtggatgcagaacatccgagattatacaagcctattagtcacgaaggggtacgaaatattagaatgactaaaaaattgcatgatggagaagctctcaagcttataacctatgaagggcaggctagataaatgacctaaatggcattttaagatggcagcgctatggaaccagaaaactgcaatttcttacctaagaatgagaaataattatgtattacctattggattgttgcaatatatgaaaaaaaaaaaattaccttgagatctttgtggatgcaatagtactacgattgatcctctgtttgttggtagtacttgtagagaagaaagaaattatcaaaatcatatttagtaactacagagttaattctgtttt

SEQ ID NO: 517 - protein, 308 aa, Arabidopsis thaliana
MGELNGVIIPTIDLEEVSDKILNQKIREASERWGCFRVINHGVSLSLMAEMKKTVIDLFQRPYEVKVRNTDVLLGSGYRAPNEINPYYEALGLYDMASPHAVNTFCDQLEASADQREIMVKYAKAINGLATDLARKLAESYGLVETDFFKEWPSQFRINKYHFKPETVGKLGVQLHTDSGFLTILQDDENVGGLEAMDSSSGTFFPIDPLPNTLAINLGDMATIWSNGRLCNVKHRVQCKEATMRYSIASFLLGPMDTDLEPPSEFVDAEHPRLYKPISHEGVRNIRMTKKLHDGEALKLITYEGQAR

SEQ ID NO: 518 - DNA, 1257 bp, Zea mays
  CDS (272)..(1171)
gttttctttttgaacgtaactgacagaagctatctgcctagctacggcgtgtcggttgcttgtctcaccaaagcagcgacatggaagcctgacagctcgtcgcgtcgcgccatttccacccaacaaagcggcggcgccaccgcgccagcacgcactgcttctgcttgtgcgtgctcctccgttccgggcacgcctctaaagtctatacagcctcgaatccatcccggccgccgctcctgggggatactacagcgagccgaccgaagcggggatggcggagatccctgtgatcgacctgcgcgtcgcccgctcggcggccgaggagtccgcgcggctgcgagccgcgtgcgagcgcctgggctgcttccgggtgaccggccacggcgtgccctcggtgctcctggcagagatgaaggccgccgtgagcgcgctcttcgacctccccgacgacgccaagcgccgcaacgccgacgtcatcaccggcagcggctacgtcgcccccagcccgaccaacccgctctacgaggccttcgggctcctcgacgccgccgtgcccaccgacgtcgacgccttttgcgcgctcctcgacgcgccgcccaacatcagggagaccgtcaaggcctacgcggagaagatgcacgatgtgatcgttggcgtcgccggcgagctggcgtctagcctggggctagtcgaggagcactcgttccaggactggccgtgccagttccgcatcaacaggtacaactacacgcgggagacggtgggctcctccggcgtgcagacccacacggactcgggcttcctcaccgtgctccatgaggacgagtgtgtcggcggcctcgaggtcctggacccgggcaccggcgagttcgtgcccgtggaccccgtcgcgggctccttcctagtaaacatcggcgacgtcggcacggcgtggagcaacgggaggctgcacaacgtgaagcaccgggtgcggtgcgtcgcacccgtgccgcgcatctccatcgccatgttcctgctcgcacccaaggacgacagcgtgagcgcaccggcggcgttcgtggacgcggaccacccgcgcaggtacaaggtgttcaactacaacgactatcggaggctcagactgtccaccggcgagcacgcaggcgaggcgctcgcacggatggcggcgtgacgtggctggagctgcaaattggattggaagccgagacaagccgttagttatttaccatgcccgtgcgttcacccgcacatcatatt

SEQ ID NO: 519 - protein, 299 aa, Zea mays
MAEIPVIDLRVARSAAEESARLRAACERLGCFRVTGHGVPSVLLAEMKAAVSALFDLPDDAKRRNADVITGSGYVAPSPTNPLYEAFGLLDAAVPTDVDAFCALLDAPPNIRETVKAYAEKMHDVIVGVAGELASSLGLVEEHSFQDWPCQFRINRYNYTRETVGSSGVQTHTDSGFLTVLHEDECVGGLEVLDPGTGEFVPVDPVAGSFLVNIGDVGTAWSNGRLHNVKHRVRCVAPVPRISIAMFLLAPKDDSVSAPAAFVDADHPRRYKVFNYNDYRRLRLSTGEHAGEALARMAA

SEQ ID NO: 520 - DNA, 1080 bp, Gossypium hirsutum
  CDS (87)..(980)
gaagaattcaatacttaaccccccctccgtattttcagttcccatatgaagaattgaaataagcagaggaagtgagtgaaaaaaaaatggataaaacccagagtattccaaccattgatctttcagattttccagcacagtatgagaaactaaggcgatcatctgaagaatggggttgtttcagggtagtcaaccacaacatcccttttgaattgatgcaggaaatgaagcaagttgtgagatcattgcttgacctccccatccaaatcaagcaaaacaacgtcgatgtcattgccggcagtggttattgggctcccagtcctaaaaaccctctttatgaagctttgggtctctatgatatggcctcctcccaagctgttcataccttctgctctcagttggatgcctctccttcacaaagagacgcagtagagaagtatgctaaagcaatacatgaggtaatcatggatataggtggaaaaatagcagagagtatgggattgaagggtgattactgcaaggaatggccttgccaatttaggataaataagtaccatttcacccctcaatctgtaggctcggctggggtccaattacacactgattctggcttcttaacaatacttcaagacgatgagaatgttggtggacttgaagtgatggacaaatctggtgaatttgtagctgttgatcccttgcctggcagcctccttgtcaatcttggggatatggccacggtatggagcaatggaaggttacacacggtgaagcatagagtgcaatgcaaggaggcgaaaactagagtgtcgatcgccacgttcctcttgggaccgaaagaggaagcggtggatccgccaccggagctggtggattcggaccatccgcggctttacaactcgttcacgtacgaggagtacaggaagctgcggctgtcgacggaattgccagctggtgaggctcttgcacttgtacatacctgatcttaaagaaagattgtgtaaagcatattgcaatgtaatgaaagtcctccacttctgccctctgtttgatgaataaagcatgaatttaaatttcctagaa

SEQ ID NO: 521 - protein, 297 aa, Gossypium hirsutum
MDKTQSIPTIDLSDFPAQYEKLRRSSEEWGCFRVVNHNIPFELMQEMKQVVRSLLDLPIQIKQNNVDVIAGSGYWAPSPKNPLYEALGLYDMASSQAVHTFCSQLDASPSQRDAVEKYAKAIHEVIMDIGGKIAESMGLKGDYCKEWPCQFRINKYHFTPQSVGSAGVQLHTDSGFLTILQDDENVGGLEVMDKSGEFVAVDPLPGSLLVNLGDMATVWSNGRLHTVKHRVQCKEAKTRVSIATFLLGPKEEAVDPPPELVDSDHPRLYNSFTYEEYRKLRLSTELPAGEALALVHT

SEQ ID NO: 522 - DNA, 1382 bp, Arabidopsis thaliana
  CDS (192)..(1118)
ataataaagtagacttctgtgaacgcgaaaaaaaaaaaaaaaactgtatccaattttctgatttcgtttttccttctttccttcaataagtaactctacactgaatcaactcctctgatttctcgataaaaatctagaggcaagattattgaagatatgggggaactaaacggagtcatcatattgaagatatgggggaactaaacggagtcatcattccgactatagacttggaagaggtttctgataagattctgaatcagaaaatccgtgaagccagtgagagatggggatgtttcagggtgataaaccatggagtttcattgtctttgatggctgagatgaagaagactgttattgatctctttcaacgtccatacgaggtgaaagtgcgtaacaccgatgtgctcctagggagtggttacagagctccaaacgaaatcaatccttactatgaagcattaggtctctatgacatggcttctcctcatgctgtcaataccttttgtgaccaactcgaagcttctgcagatcaaagggagattatggtgaagtatgcgaaggctatcaatggacttgcaacggatttagcgaggaaattagcagagagttacgggctggttgagaccgactttttcaaagaatggccgagccagtttcggattaacaaatatcattttaaacccgaaacagtcgggaaactcggtgtgcaactacacacggattcagggttcttgacgattcttcaagatgatgaaaatgttggaggacttgaagctatggacagttcttcaggaacctttttccccatagacccgttgcctaacacgcttgctatcaacctcggggacatggctacgatatggagcaacggaagattgtgcaatgtgaagcatagagtgcaatgcaaagaagcaacaatgaggtattccatcgcctcgttcttattaggaccaatggatacagatttggaacctccaagtgagtttgtggatgcagaacatccgcgactatacaagcctattagtcacgaaggggtacgaaatattagaatgactaaaaaattgcatgatggagaagctctcaagcttataacccatgaagggcaggctagataaatgacctaaatggcattttaagatggcagcgctatggaaccagaaaactgcaatttcttacctaagaatgagaaataattatgtattacctattggattgttgcaatatatgaaaaaaaaaaaattaccttgagatctttgtggatgcaatagtactacgattgatcctctgtttgttggtagtacttgtagagaagaaagaaattatcaaaatcatatttagtaactacagagttaattctgttttaaaaaaaaaaaaaaaaa

SEQ ID NO: 523 - protein, 308 aa, Arabidopsis thaliana
MGELNGVIIPTIDLEEVSDKILNQKIREASERWGCFRVINHGVSLSLMAEMKKTVIDLFQRPYEVKVRNTDVLLGSGYRAPNEINPYYEALGLYDMASPHAVNTFCDQLEASADQREIMVKYAKAINGLATDLARKLAESYGLVETDFFKEWPSQFRINKYHFKPETVGKLGVQLHTDSGFLTILQDDENVGGLEAMDSSSGTFFPIDPLPNTLAINLGDMATIWSNGRLCNVKHRVQCKEATMRYSIASFLLGPMDTDLEPPSEFVDAEHPRLYKPISHEGVRNIRMTKKLHDGEALKLITHEGQAR

SEQ ID NO: 524 - DNA, 1291 bp, Glycine max
  CDS (155)..(1054)
  misc_feature (50)..(50): n is a, g, c or t
ttttttttttttttttgaaaaaggaaagattctatcaggacggtcaaagnctcagctacgtaggccccccccccatcccttttcccttgatcatatccttgcctatgcacaggaaaaaaaaaaaaaaacaagcaatagagatagaagtagaactatggaggagactattccagtgattgatgtggagaagattaattctgatgaaggagaatgcaagaagctaagagaggcatgtgaaagatggggttgtttcaggatcattaaccactctattcctgcaaccctcatggctgacatgaaaaaagtcattgaagctcttcttgatcttcctatggagatcaagaaacgcaacacagaattcattgctggcagtggttacatggcaccaagcaaagtcaaccctttctatgaggccttgggcctctatgacttggcttcctcacaagctatgcacaatttctgctctcaacttgatgcctcacctcaccagaggcaaataatggaggcatatggccaagccattcacggtttggcggtgaaaataggacaaaagatggctgaatctctaggcgtagtagttgctgattttgaggactggccatgccaattcagaattaacaaatataacttcaccccagaagcggtagggtcctctggtgttcaaatacacacagattcaggcttcctaaccattcttcaagatgatgaaaatgttggaggtcttcaagtgatgaacaattctggctcttttgtgtcaatccctcctttcccagggaccctccttgtcaatcttggagacattgctcgtgtgtggagcaatggaaggttttgcaatttgacacaccgtgtacaatgcaaggaagcgaccaaacggttttcaattgctacatttatgatagcacccaggaataggaatgttgaagccccagcagaattggtggaccatgatcacccccgtttgtatcaaccttttatttatgaagactataggaagctcagaattagcaacaagatgcacaagggtgaagccctggagttattacgcttggcctagtcatagcaactaggatttacttagtaattaggaaaactaatgcccccacttttcagaaatttatgtctttgtttgccaattaatgggggaaataagtgaccaactgccaaataactcaacggcacttatgaggggggaatgagtaggtaaacttttgaattgaaatgaacttataaagatattcccattaaataaagtggaaaacaaaaatcctaaaagaaaaaaaaaaaaaaaaaa

SEQ ID NO: 525 - protein, 299 aa, Glycine max
MEETIPVIDVEKINSDEGECKKLREACERWGCFRIINHSIPATLMADMKKVIEALLDLPMEIKKRNTEFIAGSGYMAPSKVNPFYEALGLYDLASSQAMHNFCSQLDASPHQRQIMEAYGQAIHGLAVKIGQKMAESLGVVVADFEDWPCQFRINKYNFTPEAVGSSGVQIHTDSGFLTILQDDENVGGLQVMNNSGSFVSIPPFPGTLLVNLGDIARVWSNGRFCNLTHRVQCKEATKRFSIATFMIAPRNRNVEAPAELVDHDHPRLYQPFIYEDYRKLRISNKMHKGEALELLRLA

SEQ ID NO: 526 - DNA, 903 bp, Zea mays
  CDS (1)..(903)
atggcggagatcccggtgatcgacctgcgcctcgccggctcgtcgcccgacgagtcggcgcggctgcgcgacgcgtgcgagcgcctgggctgctttcgggtgaccggccacggcgcgcccgcggggctcctggccgacatgaaggccgccgtgcgcgcgctcttcgacctccccgacgacgccaagcgccgcaacgccgacgtcatccccggcagcggctacgtcgcgccctgccccgccaacccgctctacgaggccttcgggctcctcgacgccgccgcgcccgccgacgtcgacgccttctgcgcgcgcctcgacgcgccgcccaaagtcagggagaccgtcaagacctacgcggagaagatgcacgacgtgatcgtcggcgtcgccggcgagctggccaccagcctggggctgggcctggaggagcactcgttccaggactggccgtgccaattccgcatcaacaggtacaactacacgcaggagacggtgggctcctccggcgtgcagacccacacggactcgggcttcctcaccgtgctccaggaggacgagtgcgtcggcggcctcgaggtgctggaccccgccgccggtgagttcgtgcccgtggaccccgtcgccggctccttcctcgtcaacatcggcgacgtcggcacggcgtggagcaacgggaggctccacaacgtgaagcaccgggtgcggtgcgtcgcgcccgtgccgcgcatctccatcgccatgttcctgctggcgcccaaggacgaccgcgtgagcgccccggaggcgttggtcgacgcgggccacccgcgtcggtacaagccgttcaactacgacgactaccggaggctccggctgtccaccggcgagcgcgcaggcgaggcgctcgcgcggatggcggcgtga

SEQ ID NO: 527 - protein, 300 aa, Zea mays
MAEIPVIDLRLAGSSPDESARLRDACERLGCFRVTGHGAPAGLLADMKAAVRALFDLPDDAKRRNADVIPGSGYVAPCPANPLYEAFGLLDAAAPADVDAFCARLDAPPKVRETVKTYAEKMHDVIVGVAGELATSLGLGLEEHSFQDWPCQFRINRYNYTQETVGSSGVQTHTDSGFLTVLQEDECVGGLEVLDPAAGEFVPVDPVAGSFLVNIGDVGTAWSNGRLHNVKHRVRCVAPVPRISIAMFLLAPKDDRVSAPEALVDAGHPRRYKPFNYDDYRRLRLSTGERAGEALARMAA

SEQ ID NO: 528 - DNA, 897 bp, Zea mays
  CDS (1)..(897)
atggcggagatccctgtgatcgacctgcgcgtcgcccgctcggcggccgaggagtccgcgcggctgcgagccgcgtgcgagcgcctgggcttccgggtgaccggccacggcgtgccctcggtgctcctggcagagatgaaggccgccgtgagcgcgctcttcgacctccccgacgacgccaagcgccgcaacgccgacgtcatcaccggcagcggctacgtcgcccccagcccgaccaacccgctctacgaggccttcgggctcctcgacgccgccgtgcccaccgacgtcgacgccttttgcgcgctcctcgacgcgccgcccaacatcagggagaccgtcaaggcctacgcggagaagatgcacgatgtgatcgttggcgtcgccggcgagctggcgtctagcctggggctagtcgaggagcactcgttccaggactggccgtgccagttccgcatcaacaggtacaactacacgcgggagacggtgggctcctccggcgtgcagacccacacggactcgggcttcctcaccgtgctccatgaggacgagtgtgtaggcggcctcgaggtcctggacccgggcaccggcgagttcgtgcccgtggaccccgtcgcgggctccttcctcgtaaacatcggcgacgtcggcacggcgtggagcaaggggaggctgcacaacgtgaagcaccgggtgcggtgcgtcgcacccgtgccgcgcatctccatcgccatgttcctgctcgcacccaaggacaacagcgtgagcgcaccggcggcgttcgtggacgcggaccacccgcgcaggtacaaggtgttcaactacaacgactatcggaggctcagactgtccaccggcgagcacgcaggcgaggcgctcgcacggatggcggcgtga

SEQ ID NO: 529 - protein, 298 aa, Zea mays
MAEIPVIDLRVARSAAEESARLRAACERLGFRVTGHGVPSVLLAEMKAAVSALFDLPDDAKRRNADVITGSGYVAPSPTNPLYEAFGLLDAAVPTDVDAFCALLDAPPNIRETVKAYAEKMHDVIVGVAGELASSLGLVEEHSFQDWPCQFRINRYNYTRETVGSSGVQTHTDSGFLTVLHEDECVGGLEVLDPGTGEFVPVDPVAGSFLVNIGDVGTAWSKGRLHNVKHRVRCVAPVPRISIAMFLLAPKDNSVSAPAAFVDADHPRRYKVFNYNDYRRLRLSTGEHAGEALARMAA

SEQ ID NO: 530 - DNA, 939 bp, Arabidopsis thaliana
  CDS (1)..(939)
atggcggaagtaaatggagtcattccaacaatagacttggaagaggttaatgatcagattctgaatgagaaaatccgtgaagcgagtgagagatggggatgtttcacggtgataaaccatggagtttctttgtctttgatggctgagatgaagaagactgttagagatctccatgaacgtccatatgagatgaaactgcgaaacaccgatgtgttactagggaatggttacaagcctctaagtgagttcaatcctttttatgaatcatttggtctttttgacatggcatctcctcaagctgtcaatagtttttgtgataaactcgacgcctcgccagatcaaagggagattttgctaaagtatgcaaaagctactgatgatcttgcgaggagtctagcaaggagattagcggagagctacggagtggtagagcccaattttttgagaggatggccaagccaatttcggatgaacaaatatcattttaaaccggattctgttggaaaactcggtgtgatattacacacggatcctggtttcttgacaattcttcaaggtgatgaggatgttggtggacttgaagccatggacaactcttcaggatcctttttccccatacacacattgccgaacacgcttcttgtcaaccttggtgacatggctacgatatggagcaatggaaggttatgcaatgtgaagcatagagtgcaatgcatagaggcaaaaatgaggattactattgcttcgttcctattaggaccagtggatagagatcttgaagctccagatgaatttgtggatgctgaacatccgcgactatacaagcctatcagtgacggaggactaagaaagattagacttagcaagcatcttcatgctggcgaatctctcaagttcataaccataaatgagttaagtgacgtcccaaagatagattaa

SEQ ID NO: 531 - protein, 312 aa, Arabidopsis thaliana
MAEVNGVIPTIDLEEVNDQILNEKIREASERWGCFTVINHGVSLSLMAEMKKTVRDLHERPYEMKLRNTDVLLGNGYKPLSEFNPFYESFGLFDMASPQAVNSFCDKLDASPDQREILLKYAKATDDLARSLARRLAESYGVVEPNFLRGWPSQFRMNKYHFKPDSVGKLGVILHTDPGFLTILQGDEDVGGLEAMDNSSGSFFPIHTLPNTLLVNLGDMATIWSNGRLCNVKHRVQCIEAKMRITIASFLLGPVDRDLEAPDEFVDAEHPRLYKPISDGGLRKIRLSKHLHAGESLKFITINELSDVPKID

SEQ ID NO: 532 - DNA, 897 bp, Vitis vinifera
  CDS (1)..(897)
atggccgccggcgacatcccgtcgattgatatgcaagactttcctaggcaattccggaggctgagagaagcatgcgaggaatggggttgtttcagagttgttaaccatagcatccctccatctttattgtctgaaatgaagtccgtcgtcggatctctccttgaccttcccctggaagtcaaacgccggaacactgacgtgatagctggcagcggctacatggcacccagcaaggtcaatcctctttacgaggccttgggtctctacgacatggcctcccaccaggctgtggatgcattttgttctcagttagatgcctctcctcaccaaagggagacaataaagatctacgccaaagcagtgcaggagctggccatggatatcgggaacaagctggcagaaaccatggggttaggaggcgatttgttcaaggaatggccctgccagtttaggataaacaaatacaacttcactcctgaaactgtgggttccccgggcgtccaaatccacacagattccagcttccttaccatactccaggacgatgaaaatgtagggggccttgaagtgatggacaagtctggcgcatttgttgcggtggatcccatgccagggactctccttgtcaatctgggagacattgccacggtgtggagcaacggaagattgtgcaacgtgaagcatagggtacaatgcaaggaggcagcagtgcgattgtcaattgcttcttttctgctagggcccaaggatgcagcagtggaagccccgccggagctggtggactccgaacaccctcgcctttttgttcccgtcacctatgaggattatagaaaactccgcctctctaccaaattgcaggctggtgaagctctggcgcttgtgcgcgtcgactcctag

SEQ ID NO: 533 - protein, 298 aa, Vitis vinifera
MAAGDIPSIDMQDFPRQFRRLREACEEWGCFRVVNHSIPPSLLSEMKSVVGSLLDLPLEVKRRNTDVIAGSGYMAPSKVNPLYEALGLYDMASHQAVDAFCSQLDASPHQRETIKIYAKAVQELAMDIGNKLAETMGLGGDLFKEWPCQFRINKYNFTPETVGSPGVQIHTDSSFLTILQDDENVGGLEVMDKSGAFVAVDPMPGTLLVNLGDIATVWSNGRLCNVKHRVQCKEAAVRLSIASFLLGPKDAAVEAPPELVDSEHPRLFVPVTYEDYRKLRLSTKLQAGEALALVRVDS

SEQ ID NO: 534 - DNA, 894 bp, Populus trichocarpa
  CDS (1)..(894)
atgggagagagtggtgtcccaacaatagatctgcaagagtttccaggacagtatgagaaactgagaagagcatgtgaagagtggggctgtttcaggctcgtgaatcacaatatctctttggccctcatggcagatatgaagagggttgtgagatcattgttagacctgcccttcgatgtgaaaaagcgcaacttagatgtcatatctgggagtggctacatggcaccaagccaagtcaaccctctttacgaggctttgggactttatgatatggggtcttcacaggctgtggaaactttctgctcccaattggatgcctcttcttaccaaagagaagttatagagatgtatgccaaggcaattcatggggtggccaaggatgtagctcgaaagttggctgaaagtttagggttaagtggtgatttttttgagtcatgggtttgccagttcaggatcaacaagtacaacttcacccctgaaactataggctcctctggagtccaaatacatacagattctgggttcctgactatccttcaagatgataaaaatgttggagggcttgaagtgatgaacccgtctggtgtgtatgtagctgttgatccggtgccaggcaccctcctgatcaatcttggagacattgctaaggcatggagcaatgggaggtttcgtaacgtgcagcatcgagtgcaatgcaaggaagctacaattcggatttcaattgcttcattcctgctggcttccgatgaggaagtggaagctccgccggaacttgtggactctgaacaccctcgtctctatgtccctttcacttatgaagattacagaaagctgagacttaccacaaaattgcaggctggtgaagcccttgaacttaaacgtatcaagtcctaa

SEQ ID NO: 535 - protein, 297 aa, Populus trichocarpa
MGESGVPTIDLQEFPGQYEKLRRACEEWGCFRLVNHNISLALMADMKRVVRSLLDLPFDVKKRNLDVISGSGYMAPSQVNPLYEALGLYDMGSSQAVETFCSQLDASSYQREVIEMYAKAIHGVAKDVARKLAESLGLSGDFFESWVCQFRINKYNFTPETIGSSGVQIHTDSGFLTILQDDKNVGGLEVMNPSGVYVAVDPVPGTLLINLGDIAKAWSNGRFRNVQHRVQCKEATIRISIASFLLASDEEVEAPPELVDSEHPRLYVPFTYEDYRKLRLTTKLQAGEALELKRIKS

SEQ ID NO: 536 - DNA, 894 bp, Populus trichocarpa
  CDS (1)..(894)
atgggtaagagtggtgtcccaataattgatctgcatgagtttccaggacagtatgagaaactgaggagagcatgtgtggagtggggctgtttcaggattgtgaatcacaatatctctttggccctcatggcagatatgaagagggttgtgaggtcattgctagacctgccctttgatgtcaaaaagcgcaacatagatgtcatagctgggagtggctacatggcaccaagcaaagtcaaccctctttatgaggctttaggactttatgatatgaggtcttctcaagccgtggaaactttctgctcccaaatggatgcctctccttaccaaagagaggttatcgagatgtatgctaaggcaattcatggggcagccatggatatagcacgaaagttggctgaaagtatggggttgaatggtgatttgttcgagtcatggatttcccagttcaggatcaacaagtacagcttcacccccgaaaccataggctcgtctggagtccaaatacatacagattctgggttcctgactatccttcaagatgatgaaaatgttggtggacttgaagtgatggacccatctggtgtgtttgctgcagttgatccttcaccaggcaccctcctggtcaatcttggagacgttgctacggcatggagcaatggagggcttcgtaacgtgcagcatcgagtgcaatgcaaggaagccacaattcggatctcaatcgcttcattcctggtcggtcccaaggacgaagtggaagctccgccggaacttgtggactctgaacacccacgtctctttgtccctttcaaatatgaagattatagaaagctcagacttaccacaaaattggaggctggtgaagcccttgaacttaaacgcatcctgtcctaa

SEQ ID NO: 537 - protein, 297 aa, Populus trichocarpa
MGKSGVPIIDLHEFPGQYEKLRRACVEWGCFRIVNHNISLALMADMKRVVRSLLDLPFDVKKRNIDVIAGSGYMAPSKVNPLYEALGLYDMRSSQAVETFCSQMDASPYQREVIEMYAKAIHGAAMDIARKLAESMGLNGDLFESWISQFRINKYSFTPETIGSSGVQIHTDSGFLTILQDDENVGGLEVMDPSGVFAAVDPSPGTLLVNLGDVATAWSNGGLRNVQHRVQCKEATIRISIASFLVGPKDEVEAPPELVDSEHPRLFVPFKYEDYRKLRLTTKLEAGEALELKRILS

SEQ ID NO: 538 - DNA, 891 bp, Vitis vinifera
  CDS (1)..(891)
  misc_feature (723)..(723): y is t or c
atggccgccggcgacatcccgtcgattgatatgcaagactttcctaggcaattccggaggctgagagaagcatgcgaggaatggggttgtttcagagttgttaaccatagcatccctccatctttattgtctgaaatgaagtccgtcgtcggatctctccttgaccttcccctggaagtcaaacgccggaacactgacgtgatagctggcagcggctacatggcacccagcaaggtcaatcctctttacgaggccttgggtctctacgacatggcctcccaccaggctgtggatgcattttgttctcagttagatgcctctcctcaccaaagggagacaataaagatctacgccaaagcagtgcaggagctggccatggatatcgggaacaagctggcagaaaccatggggttaggaggcgatttgttcaaggaatggccctgccagtttaggataaacaaatacaacttcactcctgaaactgtgggttccccgggcgtccaaatccacacagattccagcttccttaccatactccaggacgatgaaaatgtagggggccttgaagtgatggacaagtctggcgcatttgttgcggtggatcccatgccagggactctccttgtcaatctgggagacattgccacggtgtggagcaacggaagattgtgcaacgtgaagcatagggtacaatgcaaggaggcagcagtgcgattgtcaatygcttcttttctgctagggcccaaggatgcagcagtggaagccccgccggagctggtggactccgaacaccctcgcctttttgttcccgtcacctatgaggattatagaaaactccgcctctctaccaaattgcaggctggtgaagctctggcgcttgaaatgaaatga

SEQ ID NO: 539 - protein, 296 aa, Vitis vinifera
MAAGDIPSIDMQDFPRQFRRLREACEEWGCFRVVNHSIPPSLLSEMKSVVGSLLDLPLEVKRRNTDVIAGSGYMAPSKVNPLYEALGLYDMASHQAVDAFCSQLDASPHQRETIKIYAKAVQELAMDIGNKLAETMGLGGDLFKEWPCQFRINKYNFTPETVGSPGVQIHTDSSFLTILQDDENVGGLEVMDKSGAFVAVDPMPGTLLVNLGDIATVWSNGRLCNVKHRVQCKEAAVRLSIASFLLGPKDAAVEAPPELVDSEHPRLFVPVTYEDYRKLRLSTKLQAGEALALEMK

SEQ ID NO: 540 - DNA, 921 bp, Ricinus communis
  CDS (1)..(921)
atggagaagactgttgtcccaaccattgacgtatcagatttcccaggagaatatgaaagactcagaaaagcatgcgaggagtggggatgtttcagagcggtgaaccataacatcccatcggctctcatgtctgagatgaagaaggtagtcagatctctgcttgaccttcccatggaagtcaaggttcgcaactctgatgtaatagcaggcagtgggtacatggcacccagccccgtgaatcctctttacgaggctttgggtctttatgacatcggctcctcccaagctgtgcataccttctgctctcaggtggatgcatctcctcatcaaagggaggtaatatccaattatgctaaagcaattcatgaactgtccatggatttggcttggaagttggctcaaagtatggggttgctgagcaatgatttgttcgagggatggccttcccagtttaggattaacaagtacaatttcacttctgagacagtgggctcctctggagtccagatacacactgattctgggttccttactatacttcaagatgatgaagatgttggtggtcttgaagtcatggatagatctggtgcatttgtcgctgttgatcctctgccgggaaccctcctagtcaatcttggggatgtcgctacggcatggagcaatggaagactctgcaatgtgaagcatagagtccaatgcaagcaagcagcagtacgaatttcaattgcttctttccttctgggaccgaaagactcggcagtggaagccccgccagaactcgttgactcccaacacccgcgtctctatatccctttcactttccaagattatagaaagctccgactcagaactaaattccaagccggcgaagcccttgagcttatgctagccagttcctcacattcaattaacgatatatga

SEQ ID NO: 541 - protein, 306 aa, Ricinus communis
MEKTVVPTIDVSDFPGEYERLRKACEEWGCFRAVNHNIPSALMSEMKKVVRSLLDLPMEVKVRNSDVIAGSGYMAPSPVNPLYEALGLYDIGSSQAVHTFCSQVDASPHQREVISNYAKAIHELSMDLAWKLAQSMGLLSNDLFEGWPSQFRINKYNFTSETVGSSGVQIHTDSGFLTILQDDEDVGGLEVMDRSGAFVAVDPLPGTLLVNLGDVATAWSNGRLCNVKHRVQCKQAAVRISIASFLLGPKDSAVEAPPELVDSQHPRLYIPFTFQDYRKLRLRTKFQAGEALELMLASSSHSINDI

SEQ ID NO: 542 - DNA, 924 bp, Malus domestica
  CDS (1)..(924)
atgggagaaggagaggaagattgcaggacaatcccagccattgatctgaaaaaatttccagatgcagaagagtacaggaagctgagggaagcatcagagacatggggatgcttcaggcttgtgaaccacatgatcccaccggctctgatgtcggagatgaaatcagtggtcagatctttgctggacctgcccatggagatcaagaagcagaacaaggatgtgatagcgggcagtggatacatggctcccagcaaagtcaaccctctctacgaagctttggggctctacgacttgggatcgggtcaggctgtcgacagcttttgctctcggttgaatgcttcttcctaccagagagatgtgatagagaagtatgctcaagcagtgtatgagcagattgtggacatagggaaaaggttggcagagagtttagggttagctgacagtgattatctcaaggggtggccctgccagttcaggataaacaagtacaacttcactcctgaatcagttggatcctctggtgtacaattacacacagactcaggatttctaaccatccttcaagacgatgaagatgtcggtggtttggaagtgatggacaaatccggcgcctttgtagctgttgatccttgcccgggcactctccttgttaatctaggggatgttgctaaggcatggagcaatgggaggttgtgcaatgtgaagcatagagtacaatgcagggatgcaacaattcgaatttcggtcgctacattcctcttgggaccgaaggaggaggcggtagtggacgctccggcggagtttgtggatcccgagcaccctcgactgtacgttccttttacttacgaagattacagaaagctcagactctccacaaaactacaagctggtgaagccctcgcactcatgcccagcccctcctaa

SEQ ID NO: 543 - protein, 307 aa, Malus domestica
MGEGEEDCRTIPAIDLKKFPDAEEYRKLREASETWGCFRLVNHMIPPALMSEMKSVVRSLLDLPMEIKKQNKDVIAGSGYMAPSKVNPLYEALGLYDLGSGQAVDSFCSRLNASSYQRDVIEKYAQAVYEQIVDIGKRLAESLGLADSDYLKGWPCQFRINKYNFTPESVGSSGVQLHTDSGFLTILQDDEDVGGLEVMDKSGAFVAVDPCPGTLLVNLGDVAKAWSNGRLCNVKHRVQCRDATIRISVATFLLGPKEEAVVDAPAEFVDPEHPRLYVPFTYEDYRKLRLSTKLQAGEALALMPSPS

SEQ ID NO: 544 - DNA, 924 bp, Prunus mume
  CDS (1)..(924)
atgggtgggggtgaagattgcatgatcatcccagtgattgatatgcaaaagtttccagatgcagaagagtacaagaaactgagggaagcatctgagatatggggctgcttcaggcttatcaatcacaagatcccattggctcttatgaaggagatgaaggctgtggtcagatccctgcttgacctgcccatggagatcaagcagcagaacaaggatgtcatagctggtagtggctacatggcacccagcaaagtcaaccctctttatgaggctctgggtctttatgacttgggctcacctgaggctgtgcatactttttgctctaagttggatgcctcttcccaccagagagagataatatcgaagtatgctcaagcagtgtatgatcagattgtggaaatagggcacaagttggcagagagtcttgggttggaaaatgttgattttctcaatggctggccttgccagtttaggataaacaagtacaacttcaaacctgaatcagtgggctcttctggtgtacagatacacacagattcaggatttctaaccattcttcaagatgatgaaaatgttggtggtctagaagtgatggataaagctggtgcctttgtcccagttgatccttgcccaggcactctccttgtcaatcttggggatgttgctcaggcatggagcaatgggaggttgtgcaatgtgaggcatagagtgcaatgcagggaggcaacgattcgagtttcgattgctacatttctcttgggaccaaaggatcaggaagccgtggaggctcctccggaattcgtggattcggagcatccacggctctatgccccttttacttatgaagactatagaaagctcaggctctcctcaaaattgcaggctggtgaagcccttgctctcctacgtaccaccccatcctaa

SEQ ID NO: 545 - protein, 307 aa, Prunus mume
MGGGEDCMIIPVIDMQKFPDAEEYKKLREASEIWGCFRLINHKIPLALMKEMKAVVRSLLDLPMEIKQQNKDVIAGSGYMAPSKVNPLYEALGLYDLGSPEAVHTFCSKLDASSHQREIISKYAQAVYDQIVEIGHKLAESLGLENVDFLNGWPCQFRINKYNFKPESVGSSGVQIHTDSGFLTILQDDENVGGLEVMDKAGAFVPVDPCPGTLLVNLGDVAQAWSNGRLCNVRHRVQCREATIRVSIATFLLGPKDQEAVEAPPEFVDSEHPRLYAPFTYEDYRKLRLSSKLQAGEALALLRTTPS

SEQ ID NO: 546 - DNA, 1062 bp, Brassica napus
  CDS (1)..(1062)
atgggagtactcgacgaagcttttatccaagctccagaacacagacccaaaactcatctcaaacactccgatgaccacattctctccaaggagatcccgaccatcgacctctcctccctccaagacccaaactgcgacaagacagcgctagcgacagagattgcagaagcatgcatgagatggggctttttccaggtgatcaaccatggtttgtcgttggacttaatgcgtagggtggagaagacggtggccgagtttttcagtctaacgttggaggagaagagaagagtgaaaagagatgaagtgaaccctatgggttatcacgacggagaacataccaaaaacgttagagactggaaagagattttcgatttctttttgcaggactcgacgacggttccggcgactacagagccggaagataccgagctcaggaagctgactaacccgtggcctcaaaacccttccgacttcagagaggtgtgccaagaatatgcaagagaagttgagaagttagctttcaagcttttggaacttatctccattagcttgggtctacccggtgatcggttaacaggttacttcaaggaccaaacaagctttttgcggtttaaccattaccctccttgcccgaacccggagctagcattaggcgttggacgccacgcagacgcaggagttataaccgtcttggcacaagatagtgtgggtgggttacaagtgagccgtagatcagatggacaatggttctctgtcaaaccgaaccctgatgctttcatcattaacattggcaactgcatgcaggtatggacaaatgacaagtattggagtgcagaacatagagtggtagtgaattcaagcaaagagagattctcaatgccattcttccttttcccatcccatgataccaacattgagccattgaaagagcttataagcgaagacagcccgccttgttacaaaaagtacaattggggcaagttctttgctgcgagaaacagaagtgattacaagaagctccaaactgagagcatccagattgatcgcttcaaggccgcttaa

SEQ ID NO: 547 - protein, 353 aa, Brassica napus
MGVLDEAFIQAPEHRPKTHLKHSDDHILSKEIPTIDLSSLQDPNCDKTALATEIAEACMRWGFFQVINHGLSLDLMRRVEKTVAEFFSLTLEEKRRVKRDEVNPMGYHDGEHTKNVRDWKEIFDFFLQDSTTVPATTEPEDTELRKLTNPWPQNPSDFREVCQEYAREVEKLAFKLLELISISLGLPGDRLTGYFKDQTSFLRFNHYPPCPNPELALGVGRHADAGVITVLAQDSVGGLQVSRRSDGQWFSVKPNPDAFIINIGNCMQVWTNDKYWSAEHRVVVNSSKERFSMPFFLFPSHDTNIEPLKELISEDSPPCYKKYNWGKFFAARNRSDYKKLQTESIQIDRFKAA

SEQ ID NO: 548 - DNA, 963 bp, Brassica napus
  CDS (1)..(963)
atggagcagaccattaagtttcctgttgtaaacttgtccaagctcaatggtgaagaaagagaccaaaccatggctttaatcaacgatgcttgcgaaaattggggtttctttgagatagtgaaccatgggttaccacatgatttgatggacaacgttgagaagatgacaaaggagcattacaagaaatcaatggaacagaagtttaacgacatgctcaggtccaaaggtttggaaaagcttgagacagaagttgaggacgtcgattgggaaagcactttctaccttcgtcaccttcctcaatccaatctctacgacattcctgatatgtctgatgaatatcggacggccatgaaagattttgggaagagattggagaatcttgcagaggatttgttggatctactgtgtgagaatctagggttagagaaagggtatctgaagaaagtgtttcatggaacaaaaggtccaacctttgggactaaggtgagcaattatccaccttgtcctggaccagaaatgatcaaaggtctcagggcccacactgatgcaggaggcatcatcttgttgtttcaagacgacaaagtcagtggcctccagcttctcaaagatggtgattggatcgatgttcctccactcaaccactccattgtcattaatcttggtgaccaacttgaggtgataaccaacggcaagtacaagagtgtgatgcaccgtgtggtgactcaaaaagaagggaacagaatgtctattgcatcgttctacaatcccggaagcgatgcggagatctctccagcttcatcactcgccagcaaggaaaccgaatacccaagctttgtgtttgatgactacatgaagctttatgctggggtcaagtttcagcctaaagagccacgctttgaggcgatgaagaatgctactgcagttacagaactgaacccagccgcatccgtagagactttctaa

SEQ ID NO: 549 - protein, 320 aa, Brassica napus
MEQTIKFPVVNLSKLNGEERDQTMALINDACENWGFFEIVNHGLPHDLMDNVEKMTKEHYKKSMEQKFNDMLRSKGLEKLETEVEDVDWESTFYLRHLPQSNLYDIPDMSDEYRTAMKDFGKRLENLAEDLLDLLCENLGLEKGYLKKVFHGTKGPTFGTKVSNYPPCPGPEMIKGLRAHTDAGGIILLFQDDKVSGLQLLKDGDWIDVPPLNHSIVINLGDQLEVITNGKYKSVMHRVVTQKEGNRMSIASFYNPGSDAEISPASSLASKETEYPSFVFDDYMKLYAGVKFQPKEPRFEAMKNATAVTELNPAASVETF

SEQ ID NO: 550 - DNA, 1080 bp, Glycine max
  CDS (1)..(1080)
atgggagacattgatccagcttttatacaatccacagaacaccgtcccatagcaaaggtggtggaagttagagagattccagtgatagacctttcagaaggtagaaaagaattactcatttcagaaattggcaaagcatgtgaggagtggggatttttccaagtaataaatcatggggtaccctttgagattagtagagaggttgagattgtcgccaagaagttctttgagacgagcttagaggagaagaagaaagtgaaaagagatgaatttaatgcaatggggtaccatgatggggagcacaccaagaacgtaagagactggaaagaggtgtttgattaccttgttgaaaacactgcacaagtcccatcttcccatgagccaaatgatttggatttgaggactctcaccaaccaatggccccaaaactctcctcattttagggaaacattgcaagagtatgctcgagaagtggaaaagctagcttacaagttgttggagctgatttcacagagcttgggtttggctgctgacaaattccatggctgtttcaagaaccaactcagcatggtgcgactcaattactatcccgcatgccctttccctgacctggcacttggtgttggtcgccacaaggattccagtgctttaactgtgcttgcccaagatgatgttggaggattacaagttaagagaaaatcagatggagaatggattcctgttaaacctaccccaaatgcatttattatcaatgtgggggatatagttcaggtttggagcaatgacaagtacgagagcgtggagcacagggtggtggtgaattctgaaaaggaaaggttttcaattccattcttctttttccctgctcaccatgttatggtgaagcctgccgaggagctggtaaatgagcaaaatccagcaagatatagagaatacaaatatggtaagttctttgccaacagaaaccggagtgatttcaagaagcgtgatgtggagaatatccaaattcatcacttcaggatcttggatgaggcatttgggttggcatcctcaatatcatccatatctgagcataactag

SEQ ID NO: 551 - protein, 359 aa, Glycine max
MGDIDPAFIQSTEHRPIAKVVEVREIPVIDLSEGRKELLISEIGKACEEWGFFQVINHGVPFEISREVEIVAKKFFETSLEEKKKVKRDEFNAMGYHDGEHTKNVRDWKEVFDYLVENTAQVPSSHEPNDLDLRTLTNQWPQNSPHFRETLQEYAREVEKLAYKLLELISQSLGLAADKFHGCFKNQLSMVRLNYYPACPFPDLALGVGRHKDSSALTVLAQDDVGGLQVKRKSDGEWIPVKPTPNAFIINVGDIVQVWSNDKYESVEHRVVVNSEKERFSIPFFFFPAHHVMVKPAEELVNEQNPARYREYKYGKFFANRNRSDFKKRDVENIQIHHFRILDEAFGLASSISSISEHN

SEQ ID NO: 552 - DNA, 1050 bp, Zea mays
  CDS (1)..(1050)
atgggcggcctcactatggaccaggctttcgtgcaggcccccgagcaccgccccaagcccctcgtcaccgaggccaccggcatccctctcatcgacctctcgcctctgtccgccagcggcggcgccgtggacgcgctggccgccgaggtgggcgcggcgagccgggactggggcttcttcgtggtcgtgggccacggcgtgcccgcagagaccatggcgcgcgcgacggaggcgcagcgcgcgttcttcgcgctgccggcagagcggaaggccgccgtgcggaggaacgaggcggagccgctcgggtactacgagtcggagcacaccaagaacgtgagggactggaaggaggtgtacgacctcgtgccgcgcgagccgccgccgccggctgccgtggccgacggcgagctcgtgttcgagaacaagtggccccaggatctgccgggcttcagagaggcgctggaggagtacgccaaagcgatggaagagctggcgttcaagctgctggagctgatcgctcggagcctgaagctgaggcccgaccggctgcacggcttcttcaaggaccagacgaccttcatccggctgaaccactaccctccttgcccgagccccgacctggccctcggcgtggggcggcacaaggacgccggcgccctgaccatcctgtaccaggacgacgtcggggggctcgacgtccggcggcgctccgacggcgagtgggtccgcgtcaggcccgtgcccgactcgttcatcatcaacgtcggcgacctcatccaggtgtggagcaacgacaggtacgagagcgcggagcaccgggtgtcggtgaactcggcgagggagaggttctccatgccctacttcttcaacccggcgacctacaccatggtggagccggtggaggagctggtgagcaaggacgatccgcccaggtacgacgcctacaactggggcgacttcttcagcaccaggaagaacagcaacttcaagaagctcaacgtggagaacattcagatcgcgcatttcaagaagagcctcgtcctcgcctaa

SEQ ID NO: 553 - protein, 349 aa, Zea mays
MGGLTMDQAFVQAPEHRPKPLVTEATGIPLIDLSPLSASGGAVDALAAEVGAASRDWGFFVVVGHGVPAETMARATEAQRAFFALPAERKAAVRRNEAEPLGYYESEHTKNVRDWKEVYDLVPREPPPPAAVADGELVFENKWPQDLPGFREALEEYAKAMEELAFKLLELIARSLKLRPDRLHGFFKDQTTFIRLNHYPPCPSPDLALGVGRHKDAGALTILYQDDVGGLDVRRRSDGEWVRVRPVPDSFIINVGDLIQVWSNDRYESAEHRVSVNSARERFSMPYFFNPATYTMVEPVEELVSKDDPPRYDAYNWGDFFSTRKNSNFKKLNVENIQIAHFKKSLVLA

SEQ ID NO: 554 - DNA, 1056 bp, Linum usitatissimum
  CDS (1)..(1056)
atgggagaagttgatgcagcattcatccaagaagcagagcacagaccaaacccagaaatcatcaaagcagaaggaattcctctcatcgacctctctcatgcatcaaccgagagacttgtgggggagatcagggatgcttgcagggaatgggggttcttccaagtgatcaaccatggagttccattggaggccagacagagagtggaggctgcttcgaaggagttcttctggcagccattggaggagaagaggaaagttagaagagatgagaagaaagttatgggttactatgacactgagcataccaagaacgttagggattggaaagaagtgtttgatttcagtgttgaagatcctacttttgttcctcatgatgatcatggtggtggtttctctgagtggcataatcagtggcctcaacatccctctgatctcagggaagcatgcgaggagtatgcaaaagaagtggagaagctagcctacaaggtgatggagctgatcgccatgagcctagggctggaaccagacagattccatggattcttcgacgaccaatcgaccagcttcgtgaggctgaatcactatcctccatgcccagttcctcacttggccctcggagtcggccggcacaaggacgccggagcactcaccgttcttgctcaggacgacgtcggcgggctggaagtgaagaggaggtccgatggggagtgggcctgggtccagcccactcctgatgcttacattgtcaacgttggtgacatcatccaggtttggagcaatgaggcatacgagagcgtggaacacagagtgatggtgaactcagagaaggaaaggttctcgattccgttcttcttcaacccatcccattacactgtggttcagccattggaggaactactggtggtggatgctagtaagaagaagaagaacactacagcaaagtacaggccttaccactgggggaagttctttgttaccaggaaaggcagcaacttcaagaaacttgctgttgaaaacatccagatctctcacttcagagtcctctcagaaatctga

SEQ ID NO: 555 - protein, 351 aa, Linum usitatissimum
MGEVDAAFIQEAEHRPNPEIIKAEGIPLIDLSHASTERLVGEIRDACREWGFFQVINHGVPLEARQRVEAASKEFFWQPLEEKRKVRRDEKKVMGYYDTEHTKNVRDWKEVFDFSVEDPTFVPHDDHGGGFSEWHNQWPQHPSDLREACEEYAKEVEKLAYKVMELIAMSLGLEPDRFHGFFDDQSTSFVRLNHYPPCPVPHLALGVGRHKDAGALTVLAQDDVGGLEVKRRSDGEWAWVQPTPDAYIVNVGDIIQVWSNEAYESVEHRVMVNSEKERFSIPFFFNPSHYTVVQPLEELLVVDASKKKKNTTAKYRPYHWGKFFVTRKGSNFKKLAVENIQISHFRVLSEI

SEQ ID NO: 556 - DNA, 963 bp, Brassica napus
  CDS (1)..(963)
atggagcaaaccattaagtttccagttgtaaacttgtccaagctcaatggtgaagaaagagaccaaaccatggctttaatcaacgatgcttgcgaaaattggggcttctttgagatagtgaaccatgggttaccacatgatttgatggacaacgtcgagaagatgacaaaggaacattacaagaaatcaatggaacaaaagttcaacgacatgctcaaatcaaaaggtttggaaaagcttgagacagaagttgaggatgttgattgggaaagcactttctaccttcgtcatctccctcagtccaatctctacgacattcctgatatgtctgatgaataccggacggccatgaaagattttggaaagagattggagaatcttgctgaggatttgttggatctattgtgtgagaatttagggttagagaaagggtacttgaagaaagtgtttcatggaacaaaaggtccaacctttgggactaaggtgagcaactatccagcttgtcctaagccagagatgataaaaggtcttagggcccacactgatgcaggaggcatcatcttgttgtttcaagatgacaaggtcagtggtctccagcttcttaaagatggtgactggattgatgttcctccactcaaccactctattgtcatcaatcttggtgaccaacttgaggtgataaccaacggcaggtacaagagtgtgatgcaccgtgtggtgactcagaaagaaggaaacagaatgtcaattgcatctttctacaacccgggaagcgatgctgagatctctccagcttcatcgcttgcctgtaaagaaaccgagtacccaagttttgtttttgatgactacatgaagctctatgctggggtcaagtttcagcctaaggagccacgctttgaggcgatgaagaatgctactgcagttacagaactgaacccagccgcatccgtagagactttctaa

SEQ ID NO: 557 - protein, 320 aa, Brassica napus
MEQTIKFPVVNLSKLNGEERDQTMALINDACENWGFFEIVNHGLPHDLMDNVEKMTKEHYKKSMEQKFNDMLKSKGLEKLETEVEDVDWESTFYLRHLPQSNLYDIPDMSDEYRTAMKDFGKRLENLAEDLLDLLCENLGLEKGYLKKVFHGTKGPTFGTKVSNYPACPKPEMIKGLRAHTDAGGIILLFQDDKVSGLQLLKDGDWIDVPPLNHSIVINLGDQLEVITNGRYKSVMHRVVTQKEGNRMSIASFYNPGSDAEISPASSLACKETEYPSFVFDDYMKLYAGVKFQPKEPRFEAMKNATAVTELNPAASVETF

SEQ ID NO: 558 - DNA, 1062 bp, Brassica napus
  CDS (1)..(1062)
atgggagtactcgacgaagcttttatccaagctccagaacacagacccaaaactcatctcacaaactccggtgactacattctctccaacgagatcccgaccatcgatctctcctctctccaagacccacactgcgacaagacagcgctagcggcagagattgcagaagcatgcatgagatggggctttttccaggtgatcaaccatggtttgtcgttggacttaatgcgtagggtggagaagacggtggccgagtttttcagtctaacgttggaggagaagagaagagtgaaaagagatgaagtgaaccctatgggttatcacgacggagaacataccaaaaacgttagagactggaaagagattttcgatttctttctgcaggactcgacgacggttccggcgactacagagccggaagataccgagctcaggaagctgactaacccgtggcctcaaaacccttccgacttcagagaggtgtgccaagaatatgcaagagaagttgagaagttagctttcaagcttttggaacttatctccattagcttgggtctacccggtgatcggttaacaggttacttcaaggaccaaacaagctttttgcggtttaaccattaccctccttgcccgaacccggagctagcattaggcgttggacgccacgcagacgcaggagttataaccgtcttggcacaagatagtgtgggtgggttacaagtgagccgtagatcagatggacaatggttctctgtgaaacccaaccctgatgctttcatcattaacattggcaactgcatgcaggtatggacaaatgacaagtattggagtgcagaacatagagtggtagtgaattcaagcaaagagagattctcaatgccattcttccttttcccatcccacgataccaacattgagccattgaaggagcttataagcgaagacaacccgccttgttacaaaaagtacaattggggcaagttctttgctgcaagaaacagaagtgattacaagaagctccaaactgagagcatccagattgatcgcttcaaggccgcttaa

SEQ ID NO: 559 - protein, 353 aa, Brassica napus
MGVLDEAFIQAPEHRPKTHLTNSGDYILSNEIPTIDLSSLQDPHCDKTALAAEIAEACMRWGFFQVINHGLSLDLMRRVEKTVAEFFSLTLEEKRRVKRDEVNPMGYHDGEHTKNVRDWKEIFDFFLQDSTTVPATTEPEDTELRKLTNPWPQNPSDFREVCQEYAREVEKLAFKLLELISISLGLPGDRLTGYFKDQTSFLRFNHYPPCPNPELALGVGRHADAGVITVLAQDSVGGLQVSRRSDGQWFSVKPNPDAFIINIGNCMQVWTNDKYWSAEHRVVVNSSKERFSMPFFLFPSHDTNIEPLKELISEDNPPCYKKYNWGKFFAARNRSDYKKLQTESIQIDRFKAA

SEQ ID NO: 560 - DNA, 1059 bp, Brassica napus
  CDS (1)..(1059)
atgggacgattcgacgaagctttcatccaagctccggagcacagacccatcaatcatctcacaaactccggtgaattcattttctccgacgagatcccgaccatcgacctctcttctctccaagatcccaattgcgacaagacaacgatcgccacagagattggtaaagcttgcgagagatggggatttttccaggtgatcaaccacggcttgcctttagacctaaggcgtcgcgtagagaacacggcggccgaattcttcaacctaacggcggaggagaagagaagattgagaagggacgaagtgaaccctatgggttatcacgacgaggaacacaccaagaacgttagagactggaaagagatctttgattttttcttgcaagacccgacaatcgttccggcgactccggagccggaagacaccgacaagagaaagcttactaaccagtggcctcaacacccttctgacttcagagagatatgccaagaatatgcaagggaggttgaaaagttagctttcaagattttggaacttatctccattagcttgggtttaccgggtgatcggttatcgggttacttcaaggaacaaacgagcattttgaggttcaaccattaccctccttgtcccaaccccgagctagcattaggcgttggacgtcacaaagatggaggagctcttaccgtcttggcccaagatagtgtagggggattacaagtgggccgtagatcggatggagaatggatcccagtgaaaccgatccccgatgctttgatcattaacattggcaactgcatgcaggtgtggacaaatgacaagtattggagtgcagaacatagagtggtagtgaacacaagcaaagagaggttctcagtaccgttcttctttttcccgtcgcatgaaaccaacattgagccattggaggagcttataagtgaagaaaacccgccttgttacaaaaagtgcaattggggaaagttctttgtttcgagaaacagaagtgatttcaagaagctcgaagttgaggacatccagattgatcacttcaaggcttaa

SEQ ID NO: 561 - protein, 352 aa, Brassica napus
MGRFDEAFIQAPEHRPINHLTNSGEFIFSDEIPTIDLSSLQDPNCDKTTIATEIGKACERWGFFQVINHGLPLDLRRRVENTAAEFFNLTAEEKRRLRRDEVNPMGYHDEEHTKNVRDWKEIFDFFLQDPTIVPATPEPEDTDKRKLTNQWPQHPSDFREICQEYAREVEKLAFKILELISISLGLPGDRLSGYFKEQTSILRFNHYPPCPNPELALGVGRHKDGGALTVLAQDSVGGLQVGRRSDGEWIPVKPIPDALIINIGNCMQVWTNDKYWSAEHRVVVNTSKERFSVPFFFFPSHETNIEPLEELISEENPPCYKKCNWGKFFVSRNRSDFKKLEVEDIQIDHFKA

SEQ ID NO: 562 - DNA, 921 bp, Brassica napus
  CDS (1)..(921)
atgatggcggagaccggtggagttattccgacgatagacttggaagaggtcgtttcagataagatcctgaatcagaaaatccgtgaagcgagcgagagatggggatgctttagggtgatgaaccatggagtttcattgtctttgatgtctgagatgaagaagaccattatggatctcttcgaacgtccacacgaggtgaaagtgcgcaacactgatgtgttactagggattggttacagggctccatatgatatcaatccttactatgaaacatttggtctctatgacatggcttctcctcaagctgtcaacactttttgtgaccagcttgacgcttccgcggatcaaagggagattatggtgaagtatgccaaatctactgatggacttgcaaaggatttagcaaggaggttagcagagagttacggtttggctgagactgacttcttcaaaggatggccgagccagttgcggattaacaaatatcattttaaacccgaagcagtcgggaaactcgggtttcacctacacacagattctggtttcttgacgattcttcaagccgatgaaaatgttggtggacttgaagccatggacaatgcttcaggaaagttctttcccataagcccgatgccaaacacgcttgctatcatcctcggggacatggctacaatctggagcaatgggaggttgtgcaacgtgaagcatagagtgcaatgcaacgaagcaacaaagaggttttctatcgcttcttttttgttaggaccgatggatacggatttggagccgccaagtgagtttgtggacgctgaacatccgcggctgtacaagcctattagtcatgacggggtaaggaatattagaatgactacgaagttgcatgatggagaggctctcaagcttataacctatgatgaatga

SEQ ID NO: 563 - protein, 306 aa, Brassica napus
MMAETGGVIPTIDLEEVVSDKILNQKIREASERWGCFRVMNHGVSLSLMSEMKKTIMDLFERPHEVKVRNTDVLLGIGYRAPYDINPYYETFGLYDMASPQAVNTFCDQLDASADQREIMVKYAKSTDGLAKDLARRLAESYGLAETDFFKGWPSQLRINKYHFKPEAVGKLGFHLHTDSGFLTILQADENVGGLEAMDNASGKFFPISPMPNTLAIILGDMATIWSNGRLCNVKHRVQCNEATKRFSIASFLLGPMDTDLEPPSEFVDAEHPRLYKPISHDGVRNIRMTTKLHDGEALKLITYDE

SEQ ID NO: 564 - DNA, 915 bp, Brassica napus
  CDS (1)..(915)
atggctgatctcaatgaagtcattccgacaatagacttgaaaggggttccggatgagaagctgaaccagcagatacgtgaggcgagtgagagatggggatgtttcaaggtgatcaaccatggagtttcttcgtctttgctgtctgagatgaagaagactgttacagatctccatgaacgtccacacgaggtgaaaatacgaaacactgatgtgatactagcaagtggttacaagcctagaactgagttaaatcctctttatgaatcattcggtctttttgacgtcgcctctccacaagcgatcaacactttttgtgacaaacttgaggcctctgctgaacaaagagagatcatgatgaagtatggcaaagttatggatggtcttgcaaaagatttaacaaggatgttagcaaagagttatgaattagcggatcccgatatatgcaaagaatggccgagccagtttcggattagcaaatatcatttcaaccctgaaacagttggtaaaaatggtttgataatacacacggatcctggatttttaacaattgttcacggtgatgacaatgttggtggacttgaggccatgctggaccattcttcaggaacctattaccccataaacacgtcaccaaacacacttactgtcaaccttggtgacatggccaagatatggagcaatgggaggctgtgcaatgtgaagcatagagtgcaatgcaaagaagcaaaaatgaggattaccatctccaccttcctattaataccaatggatgaagttgttaaacctccaagtgaatttgtggatgttgaacatccacgtctatacaagcctatcagcgatggagaactaaggaagattaggctaagtaacaacatgcatgacggcgaatctttccagtttataaccctcaaataa

SEQ ID NO: 565 - protein, 304 aa, Brassica napus
MADLNEVIPTIDLKGVPDEKLNQQIREASERWGCFKVINHGVSSSLLSEMKKTVTDLHERPHEVKIRNTDVILASGYKPRTELNPLYESFGLFDVASPQAINTFCDKLEASAEQREIMMKYGKVMDGLAKDLTRMLAKSYELADPDICKEWPSQFRISKYHFNPETVGKNGLIIHTDPGFLTIVHGDDNVGGLEAMLDHSSGTYYPINTSPNTLTVNLGDMAKIWSNGRLCNVKHRVQCKEAKMRITISTFLLIPMDEVVKPPSEFVDVEHPRLYKPISDGELRKIRLSNNMHDGESFQFITLK

SEQ ID NO: 566 - DNA, 927 bp, Brassica napus
  CDS (1)..(927)
atggcgattcctgtgattgatttctccaagatcaatggcgaaaaaagggaaaaaacactctctgaaatcgctaaagcttgcgaaaaatggggattttttcagctggtgaaccatgggattccattggagcttcttaacaaggtgaaaaagctggcctcagactgctacaaaacggagagagaaaaagcgttcaaaacctcaactcccgtgaagctactcaacgaactgcttgagaaaaactctggagagaagctcgagaacgttgactgggaagatgtcttcactctcttagaccacaaccaaaacgaatggccatcaaacacttcaggcctcaaagagacgatggtagaatacagagaagaagtgaggaagctagcgagcaagatgatggaagtgatggacgagaacttgggcttacctaaaggttacataaagaaagcttttaacgaagggatggaagatggagaagagacggctttctttggaaccaaagtcagccattacccaccttgtcctcatcctgagcttgtcaatggccttagggctcataccgatgcaggaggtgtcgttttgctgttccaagacgatgagtacgatggccttcaagtgttgaaagatggagagtggatcgatgttcagccgatgcctaatgctattgttatcaacactggtgatcagattgaggttcttagcaacggaaggtacaagagtgcatggcacagggtgttggcgagggaggaagggaacaggaggtccattgcttccttctacaatccgtcgtacaaggcggccattgggccagcggcggcggaggaaggaagtgagaagaagtatccaaagtttgtgtttggagattatatggatgtctatgcaaaccagaagttcatgcctaaggagcctcgttttcttgctgtgaagactctctaa

SEQ ID NO: 567 - protein, 308 aa, Brassica napus
MAIPVIDFSKINGEKREKTLSEIAKACEKWGFFQLVNHGIPLELLNKVKKLASDCYKTEREKAFKTSTPVKLLNELLEKNSGEKLENVDWEDVFTLLDHNQNEWPSNTSGLKETMVEYREEVRKLASKMMEVMDENLGLPKGYIKKAFNEGMEDGEETAFFGTKVSHYPPCPHPELVNGLRAHTDAGGVVLLFQDDEYDGLQVLKDGEWIDVQPMPNAIVINTGDQIEVLSNGRYKSAWHRVLAREEGNRRSIASFYNPSYKAAIGPAAAEEGSEKKYPKFVFGDYMDVYANQKFMPKEPRFLAVKTL

SEQ ID NO: 568 - DNA, 912 bp, Brassica napus
  CDS (1)..(912)
atggctgatctcaatgaagtcattccgacaatagacttgaaaggggttccggatgagaagctgaaccagcagatacgtgaggcgagtgagagatggggatgtttcaaggtgatcaaccatggagtttcttcgtctttgttgtctgagatgaagaagactgttacagatctccatgaacgtccacacgaggtgaaagtacgaaacactgatgtgatactagcaagtggttacaagcctagaactgagttaaatcctctttatgaatcattcggtctttttgacgtcgcctctccacaagcgatcaacactttttgtgacaaacttgaggcctctgctgaacaaagagagatcatgatgaagtatggcaaagttatggatggtcttgcaaaagatttaacaaggatgttagcaaagagttatgaattagcggatcccgatatatgtaaagaatggccgagccagtttcggattagcaaatatcatttcaatcctgaaacagttggtaaaaatggtttgataatacacacggatcctggatttttaacaattgttcacggtgatgacaatgttggtggacttgaggccatggaccattcttcaggaacctattaccccataaacacgtcaccaaacacacttactgtcaaccttggtgacatggccaagatatggagcaatgggaggctgtgcaatgtgaagcatagagtgcaatgcaaagaagcaaaaatgaggattaccatctccaccttcctattaataccaatggatgaagttgttaaacctccaagtgaatttgtggatgttgaacatccacgtctatacaagcctatcagcgatggagaactaaggaagattaggctaagtaacaacatgcatgacggcgaatctttccagtttataaccctcaaataa

SEQ ID NO: 569 - protein, 303 aa, Brassica napus
MADLNEVIPTIDLKGVPDEKLNQQIREASERWGCFKVINHGVSSSLLSEMKKTVTDLHERPHEVKVRNTDVILASGYKPRTELNPLYESFGLFDVASPQAINTFCDKLEASAEQREIMMKYGKVMDGLAKDLTRMLAKSYELADPDICKEWPSQFRISKYHFNPETVGKNGLIIHTDPGFLTIVHGDDNVGGLEAMDHSSGTYYPINTSPNTLTVNLGDMAKIWSNGRLCNVKHRVQCKEAKMRITISTFLLIPMDEVVKPPSEFVDVEHPRLYKPISDGELRKIRLSNNMHDGESFQFITLK

SEQ ID NO: 570 - DNA, 966 bp, Brassica napus
  CDS (1)..(966)
atggagaagaacattaagtttcctgttgtagacttgtctaagctaaatggtgaagagagagaccaaaccatggctttgatcgacgatgcttgtcaaaactggggcttctttgagctgctaaaccatggaataccatatgatcttatggacaatattgagaggatgacaaaggaacactacaaaaaatttatggaacaaaagttcaaagaaatgctttcttccaaaaatttagatactctggagactgaagttgagaatgttgattgggaaagtactttcttccttcaccatcttcctcacactaatctctacgacatccccgatatgtcagatgaataccgagcggccatgaaggactttgggaagaggctagagaacctagcggaagaactgttggatttgttgtgtgagaatctagggttggagaaagggtacttgaagaaggtgtttagtgggacaaagggtccaacttttgggacaaaggttagcaactatccaccatgtcctaaaccggagatgatcaaagggcttagggctcacacggatgcaggaggcctcatattgctatttcaagacgataaggtcagtggtcttcagcttctcaaagatggtgtttgggttgatgtccctcctctcaaacactccattgtcatcaatcttggtgaccaacttgaggtgataaccaacgggaagtacaagagcataatgcaccgtgtgatgacacaaaaagaaggaaacaggatgtctatagcgtcgttctacaaccctggaagtgatgcggagatctctcccgcaccatctctagtggagaaagactctgatgaatatccgagttttgtgtttgatgactacatgaagctatatgctggagtcaagtttcagcccaaggagccacgttttgaggcgatgaagaatgttgcagcaaccacggatttgaacccggtggccacagtcgagacgttctaa

SEQ ID NO: 571 - protein, 321 aa, Brassica napus
MEKNIKFPVVDLSKLNGEERDQTMALIDDACQNWGFFELLNHGIPYDLMDNIERMTKEHYKKFMEQKFKEMLSSKNLDTLETEVENVDWESTFFLHHLPHTNLYDIPDMSDEYRAAMKDFGKRLENLAEELLDLLCENLGLEKGYLKKVFSGTKGPTFGTKVSNYPPCPKPEMIKGLRAHTDAGGLILLFQDDKVSGLQLLKDGVWVDVPPLKHSIVINLGDQLEVITNGKYKSIMHRVMTQKEGNRMSIASFYNPGSDAEISPAPSLVEKDSDEYPSFVFDDYMKLYAGVKFQPKEPRFEAMKNVAATTDLNPVATVETF

SEQ ID NO: 572 - DNA, 963 bp, Brassica napus
  CDS (1)..(963)
atggagaagaacatcaagtttcctgttatagacctatctaagctcaatggtgaagagagagaccaaaccatggctttgatcgacgatgcttgccaaaactggggattctttgagctgctaaaccatggaataccatatgatcttatggacaacattgagaggatgacaaaggaacactacaagaaatttatggaacaaaaattcaaggaaatgcttcgttccaaaggtttagatactctcgagaccgaagtggaagatatagattgggaaagcactttcttccttcatcatctccctcagaccaatctttatgacatccctaacatgtcagacgaataccgaacggctatgaaggattttgggaagaggctagagaacctagcggaagaactgttggatttgctgtgtgagaatctagggttggagaaagggtacttgaagaaggtgtttcgtggtacgaagggtccaacttttgggacaaaggttagcaactatccaccatgtcctaatcctgagatgatcaaagggcttagggctcacacagatgcaggaggcctcatcttgttgtttcaagacgataaagtcagtggccttcagcttctcaaagatggtgattgggttgatgttcctccactcaagcactccattgtcatcaatcttggtgaccaacttgaggtgataacaaacgggaagtacaagagcgtaatgcatcgtgtaatgactcaaaaagaaggaaacaggatgtctattgcgtccttctacaaccctggaagcgatgctgagatctctccggcacaatctcttgtggacaaagaatcggagtacccgagttttgtgtttgacgactacatgaaactctactctggagtcaagtttcagcccaaggagccacggtttgaggccatgaagaatgctgctgtaaccacggatgtgaatccggtggccaccgtggagacattctaa

SEQ ID NO: 573 - protein, 320 aa, Brassica napus
MEKNIKFPVIDLSKLNGEERDQTMALIDDACQNWGFFELLNHGIPYDLMDNIERMTKEHYKKFMEQKFKEMLRSKGLDTLETEVEDIDWESTFFLHHLPQTNLYDIPNMSDEYRTAMKDFGKRLENLAEELLDLLCENLGLEKGYLKKVFRGTKGPTFGTKVSNYPPCPNPEMIKGLRAHTDAGGLILLFQDDKVSGLQLLKDGDWVDVPPLKHSIVINLGDQLEVITNGKYKSVMHRVMTQKEGNRMSIASFYNPGSDAEISPAQSLVDKESEYPSFVFDDYMKLYSGVKFQPKEPRFEAMKNAAVTTDVNPVATVETF

SEQ ID NO: 574 - DNA, 1062 bp, Brassica napus
  CDS (1)..(1062)
atgggagtactcgacgaagcttttatccaagctccagaacacagacccaaaactcatctcacacactccggtgactacattctctccaaggagatcccgaccatcgatctctcctctctccaagacccaaactgcgacaagacagcgctagcgacagagattgcagaagcatgcatgagatggggctttttccaggtgatcaaccatggtttgtcgttggacttaatgcgtagggtggagaagacggtggccgagtttttcagtctaacgttggaggagaagagaagagtgaaaagagatgaagtgaaccctatgggttatcacgacggagaacataccaaaaacgttagagactggaaagagattttcgatttctttctgcaggactcgacgacggttccggcgactacagagccggaagataccgagctcaggaagctgactaacccgtggcctcaaaacccttccgacttcagagaggtgtgccaagaatatgcaagagaagttgagaagttagctttcaagcttttggaacttatctccattagcttgggtctacccggtgatcggttaacaggttacttcaaggaccaaacaagctttttgcggtttaaccattaccctccttgcccgaacccggagctagcattaggcgttggacgccacgcagacgcaggagttataaccgtcttggcacaagatagtgtgggtgggttacaagtgagccgtagatcagatggacaatggttctctgtgaaacccaaccctgatgctttcatcattaacattggcaactgcatgcaggtatggacaaatgacaagtattggagtgcagaacatagagtggtagtgaattcaagcaaagagagattctcaatgccattcttccttttcccatcccacgataccaacattgagccattgaaggagcttataagcgaagacaacccgccttgttacaaaaagtacaattggggcaagttctttgctgcaagaaacagaagtgattacaagaagctccaaactgagagcatccagattgatcgcttcaaggccgcttaa

SEQ ID NO: 575 - protein, 353 aa, Brassica napus
MGVLDEAFIQAPEHRPKTHLTHSGDYILSKEIPTIDLSSLQDPNCDKTALATEIAEACMRWGFFQVINHGLSLDLMRRVEKTVAEFFSLTLEEKRRVKRDEVNPMGYHDGEHTKNVRDWKEIFDFFLQDSTTVPATTEPEDTELRKLTNPWPQNPSDFREVCQEYAREVEKLAFKLLELISISLGLPGDRLTGYFKDQTSFLRFNHYPPCPNPELALGVGRHADAGVITVLAQDSVGGLQVSRRSDGQWFSVKPNPDAFIINIGNCMQVWTNDKYWSAEHRVVVNSSKERFSMPFFLFPSHDTNIEPLKELISEDNPPCYKKYNWGKFFAARNRSDYKKLQTESIQIDRFKAA

SEQ ID NO: 576 - DNA, 939 bp, Brassica napus
  CDS (1)..(939)
atggcgattcctgggattgatttctccaagatcaatggcgaaaaaagggaaaagacactctctgaaatcgctaaagcttgcgaagaatggggattttttcagctggtgaaccatgggattccattggagcttcttaacaaggtgaaaaagctggcctcagactgctacaaaacggagagagaagaagcgttcaaaacctcaactcccgtgaagctactcaacgaactgcttgagaaaaactctggagagaagctcaagaacgttgactgggaagatgtcttcactctcttagaccacagccaaaacgaatggccatcaaacacttccaacttcaaagagacgatggtagaatacagaggagaagtgaggaagctagcgagcaagatgatggaagtgatggacgagaacttgggcttacctaaaggttacataaagaaagcttttaacgaagggatggaagatggagaagagacggctttctttggaaccaaagtcagccattacccaccttgtcctcatcctgagctcgtcaatggccttcgagctcatactgatgcaggaggtgtcgttttgctgttccaagacgatgagtacgatggtcttcaggtgttgaaagatggagagtggatcgatgttcagccgctgcctaatgctattgttatcaacactggtgatcagattgaagttcttagcaatggaaggtacaagagtgcatggcacagagtgttggccagggaaaatggaaaccggaggtcaatagcttccttctacaacccgtcgtacaaggcggccattggtccaccggagatgacggcagcggcggaggaaggaagtgagaagaagtatccaaagtatgtgtttggagattatatggatgtctatgcaaaccagaagttcatgcctaaagagcctcgttttctagctgtaaagactctctga

SEQ ID NO: 577 - protein, 312 aa, Brassica napus
MAIPGIDFSKINGEKREKTLSEIAKACEEWGFFQLVNHGIPLELLNKVKKLASDCYKTEREEAFKTSTPVKLLNELLEKNSGEKLKNVDWEDVFTLLDHSQNEWPSNTSNFKETMVEYRGEVRKLASKMMEVMDENLGLPKGYIKKAFNEGMEDGEETAFFGTKVSHYPPCPHPELVNGLRAHTDAGGVVLLFQDDEYDGLQVLKDGEWIDVQPLPNAIVINTGDQIEVLSNGRYKSAWHRVLARENGNRRSIASFYNPSYKAAIGPPEMTAAAEEGSEKKYPKYVFGDYMDVYANQKFMPKEPRFLAVKTL

SEQ ID NO: 578 - DNA, 1059 bp, Glycine max
  CDS (1)..(1059)
atgggagaggtagacccagctttcatccaagacctagaacacagaccaaagctctctcccaaccaagcagaaggaattcccataattgacctctctccaatatccaaccacacagtttcagatccatcttccattgaaaacttagtgaagcagatagaaagtgcatgcaaggagtggggtttcttccaagtaaccaaccatggggtgcccctcactctaaggcaaaacattgagaaagcctcaagattgttctttgcacagaatttggaggagaaaagaaaggttagcagagatgagagttctccaaatggttactatgacacagaacacaccaagaacattagggactggaaagaagtctttgattttcaagccaaagaccccactttcatccctgtcacttttgatgaacatgatgatcgagtcactcactggactaatcattctcctcaataccctccaaactttagggatataatcgaagagtatgttcaagaggtggaaaagctgtcctttaagctgttggagattatagctctgagcttaggccttgaggcaaagaggtttgaagagtttttcatcaaagatcaaactagctttattcgactcaaccactatcctccatgcccttcccctcatctagctcttggtgttggccgacacaaggatggtggagccttaaccgttcttgcacaagatgaggttggaggacttgaagtgaaacgcaaagcagatcaagagtggataagagtgaaacctacaccagatgcttatataatcaacgttggtgatcttattcaggtttggagcaatgatgcctatgagagtgtggaacacagagtgatggttaactctgagaaagaaaggttttctattccgtttttcttcaaccctgcacatgacatagaagtcaagcctttggaggagttgacaaatgaacacaatccttcaaaatataggccatacaaatggggcaagtttcttgttcacagaaagggaagcaatttcaagaaacagaatgtggaaaacattcagatttatcattataagatagcctaa

SEQ ID NO: 579 - protein, 352 aa, Glycine max
MGEVDPAFIQDLEHRPKLSPNQAEGIPIIDLSPISNHTVSDPSSIENLVKQIESACKEWGFFQVTNHGVPLTLRQNIEKASRLFFAQNLEEKRKVSRDESSPNGYYDTEHTKNIRDWKEVFDFQAKDPTFIPVTFDEHDDRVTHWTNHSPQYPPNFRDIIEEYVQEVEKLSFKLLEIIALSLGLEAKRFEEFFIKDQTSFIRLNHYPPCPSPHLALGVGRHKDGGALTVLAQDEVGGLEVKRKADQEWIRVKPTPDAYIINVGDLIQVWSNDAYESVEHRVMVNSEKERFSIPFFFNPAHDIEVKPLEELTNEHNPSKYRPYKWGKFLVHRKGSNFKKQNVENIQIYHYKIA

SEQ ID NO: 580 - DNA, 1059 bp, Glycine max
  CDS (1)..(1059)
atgggagaggttgacgcagcattcatccaagacccaccacacaggccaaagctctccaccatccaagccgaaggaattcccataattgatctctctccaataaccaaccacagagtttcagacccttctgctattgaaggcttagtgaaggagataggtagtgcatgcaacgagtggggtttcttccaagtaacaaaccatggagtgcccctcactctaaggcaaaacattgagaaagcctcaaaattgttctttgcacagagtgcggaggaaaagagaaaggttagcagaaatgagagctctccagcgggttattatgacacagaacacaccaaaaacgttagggactggaaagaagtctttgattttctagccaaagaacccactttcattcctgtcacttctgatgaacatgatgatcgagtcaatcagtggactaatcaatcccctgaataccctctaaactttagggttgtaacacaagagtatattcaagagatggaaaagctgtcctttaagattttagagcttatagctttgagcttaggccttgaagcaaagaggtttgaagaatttttcatcaaagaccaaactagctttattcgactcaaccactatcctccatgcccttatcctgaccttgctcttggcgtcggtcgacacaaggaccctggtgccttgaccattcttgcacaggacgaagttggaggacttgaagtgagacgtaaacgggatcaagagtggattagagtgaaaccaaccccaaatgcttatattatcaacattggtgatactgttcaggtttggagcaatgatgcatatgagagtgtggatcacagagtggtggtcaactctgagaaggaaaggctttccattccgttcttcttcttccctgcacacgacaccgaagtaaagcctttggaggagctgataaatgagcaaaacccttcaaaatataggccatacaattggggcaagtttcttgtccacagagggaacagcaatttcaagaagcaaaatgaggagaacattcaaatttatcattacaagatagcttaa

SEQ ID NO: 581 - protein, 352 aa, Glycine max
MGEVDAAFIQDPPHRPKLSTIQAEGIPIIDLSPITNHRVSDPSAIEGLVKEIGSACNEWGFFQVTNHGVPLTLRQNIEKASKLFFAQSAEEKRKVSRNESSPAGYYDTEHTKNVRDWKEVFDFLAKEPTFIPVTSDEHDDRVNQWTNQSPEYPLNFRVVTQEYIQEMEKLSFKILELIALSLGLEAKRFEEFFIKDQTSFIRLNHYPPCPYPDLALGVGRHKDPGALTILAQDEVGGLEVRRKRDQEWIRVKPTPNAYIINIGDTVQVWSNDAYESVDHRVVVNSEKERLSIPFFFFPAHDTEVKPLEELINEQNPSKYRPYNWGKFLVHRGNSNFKKQNEENIQIYHYKIA

SEQ ID NO: 582 - DNA, 1059 bp, Glycine max
  CDS (1)..(1059)
atgggagaggtagacacagctttcatccaagaaccagaacacaggccaaagctctctcccaaccaagcagaaggaattcccataattgacctctctccaataaccaaccacgcagtttcagatccatctgccattgaaaacttagtgaaggagatagaaagtgcatgcaaggagtggggtttcttccaagtaaccaaccatggggtgcccctcactctaaggcaaaacattgagaaagcctcaagactgttctttgaacagactcaggaggagaagaagaaggttagcagagacgagaaatccacaactggttactatgacacagaacacaccaagaacgttagggactggaaagaagtgtttgattttctagccaaagatcccacttttattcctgtcacttctgatgaacatgatgatcgagtcactcactggactaatgtatcccctgaataccctccaaactttagggatataatggaagagtatattcaagaggtggaaaagctgtcctttaagctgttggagattatagctctgagcttaggccttgaggcaaagaggtttgaagagtttttcatcaaagatcaaactagctttattcgactcaaccactatcctccatgcccttcccctcatctagctcttggtgttggtcgacacaaggacattggagccttaaccattcttgcacaagatgatgttggaggacttgaagtcaaacgcaaagcagatcaagagtggataagagtgaaacctacaccaggtgcttatataatcaacgttggtgatcttattcaggtttggagcaatgacttatatgagagtgtggaacacagagcgatggttaactctgagaaagaaaggttttccataccttttttcttattccctgcacactacactgaagtcaagcctttggaggagttgacaaatgaccaaaaccctgcaaaatataggccatacaattggggcaagtttcttgtccgtagaaagggcagcaatttcaagaaactaaatgtggagaatattcagatttatcattataagatagcttaa

SEQ ID NO: 583 - protein, 352 aa, Glycine max
MGEVDTAFIQEPEHRPKLSPNQAEGIPIIDLSPITNHAVSDPSAIENLVKEIESACKEWGFFQVTNHGVPLTLRQNIEKASRLFFEQTQEEKKKVSRDEKSTTGYYDTEHTKNVRDWKEVFDFLAKDPTFIPVTSDEHDDRVTHWTNVSPEYPPNFRDIMEEYIQEVEKLSFKLLEIIALSLGLEAKRFEEFFIKDQTSFIRLNHYPPCPSPHLALGVGRHKDIGALTILAQDDVGGLEVKRKADQEWIRVKPTPGAYIINVGDLIQVWSNDLYESVEHRAMVNSEKERFSIPFFLFPAHYTEVKPLEELTNDQNPAKYRPYNWGKFLVRRKGSNFKKLNVENIQIYHYKIA

SEQ ID NO: 584 - DNA, 1059 bp, Glycine max
  CDS (1)..(1059)
atgggagaggttgacgcagcattcatccaagacccaccacacaggccaaagctctccaccatccaagccgaaggaattcccataattgatctctctccaataaccaaccacagagtttcagacccttctgctattgaaggcttagtgaaggagataggtagtgcatgcaacgagtggggtttcttccaagtaacaaaccatggagtgcccctcactctaaggcaaaacattgagaaagcctcaaaattgttctttgcacagagtgcggaggaaaagagaaaggttagcagaaatgagagctctccagcgggttattatgacacagaacacaccaaaaacgttagggactggaaagaagtctttgattttctagccaaagaacccactttcattcctgtcacttctgatgaacatgatgatcgagtcaatcagtggactaatcaatcccctgaataccctctaaactttagggttgtaacacaagagtatattcaagagatggaaaagctgtcctttaagattttagagcttatagctttgagcttaggccttgaagcaaagaggtttgaagaatttttcatcaaagaccaaactagctttattcgactcaaccactatcctccatgcccttatcctgaccttgctcttggcgtcggtcgacacaaggaccctggtgccttaaccattcttgcacaggatgaggttggaggacttgaagtgagacgtaaagcagatcaagagtggataagagtgaaacccaccccagatgcttatattatcaacattggtgacactgttcaggtttggagcaatgatgcatatgagagtgtggatcacagagtggtggtcaactctgagaaggaaaggttttccattcctttcttcttcttccctgcacacgacaccgaagttaagcctttggaggagctgataaatgagcaaaacccttcaaaatataggccatacaagtggggcaagtttcttgtccacagagggaacagcaattttaagaagcaaaatgaggagaacattcaaatttatcattacaagatagcttaa

SEQ ID NO: 585 - protein, 352 aa, Glycine max
MGEVDAAFIQDPPHRPKLSTIQAEGIPIIDLSPITNHRVSDPSAIEGLVKEIGSACNEWGFFQVTNHGVPLTLRQNIEKASKLFFAQSAEEKRKVSRNESSPAGYYDTEHTKNVRDWKEVFDFLAKEPTFIPVTSDEHDDRVNQWTNQSPEYPLNFRVVTQEYIQEMEKLSFKILELIALSLGLEAKRFEEFFIKDQTSFIRLNHYPPCPYPDLALGVGRHKDPGALTILAQDEVGGLEVRRKADQEWIRVKPTPDAYIINIGDTVQVWSNDAYESVDHRVVVNSEKERFSIPFFFFPAHDTEVKPLEELINEQNPSKYRPYKWGKFLVHRGNSNFKKQNEENIQIYHYKIA

SEQ ID NO: 586 - DNA, 897 bp, Glycine max
  CDS (1)..(897)
atggaggcgattgttccagtggtggatttccagaggctttcagaggaagaggagcgcaagaagctgagaaaaacatgtgagaaaccagggtgtttcagaatcatcaaccactcaattccactaacactcatggctgacatgaagtcagtggttaaatacttgcatgaccttcccacggaaatcaaaatgcgcaacaaaccctccgtccctgagagtggctatagggcggcaatgccaacaagtcctctatacgagggcatgggaatatatgacatgcatgcctcaccacaagcatttgaagatttctgctccaacttgaatgtgtcaccccgtcacaggcaaataataaaggaatatggtcaagcaattcatgacttggcatcaaatttatcacaaaaaatggctgagtctttgggtataatggataatgatttcaaggactggccattcattttgaggactattaaatatagttttaccccagatgttataggctccacgggagcacaattgcactcagatacaggatttatcactctacttcaagatgatgaacatgttagtggtcttgagatgatagatgattttggcacatttaaggcagttcctcccataccaggggccttcctttgcattgttggagatgttggacatgtttggagcaatggaaatttttggaatgctagacatcgtgtaatatgcaaggaaacgggtactggttattcatttggtgcatatatgttatcaccaagggatggtaatgttgaggcgcctaaaaaattggtggaagttgaccatgtacaacgctatcgaccatttaagtacgaagatttgagggatttcaaaatcaccacaggaaagagagttgaagtccttgatcaatatcgcatttgttag

SEQ ID NO: 587 - protein, 298 aa, Glycine max
MEAIVPVVDFQRLSEEEERKKLRKTCEKPGCFRIINHSIPLTLMADMKSVVKYLHDLPTEIKMRNKPSVPESGYRAAMPTSPLYEGMGIYDMHASPQAFEDFCSNLNVSPRHRQIIKEYGQAIHDLASNLSQKMAESLGIMDNDFKDWPFILRTIKYSFTPDVIGSTGAQLHSDTGFITLLQDDEHVSGLEMIDDFGTFKAVPPIPGAFLCIVGDVGHVWSNGNFWNARHRVICKETGTGYSFGAYMLSPRDGNVEAPKKLVEVDHVQRYRPFKYEDLRDFKITTGKRVEVLDQYRIC

SEQ ID NO: 588 - DNA, 903 bp, Glycine max
  CDS (1)..(903)
atggaggaaattgttccagtggtggatttccagaggctttcagaggaagaggagcgcaagaagctgagaaaaacatgtgagaaaccagggtgtttcagaatcatcaaccactcaattccactaacactcatggctgacatgaagtcagtggttaaatacttgcatgaccttcccgcggaaatcaaaatgcgcaacaaaccctcctccgtccctgagagtggctatagggcggcatcgccaacaagtcctctatacgagggcatgggaatatatgacatgcatgcctcaccacaagcatttgaagatttctgctccaacttgaatgtgtcaccccgtcacaggcaaataataaaggaatatggtcaagcaattcatgacttggcatcaaatgtatcccaaaaaatggctgagtctttgggtatagtggataatgatttcaaggactggccattcattttgaggactattaaatatagttttaccccagatgttataggctccacgggagcacaattgcactcagatacaggatttatcactctacttcaagatgatgaacatgttagtggtcttgagatgatggatgattttggctcatttaaggcagttcctcccataccaggggccttcctttgcattgttggagatgttggacatgtttggagcaatggaaaattttggaatgccagacatcgtgtaatatgcaaggaaacgggtactcgttattcatttggtgcatttatgttatcaccaagggatggtaatgttgaggccccaaaaaaattggtggaagttgaccatgtacaacgctatcgaccatttaagtacgaagatttgagggatttcagaatcaccacaggaaagagggatggcgaagtccttgatcaatatcgcatttgttag

SEQ ID NO: 589 - protein, 300 aa, Glycine max
MEEIVPVVDFQRLSEEEERKKLRKTCEKPGCFRIINHSIPLTLMADMKSVVKYLHDLPAEIKMRNKPSSVPESGYRAASPTSPLYEGMGIYDMHASPQAFEDFCSNLNVSPRHRQIIKEYGQAIHDLASNVSQKMAESLGIVDNDFKDWPFILRTIKYSFTPDVIGSTGAQLHSDTGFITLLQDDEHVSGLEMMDDFGSFKAVPPIPGAFLCIVGDVGHVWSNGKFWNARHRVICKETGTRYSFGAFMLSPRDGNVEAPKKLVEVDHVQRYRPFKYEDLRDFRITTGKRDGEVLDQYRIC

SEQ ID NO: 590 - DNA, 1026 bp, Oryza sativa
  CDS (1)..(1026)
atggaggagcacgactacgactccaactcgaacccgccgttgatgagcacgtacaagcacctgttcgtggagcagcaccgcctggacatggacatgggcgccatcgacgtcgacgagtgcgagctccctgtgatcgacctcgcggggctcatggaggcggagcaggtgtgccgcgcagacatggtgcgtgcggcgtcggaatggggcttcttccaggtgaccaaccacggcgtgccgcaggcgctgctgcgcgagctgcacgacgcacaggtggccgtgttccggcggcccttccaggagaaggtgaccgagaggctgctcggcttctcgccggagagctaccggtggggaacgccgacggccaagtgcctggagcagctgtcgtggtcggaggcctatcacatcccaatgacgacgcccaggcccagcacgagcatcagggccagggcggtgatcgaggaggtgtcgagggcgatgtacgagctggcgcagaagctggcagagatcctgatgagagggctgccgggcgccggcgagggcgagacgatggtgacgacgcgggaggagacgtgcttcctgcggctgaaccggtacccaccgtgcgccatggccatggggggcttcgggctgtgcccgcacacggacagcgacttgctcaccatcgtgcaccagcagcaggacaccgtcggcggcctccagctgctcaagggcggcaggtgggtggccgtgaagcccagccccagcaccctcatcgtcaacgtcggcgacctcctgcaggcgtggagcaacgatgtgtacaagagcgtggagcacagggtgatggccaacgccacgctggagcgcttctccatggccttcttcctctgcccctcctaccacacgctcatcatcccaagcagcagccatgtccacgacgacgatgcccattaccggagcttcaccttcggcgagtacaggaagcagatcatggaggacgtcaggagcacaggccgcaagattggactgcaccgctttcgaacccgatag

SEQ ID NO: 591 - protein, 341 aa, Oryza sativa
MEEHDYDSNSNPPLMSTYKHLFVEQHRLDMDMGAIDVDECELPVIDLAGLMEAEQVCRADMVRAASEWGFFQVTNHGVPQALLRELHDAQVAVFRRPFQEKVTERLLGFSPESYRWGTPTAKCLEQLSWSEAYHIPMTTPRPSTSIRARAVIEEVSRAMYELAQKLAEILMRGLPGAGEGETMVTTREETCFLRLNRYPPCAMAMGGFGLCPHTDSDLLTIVHQQQDTVGGLQLLKGGRWVAVKPSPSTLIVNVGDLLQAWSNDVYKSVEHRVMANATLERFSMAFFLCPSYHTLIIPSSSHVHDDDAHYRSFTFGEYRKQIMEDVRSTGRKIGLHRFRTR

SEQ ID NO: 592 - DNA, 1035 bp, Triticum aestivum
  CDS (1)..(1035)
atggtgcaagacctggcgtcgaccggtgtcgaggagccgccgagccggtacttagtgcacgagcaagaccgtcacggtgacctgctggccgccggcgaaatgccggagcccatccctctcattgaccttagccggctcatggacgccgatgaggccgacaagctccgggctgctctacagacatggggcttcttcctggccaccaatcatgggatcgaggattctctcatggatgcaatgatgagcgcgtcaagggagttcttccgtcaaccgtccgaagagaagcagaaatgcagcaacctggtggacggcaacggcaagcactaccaggtggaagggtatggcagtgacaaagtggtttctgaggatcatggcctgaactggaacgaccggttgcatctgagagtggagccagaagatgagaggaatttcgctaagtggcccagtcaaccggaatctttcagggatgtgctacatgagtacgcatcaaaaaccaagaaactaagagaccttgtcttgcgatcaatagccaagctcctggacattgatgaggattacttcgttaaccagatatcaaacaaggcctccgggtttgctagattgtactactaccctccatgtccgagacctgacctagttttgggcctcaggcctcactctgatggaaatctccttactatcctttttgtcgacgacgatgttggtggcttacaagttcagagagatgggaaatggtacaatgttccagccaagcctcacacactggtgatcaacttgggagactgcctggagataatgaataacggaatctttaggagcccggttcacagagtggtgacaaacaccgagaaggagaggctttcgctggccatgttctatgccgtggatgaagaaacagtgctggagccagcgcccggtttgctggatgacaagcgaccaccaagatataggaaaatgctgaccaaggatttcgtggctgggctctttgaacatttccgtcaagggaagagattcatcgacaccctgaagatataa

SEQ ID NO: 593 - protein, 344 aa, Triticum aestivum
MVQDLASTGVEEPPSRYLVHEQDRHGDLLAAGEMPEPIPLIDLSRLMDADEADKLRAALQTWGFFLATNHGIEDSLMDAMMSASREFFRQPSEEKQKCSNLVDGNGKHYQVEGYGSDKVVSEDHGLNWNDRLHLRVEPEDERNFAKWPSQPESFRDVLHEYASKTKKLRDLVLRSIAKLLDIDEDYFVNQISNKASGFARLYYYPPCPRPDLVLGLRPHSDGNLLTILFVDDDVGGLQVQRDGKWYNVPAKPHTLVINLGDCLEIMNNGIFRSPVHRVVTNTEKERLSLAMFYAVDEETVLEPAPGLLDDKRPPRYRKMLTKDFVAGLFEHFRQGKRFIDTLKI

SEQ ID NO: 594 - DNA, 1047 bp, Triticum aestivum
  CDS (1)..(1047)
atgggcggcctctccatggaccaggccttcgtgcaggcgcccgagcatcgcaccaaggcgaacctcgccgacgcggacggcatcccggtcatcgacctctcccctctcgcggccggcgacaaggccggcgtggacgccctcgccgccgaggtgggcagggcgagccaggactgggggttcttcgtggtggtgcgccacggcgtgctggcggagacggtggcgcgggcgctggaggcgcagagggccttcttcgcgctgccggcggaccggaaggcggccgtgcggagggacgaggcggcaccgctggggtactacgagtcggagcacaccaagaacgtcagggactggaaggaggtgttcgacctcgtcccccgcgagccgccgccgcctgccgcggttgccgacggcgagctcgtgttcgagaacaagtggcccgaggacctcccgcggttcagagaggcgctcgaggagtacgcggaagcgatggaggagctggcgttcaagctgctggagctgatcgcccggagcctgggcctgcgaccggaccgcctgcgctgcttcttcaaggaccagaccaccttcatccggctgaaccactatccgccctgcccgagccccgacctcgccctcggcgtcggccgccacaaggacgccggcgcgctcaccatcctctaccaggacgacgtcggcgggctggacgtccggcgccggtccgacggcgagtgggtgcgcgtcaggcccgtcccggactcgtacgtcatcaacgtcggcgacatcatccaggtgtggagcaacgacaggtacgagagcgcggagcacagggtgtcggtgaactcgcagaaggagaggttctccatgccctacttcttcaaccccgggagcgacgccatggtcgagccgctggaggagatggtgagcgacgagaggccggccaggtacgacgcctacaactggggcaacttcttcagcaccaggaagaacagcaacttcaggaagctcgacgtcgaaaacgtccagatcgcacacttcagaaaggaccgatcttga

SEQ ID NO: 595 - protein, 348 aa, Triticum aestivum
MGGLSMDQAFVQAPEHRTKANLADADGIPVIDLSPLAAGDKAGVDALAAEVGRASQDWGFFVVVRHGVLAETVARALEAQRAFFALPADRKAAVRRDEAAPLGYYESEHTKNVRDWKEVFDLVPREPPPPAAVADGELVFENKWPEDLPRFREALEEYAEAMEELAFKLLELIARSLGLRPDRLRCFFKDQTTFIRLNHYPPCPSPDLALGVGRHKDAGALTILYQDDVGGLDVRRRSDGEWVRVRPVPDSYVINVGDIIQVWSNDRYESAEHRVSVNSQKERFSMPYFFNPGSDAMVEPLEEMVSDERPARYDAYNWGNFFSTRKNSNFRKLDVENVQIAHFRKDRS

SEQ ID NO: 596 - DNA, 1050 bp, Zea mays
  CDS (1)..(1050)
atgggcggcctcactatggaccaggccttcgtgcaggcccccgagcaccgccccaagcccatcgtcaccgaggccaccggcatccctctcatcgacctctcgcctctggccgccagcggcggcgccgtggacgcgctggccgccgaggtgggcgcggcgagccgggactggggcttcttcgtggtcgtgggccacggcgtgcccgcagagaccgtggcgcgcgcgacggaggcgcagcgagcgttcttcgcgctgccggcagagcggaaggccgccgtgcggaggaacgaggcggagccgctcgggtactacgagtcggagcacaccaagaacgtgagggactggaaggaggtgtacgacctcgtgccgcgcgagccgccgccgccggcagccgtggccgacggcgagctcgtgttcgagaacaagtggccccaggatctaccgggcttcagagaggcgctggaggagtacgcgaaagcgatggaagagctggcgttcaagctgctggagctgatcgcccggagcctgaagctgaggcccgaccggctgcacggcttcttcaaggaccagacgaccttcatccggctgaaccactaccctccttgcccgagccccgacctggccctcggcgtggggcggcacaaggacgccggcgccctgaccatcctgtaccaggacgacgtcggggggctcgacgtccggcggcgctccgacggcgagtgggtccgcgtcaggcccgtgcccgactcgttcatcatcaacgtcggcgacctcatccaggtgtggagcaacgacaggtacgagagcgcggagcaccgggtgtcagtgaactcggcgagagagaggttctccatgccctacttcttcaacccggcgacctacaccatggtggagccggtggaggagctggtgagcgaggacgatccgcccaggtacgacgcctacaactggggcgacttcttcagcaccaggaagaacagcaacttcaagaagctcaacgtggagaacattcagatcgcgcatttcaagaagagcctcgtcctcgcctaa

SEQ ID NO: 597 - protein, 349 aa, Zea mays
MGGLTMDQAFVQAPEHRPKPIVTEATGIPLIDLSPLAASGGAVDALAAEVGAASRDWGFFVVVGHGVPAETVARATEAQRAFFALPAERKAAVRRNEAEPLGYYESEHTKNVRDWKEVYDLVPREPPPPAAVADGELVFENKWPQDLPGFREALEEYAKAMEELAFKLLELIARSLKLRPDRLHGFFKDQTTFIRLNHYPPCPSPDLALGVGRHKDAGALTILYQDDVGGLDVRRRSDGEWVRVRPVPDSFIINVGDLIQVWSNDRYESAEHRVSVNSARERFSMPYFFNPATYTMVEPVEELVSEDDPPRYDAYNWGDFFSTRKNSNFKKLNVENIQIAHFKKSLVLA

SEQ ID NO: 598 - DNA, 1050 bp, Zea mays
  CDS (1)..(1050)
atgggcggcctcactatggaccaggccttcgtgcaggcccccgagcaccgccccaagcccatcgtcaccgaggccaccggcatccctctcatcgacctctcgcctctggccgccagcggcggcgccgtggacgcgctggccgccgaggtgggcgcggcgagccgggactggggcttcttcgtggtcgtgggccacggcgtgcccgcagagaccatggcgcgcgcgacggaggcgcagcgagcgttcttcgcgctgccggcagagcggaaggccgccgtgcggaggaacgaggcggagccgctcgggtactacgagtcggagcacaccaagaacgtgagggactggaaggaggtgtacgacctcgtgccgcgcgagccgccgccgccggcagccgtggccgacggcgagctcgtgttcgagaacaagtggccccaggatctgccgggcttcagagaggcgctggaggagtacgccaaagcgatggaagagctggcgttcaagctgctggagctgatcgcccggagcctgaagctgaggcccgaccggctgcacggcttcttcaaggaccagacgaccttcatccggctgaaccactaccctccttgcccgagccccgacctggccctcggcgtggggcggcacaaggacgccggcgccctgaccatcctgtaccaggacgacgtcggggggctcgacgtccggcggcgctccgacggcgagtgggtccgcgtcaggcccgtgcccgactcgttcatcatcaacgtcggcgacctcatccaggtgtggagcaacgacaggtacgagagcgcggagcaccgggtgtcggtgaactcggcgagggagaggttctccatgccctacttcttcaacccggcgacctacaccatggtggagccggtggaggagctggtgagcaaggacgatccgcccaggtacgacgcctacaactggggcgacttcttcagcaccaggaagaacagcaacttcaagaagctcaacgtggagaacattcagatcgcgcatttcaagaagagcctcgtcctcgcctaa

SEQ ID NO: 599 - protein, 349 aa, Zea mays
MGGLTMDQAFVQAPEHRPKPIVTEATGIPLIDLSPLAASGGAVDALAAEVGAASRDWGFFVVVGHGVPAETMARATEAQRAFFALPAERKAAVRRNEAEPLGYYESEHTKNVRDWKEVYDLVPREPPPPAAVADGELVFENKWPQDLPGFREALEEYAKAMEELAFKLLELIARSLKLRPDRLHGFFKDQTTFIRLNHYPPCPSPDLALGVGRHKDAGALTILYQDDVGGLDVRRRSDGEWVRVRPVPDSFIINVGDLIQVWSNDRYESAEHRVSVNSARERFSMPYFFNPATYTMVEPVEELVSKDDPPRYDAYNWGDFFSTRKNSNFKKLNVENIQIAHFKKSLVLA

SEQ ID NO: 600 - DNA, 903 bp, Zea mays
  CDS (1)..(903)
atggcggagatcccggtgatcgacctgcgcctcgccggctcgtcgcccgacgagtcggcgcggctgcgcgacgcgtgcgagcgcctgggctgctttcgggtgaccggccacggcgcgcccgcggggctcctggccgacatgaaggccgccgtgcgcgcgctcttcgacctccccgacgacgccaagcgccgcaacgccgacgtcatccccggcagcggctacgtcgcgccctgccccgccaacccgctctacgaggccttcgggctcctcgacgccgccgcgcccgccgacgtcgacgccttctgcgcgcgcctcgacgcgccgcccaaaatcagggagaccgtcaagacctacgcggagaagatgcacgacgtgatcgtcggcgtcgccggcgagctggccaccagcctggggctgggcctggaggagcactcgttccaggactggccgtgccagttccgcatcaacaggtacaactacacgcaggagacggtgggctcctccggcgtgcagacccacacggactcgggcttcctcaccgtgctccaggaggacgagtgcgtcggcggcctcgaggtgctggaccccgccaccggcgagttcgtgcccgtggaccccgtcgccggctccttcctcgtaaacatcggcgacgtcggcacggcgtggagcaacgggaggctccacaacgtgaagcaccgggtgcggtgcgtcgcacccgtgccgcgcatctccatcgccatgttcctgctcgcacccaaggacgacagcgtgagcgcaccggaggcgttcgtcgacgcggaccacccgcgcaggtacaagccgttcaactacaacgactaccggaggctcagactgtccaccggcgagcacgcaggcgaggcgctcgcacggatggcggcgtga

SEQ ID NO: 601 - protein, 300 aa, Zea mays
MAEIPVIDLRLAGSSPDESARLRDACERLGCFRVTGHGAPAGLLADMKAAVRALFDLPDDAKRRNADVIPGSGYVAPCPANPLYEAFGLLDAAAPADVDAFCARLDAPPKIRETVKTYAEKMHDVIVGVAGELATSLGLGLEEHSFQDWPCQFRINRYNYTQETVGSSGVQTHTDSGFLTVLQEDECVGGLEVLDPATGEFVPVDPVAGSFLVNIGDVGTAWSNGRLHNVKHRVRCVAPVPRISIAMFLLAPKDDSVSAPEAFVDADHPRRYKPFNYNDYRRLRLSTGEHAGEALARMAA

SEQ ID NO: 602 - DNA, 21 bp, Artificial sequence
  primer
atgggggaactaaacggagtc

SEQ ID NO: 603 - DNA, 21 bp, Artificial sequence
  primer
tcatttatctagtcctgcatg

SEQ ID NO: 604 - protein, 291 aa, Artificial sequence
  consensus sequence
  Variant (2)..(5): Xaa in position 2 to 5 is any amino acid
  Variant (7)..(7): Xaa in position 7 is any amino acid
  Variant (9)..(11): Xaa in position 9 to 11 is any amino acid
  Variant (14)..(18): Xaa in position 14 to 18 is any amino acid
  Variant (20)..(37): Xaa in position 20 to 37 is any amino acid
  Variant (39)..(48): Xaa in position 39 to 48 is any amino acid
  Variant (49)..(55): Xaa in position 49 to 55 is any or no amino acid
  Variant (58)..(70): Xaa in position 58 to 70 is any amino acid
  Variant (71)..(75): Xaa in position 71 to 75 is any or no amino acid
  Variant (77)..(92): Xaa in position 77 to 92 is any amino acid
  Variant (93)..(110): Xaa in position 93 to 110 is any or no amino acid
  Variant (112)..(116): Xaa in position 112 to 116 is any amino acid
  Variant (118)..(123): Xaa in position 118 to 123 is any amino acid
  Variant (125)..(136): Xaa in position 125 to 136 is any amino acid
  Variant (138)..(150): Xaa in position 138 to 150 is any amino acid
  Variant (151)..(162): Xaa in position 151 to 162 is any or no amino acid
  Variant (164)..(166): Xaa in position 164 to 166 is any amino acid
  Variant (168)..(170): Xaa in position 168 to 170 is any amino acid
  Variant (172)..(177): Xaa in position 172 to 177 is any amino acid
  Variant (179)..(181): Xaa in position 179 to 181 is any amino acid
  Variant (183)..(183): Xaa in position 183 is any amino acid
  Variant (185)..(185): Xaa in position 185 is any amino acid
  Variant (187)..(188): Xaa in position 187 to 188 is any amino acid
  Variant (190)..(190): Xaa in position 190 is any amino acid
  Variant (192)..(193): Xaa in position 192 to 193 is any amino acid
  Variant (194)..(194): Xaa in position 194 is any or no amino acid
  Variant (196)..(196): Xaa in position 196 is any amino acid
  Variant (197)..(197): Xaa in position 197 is any or no amino acid
  Variant (199)..(199): Xaa in position 199 is any amino acid
  Variant (202)..(206): Xaa in position 202 to 206 is any amino acid
  Variant (207)..(209): Xaa in position 207 to 209 is any or no amino acid
  Variant (211)..(214): Xaa in position 211 to 214 is any amino acid
  Variant (216)..(216): Xaa in position 216 is any amino acid
  Variant (218)..(218): Xaa in position 218 is any amino acid
  Variant (220)..(224): Xaa in position 220 to 224 is any amino acid
  Variant (226)..(226): Xaa in position 226 is any amino acid
  Variant (229)..(232): Xaa in position 229 to 232 is any amino acid
  Variant (236)..(242): Xaa in position 236 to 242 is any amino acid
  Variant (246)..(252): Xaa in position 246 to 252 is any amino acid
  Variant (254)..(254): Xaa in position 254 is any amino acid
  Variant (256)..(258): Xaa in position 256 to 258 is any amino acid
  Variant (260)..(261): Xaa in position 260 to 261 is any amino acid
  Variant (262)..(262): Xaa in position 262 is any or no amino acid
  Variant (264)..(281): Xaa in position 264 to 281 is any amino acid
  Variant (282)..(290): Xaa in position 282 to 290 is any or no amino acid
AXXXXGXFXXXNHXXXXXLXXXXXXXXXXXXXXXXXXKXXXXXXXXXXXXXXXXXGYXXXXXXXXXXXXXXXXXXDXXXXXXXXXXXXXXXXXXXXXXXXXXXXXXXXXXRXXXXXYXXXXXXLXXXXXXXXXXXXGXXXXXXXXXXXXXXXXXXXXXXXXXRXXXYXXXPXXXXXXGXXXHXDXGXXTXLXXXDXXVXGLXXXXXXXXGXXXXVXPXPXXXXXNXGDXXXXWSNXXXXXXXHRVXXXXXXXRXSXXXFXXXPXXXXXXXXXXXXXXXXXXXXXXXXXXXY

SEQ ID NO: 605 - protein, 50 aa, Artificial sequence
  protein pattern
  Variant (2)..(8): Xaa in position 2 to 8 is any amino acid
  Variant (9)..(11): Xaa in position 9 to 11 is any or no amino acid
  Variant (13)..(13): Xaa in position 13 is any amino acid
  Variant (15)..(15): Xaa in position 15 is Asp or Asn
  Variant (16)..(18): Xaa in position 16 to 18 is any amino acid
  Variant (19)..(19): Xaa in position 19 is Ala, Ile or Val
  Variant (20)..(20): Xaa in position 20 is any amino acid
  Variant (21)..(21): Xaa in position 21 is Ser or Thr
  Variant (23)..(23): Xaa in position 23 is Asp, Glu or Gly
  Variant (24)..(26): Xaa in position 24 to 26 is any amino acid
  Variant (27)..(27): Xaa in position 27 is Asn, Ser or Thr
  Variant (28)..(28): Xaa in position 28 is Ala, Ile, Leu or Val
  Variant (29)..(29): Xaa in position 29 is any amino acid
  Variant (33)..(33): Xaa in position 33 is any amino acid
  Variant (34)..(34): Xaa in position 34 is Ala, Cys, Thr or Val
  Variant (35)..(39): Xaa in position 35 to 39 is any amino acid
  Variant (41)..(41): Xaa in position 41 is any amino acid
  Variant (42)..(42): Xaa in position 42 is Ser or Thr
  Variant (43)..(43): Xaa in position 43 is Ile, Met or Val
  Variant (44)..(44): Xaa in position 44 is Ala, Pro or Ser
  Variant (45)..(45): Xaa in position 45 is any amino acid
  Variant (47)..(48): Xaa in position 47 to 48 is any amino acid
  Variant (49)..(49): Xaa in position 49 is Ala, Gly, Ile or Pro
  Variant (50)..(50): Xaa in position 50 is Ala, Gly, Pro or Ser
PXXXXXXXXXXNXGXXXXXXXNXXXXXXXHRVXXXXXXXRXXXXXFXXXX

SEQ ID NO: 606 - protein, 18 aa, Artificial sequence
  protein pattern
  Variant (2)..(2): Xaa in position 2 is any amino acid
  Variant (4)..(4): Xaa in position 4 is any amino acid
  Variant (5)..(5): Xaa in position 5 is Gly, Asn or Ser
  Variant (6)..(6): Xaa in position 6 is any amino acid
  Variant (7)..(7): Xaa in position 7 is Ile or Leu
  Variant (9)..(9): Xaa in position 9 is Ile, Leu or Val
  Variant (11)..(11): Xaa in position 11 is any amino acid
  Variant (12)..(12): Xaa in position 12 is any or no amino acid
  Variant (14)..(14): Xaa in position 14 is any amino acid
  Variant (15)..(16): Xaa in position 15 to 16 is any or no amino acid
  Variant (18)..(18): Xaa in position 18 is Gly or Ser
HXDXXXXTXLXXDXXXVX

SEQ ID NO: 607 - DNA, 684 bp, Arabidopsis thaliana
  CDS (1)..(684)
atggcttccattagtagcttacacagatgggcatctaatcaacactctcgtcttcctcgaatcacttctatttctgaggctgaccaatctcgacccattaaccaagtcgtcgccttttcggttcctatatccagaagagacgcgagtattattcttctcagctcgattccattgacaagcttcttcgttctaacaccgagctcttccgaagctagagagagacgtagcagaaaagttatccctctcgaggaatattccactggccctgaagggttgaaattctatgacattgaggaaggcaaaggtccagtagcaacagagggatcaactgctcaggtgcattttgattgccgttacagaagcatcactgcaatttctacccgagaatccaagcttttagctggaaaccgtagtattgctcagccttacgagttcaaggtgggatctacgccaggaaaggaaaggaagcgtgaattcgttgataatccaaatgggttattctctgcacaggctgcaccaaaacctcctccagcaatgtatttcattaccgaaggaatgaaagtcggaggcaagagaacggtgattgttcctcctgaagctggttatggtcagaaaggaatgaatgagataccggtgagaacctactacaaattgtatatgagcctggagctacttttgagttaa

SEQ ID NO: 608 - protein, 227 aa, Arabidopsis thaliana
MASISSLHRWASNQHSRLPRITSISEADQSRPINQVVAFSVPISRRDASIILLSSIPLTSFFVLTPSSSEARERRSRKVIPLEEYSTGPEGLKFYDIEEGKGPVATEGSTAQVHFDCRYRSITAISTRESKLLAGNRSIAQPYEFKVGSTPGKERKREFVDNPNGLFSAQAAPKPPPAMYFITEGMKVGGKRTVIVPPEAGYGQKGMNEIPVRTYYKLYMSLELLLS

SEQ ID NO: 609 - DNA, 729 bp, Oryza sativa
  CDS (1)..(729)
atgcgcgccatttcggctcttctcctccgtccccttcctccgctggattcctccatggcttcctcttccctcccttctagaaccttctaccgccactcgcttccctcctccgcacctccacctccttcgagaggggcctgcgccgccgcatgctgctgcctccgcgcggccgtctcccggcggcgggcagccgcgcagctgctctccgccgccggattcttgatcgccgtctcgccgccttcgctagccgcgcggaggggccgcatggtcgtgtcgctggaggactacgtcacttcacctgatggcctgaagtactatgatcttgttgaagggaagggtccaactgctgaaaagggctcaactgtgcaggtccattttgattgcatataccgtggcatcaccgctgtgtcaagccgcgaagccaaactactggcagggaaccggagtattgcgcagccttatgagttcagtgtcggatcgctgcccgggaaagagcgaaagcgggaatttgtagacagtgccaatgggttatactcagcacaggcgtcaccgaaacctcctgccgcaatgtacacaataactgaagggatgaaagtggggggaaagaggagagtaattgtccctccagagctcggatatgggaaaaaggggatgaatgagataccgcctgatgctccttttgaactcgatatagagcttttggaagttgtccctcctgcagagaaatga

SEQ ID NO: 610 - protein, 242 aa, Oryza sativa
MRAISALLLRPLPPLDSSMASSSLPSRTFYRHSLPSSAPPPPSRGACAAACCCLRAAVSRRRAAAQLLSAAGFLIAVSPPSLAARRGRMVVSLEDYVTSPDGLKYYDLVEGKGPTAEKGSTVQVHFDCIYRGITAVSSREAKLLAGNRSIAQPYEFSVGSLPGKERKREFVDSANGLYSAQASPKPPAAMYTITEGMKVGGKRRVIVPPELGYGKKGMNEIPPDAPFELDIELLEVVPPAEK

SEQ ID NO: 611 - DNA, 624 bp, Glycine max
  CDS (1)..(624)
atgagttccccttgcagttgcgcttgcgcttctactaattggagcgttgattatggttatggaggtggtggcgtgctttcaaattcaaaggtaagaagcaggaggtccaaagaaatatccatggcacattcagtttgtggttcgagaaggtccactgcacttgtgatttcatccttgcctttcggcttccttttcctatctccgccagctgaggccagacgcaacaagaaggccatccccgaagaccaatacattactagccctgatggattgaaatactatgatttggttgagggcaaaggtccagtcgctgaaaaaggaacaactgttcaggtacactttgattgcttatatcgcggaatcacagctgtctccagtcgagaatctaaactcctagctggaaatcgtatcattgctcagccatatgaattcaaagtgggagctccaccgggaaaggaaaggaagcgcgaatttgttgacaacccaaatggtttattctctgctcaagcagcaccaaaacctccccctgctgtgtatataatagttgaaggaatgcgagttggtggaaaggtgactcaaacttccttctatgttttgtcatcttatactgttattacttattag

SEQ ID NO: 612 - protein, 207 aa, Glycine max
MSSPCSCACASTNWSVDYGYGGGGVLSNSKVRSRRSKEISMAHSVCGSRRSTALVISSLPFGFLFLSPPAEARRNKKAIPEDQYITSPDGLKYYDLVEGKGPVAEKGTTVQVHFDCLYRGITAVSSRESKLLAGNRIIAQPYEFKVGAPPGKERKREFVDNPNGLFSAQAAPKPPPAVYIIVEGMRVGGKVTQTSFYVLSSYTVITY

SEQ ID NO: 613 - DNA, 684 bp, Glycine max
  CDS (1)..(684)
atgagttccccttgcagttgcgcttgcgcttctactaattggagcgttgattatggttatggaggtggtggcgtgctttcaaattcaaaggtaagaagcaggaggtccaaagaaatatccatggcacattcagtttgtggttcgagaaggtccactgcacttgtgatttcatccttgcctttcggcttccttttcctatctccgccagctgaggccagacgcaacaagaaggccatccccgaagaccaatacattactagccctgatggattgaaatactatgatttggttgagggcaaaggtccagtcgctgaaaaaggaacaactgttcaggtacactttgattgcttatatcgcggaatcacagctgtctccagtcgagaatctaaactcctagctggaaatcgtatcattgctcagccatatgaattcaaagtgggagctccaccgggaaaggaaaggaagcgcgaatttgttgacaacccaaatggtttattctctgctcaagcagcaccaaaacctccccctgctgtgtatataatagttgaaggaatgcgagttggtggaaagcgaactgtgattgttcctcctgaaaatggctatggtcaaaagggaatgaatgagattccgcctggagctacatttgaactaaatgttgagcttctgcaagttgtagctacctga

SEQ ID NO: 614 - protein, 227 aa, Glycine max
MSSPCSCACASTNWSVDYGYGGGGVLSNSKVRSRRSKEISMAHSVCGSRRSTALVISSLPFGFLFLSPPAEARRNKKAIPEDQYITSPDGLKYYDLVEGKGPVAEKGTTVQVHFDCLYRGITAVSSRESKLLAGNRIIAQPYEFKVGAPPGKERKREFVDNPNGLFSAQAAPKPPPAVYIIVEGMRVGGKRTVIVPPENGYGQKGMNEIPPGATFELNVELLQVVAT

SEQ ID NO: 615 - DNA, 687 bp, Glycine max
  CDS (1)..(687)
atgagttccccttgcagttgcgcttgcgcttctactaattggagcgttgattatggttatggaggtggtggcgtgctttcaaattcaaaggtaagaagcaggaggtccaaagaaatatccatggcacattcagtttgtggttcgagaaggtccactgcacttgtgatttcatccttgcctttcggcttccttttcctatctccgccagctgaggccagacgcaacaagaaggccatccccgaagaccaatacattactagcccagctgatggattgaaatactatgatttggttgagggcaaaggtccagtcgctgaaaaaggaacaactgttcaggtacactttgattgcttatatcgcggaatcacagctgtctccagtcgagaatctaaactcctagctggaaatcgtatcattgctcagccatatgaattcaaagtgggagctccaccgggaaaggaaaggaagcgcgaatttgttgacaacccaaatggtttattctctgctcaagcagcaccaaaacctccccctgctgtgtatataatagttgaaggaatgcgagttggtggaaagcgaactgtgattgttcctcctgaaaatggctatggtcaaaagggaatgaatgagattccgcctggagctacatttgaactaaatgttgagcttctgcaagttgtagctacctga

SEQ ID NO: 616 - protein, 228 aa, Glycine max
MSSPCSCACASTNWSVDYGYGGGGVLSNSKVRSRRSKEISMAHSVCGSRRSTALVISSLPFGFLFLSPPAEARRNKKAIPEDQYITSPADGLKYYDLVEGKGPVAEKGTTVQVHFDCLYRGITAVSSRESKLLAGNRIIAQPYEFKVGAPPGKERKREFVDNPNGLFSAQAAPKPPPAVYIIVEGMRVGGKRTVIVPPENGYGQKGMNEIPPGATFELNVELLQVVAT

SEQ ID NO: 617 - DNA, 699 bp, Arabidopsis thaliana
  CDS (1)..(699)
atggcttccattagtagcttacacagatgggcatctaatcaacactctcgtcttcctcgaatcacttctatttctgaggctgaccaatctcgacccattaaccaagtcgtcgccttttcggttcctatatccagaagagacgcgagtattattcttctcagctcgattccattgacaagcttcttcgttctaacaccgagctcttccgaagctagagagagacgtagcagaaaagttatccctctcgaggaatattccactggccctgaagggttgaaattctatgacattgaggaaggcaaaggtccagtagcaacagagggatcaactgctcaggtgcattttgattgccgttacagaagcatcactgcaatttctacccgagaatccaagcttttagctggaaaccgtagtattgctcagccttacgagttcaaggtgggatctacgccaggaaaggaaaggaagcgtgaattcgttgataatccaaatgggttattctctgcacaggctgcaccaaaacctcctccagcaatgtatttcattaccgaaggaatgaaagtcggaggcaagagaacggtgattgttcctcctgaagctggttatggtcagaaaggaatgaatgagataccgcctggagctacttttgagttaaacatagagctgcttcgggtgactcctccaccagaagagaagtga

SEQ ID NO: 618 - protein, 232 aa, Arabidopsis thaliana
MASISSLHRWASNQHSRLPRITSISEADQSRPINQVVAFSVPISRRDASIILLSSIPLTSFFVLTPSSSEARERRSRKVIPLEEYSTGPEGLKFYDIEEGKGPVATEGSTAQVHFDCRYRSITAISTRESKLLAGNRSIAQPYEFKVGSTPGKERKREFVDNPNGLFSAQAAPKPPPAMYFITEGMKVGGKRTVIVPPEAGYGQKGMNEIPPGATFELNIELLRVTPPPEEK

SEQ ID NO: 619 - DNA, 669 bp, Vitis vinifera
  CDS (1)..(669)
atggcgtcaattcggagcattcacagatgggatgttgataatctcctcctcaccccaacatcatcggccatccaaacgcagcctccaaagcatgtgattcttccaatgcccatttccagaagatgcgctattttgatttctgtgttacctttcagtgtcatttcacaaccccattcatcagacgccagagagaggcgcaccaaaaagaacatccctcttgaggactacctcactagtcctgatggattgaaatactatgatgttgttgatggaaatggaccagtagctgaaaaaggttcatctgtccaggtgcattttgactgtatatatcgcagcattacagcagtgtcaagtcgagagtcaaaactcttggctggaaatcgaatcattgctcagccgtatgtgttcaaggttggggcccctcctggcaaagagcggaagcgtgaatttgtagacaacccgaatggtttattttctgcacaagctgcacctaaacccccaccagctctgtactcaattactgaagggatgaaagtagggggaaagaggactgtgattgttcctccagaggctgggtatggccaaaagggaatgagtgagatcccgccaggagctacttttgagcttaatgtggagcttctgcaagtattgccaccagaaggaaagtag

SEQ ID NO: 620 - protein, 222 aa, Vitis vinifera
MASIRSIHRWDVDNLLLTPTSSAIQTQPPKHVILPMPISRRCAILISVLPFSVISQPHSSDARERRTKKNIPLEDYLTSPDGLKYYDVVDGNGPVAEKGSSVQVHFDCIYRSITAVSSRESKLLAGNRIIAQPYVFKVGAPPGKERKREFVDNPNGLFSAQAAPKPPPALYSITEGMKVGGKRTVIVPPEAGYGQKGMSEIPPGATFELNVELLQVLPPEGK

SEQ ID NO: 621 - DNA, 630 bp, Populus trichocarpa
  CDS (1)..(630)
atggcttcaacaaggagcttagacaaatggagtggtcatcgtcatcttcaaaatttagctgaatctaccccaaaaaaaacacaagaacaatcaaaccatgtttttctctcaaaccccacttcaagaagatgtgcgattttgatatctaccttgccttttaccctcacttcactacctcaattatctgaggccagagagagacgcaacaagaagaccatccctcttgaagactatctcactagccctgatggattgaagtactatgatgttctcgagggaaagggtgcagcagcagaaaagggaatgacagttcaggtgcattttgactgtctatataggggaataacagccatttcgagtcgagaatctaagcttttagctggaaatcgaataattgcacagccatatgagttcaaggttggggcaccaccaggcaaagaaaggaagcgtgaatttgtggacaacccaaatggtctattttctgcacaggctgcacccaaacctcctccagctatgtactcggtaacggaagggatgaaagttggagggaagaggactgtgattgttcctccagaggctggttatggacaaaaaggaatgaatgagattccggtaaacactattccttga

SEQ ID NO: 622 - protein, 209 aa, Populus trichocarpa
MASTRSLDKWSGHRHLQNLAESTPKKTQEQSNHVFLSNPTSRRCAILISTLPFTLTSLPQLSEARERRNKKTIPLEDYLTSPDGLKYYDVLEGKGAAAEKGMTVQVHFDCLYRGITAISSRESKLLAGNRIIAQPYEFKVGAPPGKERKREFVDNPNGLFSAQAAPKPPPAMYSVTEGMKVGGKRTVIVPPEAGYGQKGMNEIPVNTIP

SEQ ID NO: 623 - DNA, 660 bp, Ricinus communis
  CDS (1)..(660)
atggctctggcgagtagtttagagagaggggcaattaatcatcttcgaattatatcaaaacaatcacaagaacccccaaaacaagttgttgtttcaacacccacttcaagaagatgcgcggttttgacatcttcattgtctttaagtctcatttctttccctcaattagcagaaggtagagagagacgcaacaagaagaacatccctcttgaagactatctcacttcccctgatgggttgaaatattatgatgttgttgagggaaagggtccgatagctgagaaaggatcaacagttcaggtgcattttgactgcatgtataggggcataacagcagtgtcaagtagagaatctaagcttttggctggaaatcgcataatcgcacagccgtatgagttcaaagttggagcacctccaggcaaagaacgaaagcgagacttcgtagacaacccaaatggcctattttctgcacaggctgccccaaaacccccagctgctatgtatacgataacacaagggatgaaattgggaggaaagaggattgtaatcgttcctcctgaggctggctatgggaaaaagggaatgaatgaaattccaccaggggctacatttcagctggacattgaacttttacaagtaacgtcacctgaagtaaaatga

SEQ ID NO: 624 - protein, 219 aa, Ricinus communis
MALASSLERGAINHLRIISKQSQEPPKQVVVSTPTSRRCAVLTSSLSLSLISFPQLAEGRERRNKKNIPLEDYLTSPDGLKYYDVVEGKGPIAEKGSTVQVHFDCMYRGITAVSSRESKLLAGNRIIAQPYEFKVGAPPGKERKRDFVDNPNGLFSAQAAPKPPAAMYTITQGMKLGGKRIVIVPPEAGYGKKGMNEIPPGATFQLDIELLQVTSPEVK

SEQ ID NO: 625 - DNA, 693 bp, Brassica napus
  CDS (1)..(693)
atggctaccattagtagcttacacatacgtgcatccgaccatcactcccgtcttcctcgaatctctgagacagatcaaccacgacacacaaaccaaatcgtcacccttccgtctcctatttccagaagagacgcgaatcttgtactcctcggctcgctgccgttgacgaccttcgtcgttctaccgccgagttcatcggaggcgagagagagacggagcagaaaagccatccctatcgaggagtattccactagccctgaagggttgaagtactatgacattgaggaaggtaaaggtccagtagccacaataggatctactgctcaggtgcattttgattgccggtacagaagcataactgcaatctccaccagagagtccaagctcttggctgggaaccgtagtatcgctcagccttatgagttcaaggtgggatctacgccagggaaggaaaggaaacgagagtttgtagacaatccaaacgggttgttctcggcgcaggctgcaccaaagcctcctcccgcaatgtattacattactgaaggaatgaaagtcggtggcaagagaactgtgattgttccacctgaagctggttatggtcagaaaggaatgaacgagataccgcctggagctacatttgagttaaacatagagttgcttcaggtgactcccccagtagagaaagagaggtga

SEQ ID NO: 626 - protein, 230 aa, Brassica napus
MATISSLHIRASDHHSRLPRISETDQPRHTNQIVTLPSPISRRDANLVLLGSLPLTTFVVLPPSSSEARERRSRKAIPIEEYSTSPEGLKYYDIEEGKGPVATIGSTAQVHFDCRYRSITAISTRESKLLAGNRSIAQPYEFKVGSTPGKERKREFVDNPNGLFSAQAAPKPPPAMYYITEGMKVGGKRTVIVPPEAGYGQKGMNEIPPGATFELNIELLQVTPPVEKER

SEQ ID NO: 627 - DNA, 675 bp, Oryza sativa
  CDS (1)..(675)
atggcttcctcttccctcccttctagaaccttctaccgccactcgcttccctcctccgcacctccacctccttcgagaggggcctgcgccgccgcatgctgctgcctccgcgcggccgtctcccggcggcgggcagccgcgcagctgctctccgccgccggattcttgatcgccgtctcgccgccttcgctagccgcgcggaggggccgcatggtcgtgtcgctggaggactacgtcacttcacctgatggcctgaagtactatgatcttgttgaagggaagggtccaactgctgaaaagggctcaactgtgcaggtccattttgattgcatataccgtggcatcaccgctgtgtcaagccgcgaagccaaactactggcagggaaccggagtattgcgcagccttatgagttcagtgtcggatcgctgcccgggaaagagcgaaagcgggaatttgtagacagtgccaatgggttatactcagcacaggcgtcaccgaaacctcctgccgcaatgtacacaataactgaagggatgaaagtggggggaaagaggagagtaattgtccctccagagctcggatatgggaaaaaggggatgaatgagataccgcctgatgctccttttgaactcgatatagagcttttggaagttgtccctcctgcagagaaatga

SEQ ID NO: 628 - protein, 224 aa, Oryza sativa
MASSSLPSRTFYRHSLPSSAPPPPSRGACAAACCCLRAAVSRRRAAAQLLSAAGFLIAVSPPSLAARRGRMVVSLEDYVTSPDGLKYYDLVEGKGPTAEKGSTVQVHFDCIYRGITAVSSREAKLLAGNRSIAQPYEFSVGSLPGKERKREFVDSANGLYSAQASPKPPAAMYTITEGMKVGGKRRVIVPPELGYGKKGMNEIPPDAPFELDIELLEVVPPAEK

SEQ ID NO: 629 - DNA, 660 bp, Zea mays
  CDS (1)..(660)
atggcgtcctccgccctgccttccagaaccttgcaccgccgcgcgctcccctcgtctaccccgtgccaccctgcgacggagaccttcgcccccggcgccgtctcccggcggcgggcagccgtgcggctcctctccgcggggttcctgaccgccgtcgcgccgccgccgtcgctcgccgcgaggaggggacgcgttgtcgtgccaccggaggactacgccactgcacccgatggtctcaagtacctacgatcttgtcgaagggaagggggaccaactgctgagaagggctcaaccgtgctggtccacttcgactgcatttaccgtggcatcaccgcggtgtcgagccgtgagtcgaagctcctggcggggaaccggagcatcgcccagccttacgagttcatcgttgggtcgctgcctgggaaagaacgcaagcgggatttcgcggacaacgccaacgggctgtactcggcgcaggcggctccgaagcctcccgccgccatgtacaccataaccgaggggatgaaggtggggggaaagaggagagtgattgtccctccagagctggggtatgggaagaggggaatgagtgagataccgcctgacgctccttttgaactggatattgagctactggaagccgtttctcctgccaaagaatga

SEQ ID NO: 630 - protein, 219 aa, Zea mays
MASSALPSRTLHRRALPSSTPCHPATETFAPGAVSRRRAAVRLLSAGFLTAVAPPPSLAARRGRVVVPPEDYATAPDGLKYLRSCRREGGPTAEKGSTVLVHFDCIYRGITAVSSRESKLLAGNRSIAQPYEFIVGSLPGKERKRDFADNANGLYSAQAAPKPPAAMYTITEGMKVGGKRRVIVPPELGYGKRGMSEIPPDAPFELDIELLEAVSPAKE

SEQ ID NO: 631 - DNA, 657 bp, Zea mays
  CDS (1)..(657)
atggcgtcctccgccctgccttccagaaccttgcaccgccgcgcgctcccctcgtctaccccgtgccaccctgcgacggagaccttcgcccccggcgccgtctcccggcggcgggcagccgtgcggctcctctccgccgggttcctgaccgccgtcgcgccgccgccgtcgctcgccgcgaggaggggacgcgttgtcgtgccaccggaggactacgccactgcacccgatggtctcaagtactacgatcttgtcgaagggaagggggcaactgctgagaagggctcaaccgtcctggtccacttcgactgcatttaccgtggcatcaccgcggtgtcgagccgtgagtcgaagctcctggcggggaaccggagcatcgcccagccttacgagttcatcgttgggtcgctgcctgggaaagaacgcaagcgggatttcgcggacaacgccaacgggctgtactcggcgcaggcggctccgaagccgcccgccgccatgtacaccataaccgaggggatgaaggtggggggaaagaggagagtgattgtccctccagagctggggtatgggaagaggggaatgagtgagataccgcctgacgctccttttgaactggatattgagctactggaagccgtttctcctgccaaagaatga

SEQ ID NO: 632 - protein, 218 aa, Zea mays
MASSALPSRTLHRRALPSSTPCHPATETFAPGAVSRRRAAVRLLSAGFLTAVAPPPSLAARRGRVVVPPEDYATAPDGLKYYDLVEGKGATAEKGSTVLVHFDCIYRGITAVSSRESKLLAGNRSIAQPYEFIVGSLPGKERKRDFADNANGLYSAQAAPKPPAAMYTITEGMKVGGKRRVIVPPELGYGKRGMSEIPPDAPFELDIELLEAVSPAKE

SEQ ID NO: 633 - DNA, 22 bp, Artificial sequence
  primer
atggcttccattagtagcttac

SEQ ID NO: 634 - DNA, 20 bp, Artificial sequence
  primer
tcacttctcttctggtggag

SEQ ID NO: 635 - protein, 227 aa, Artificial sequence
  consensus sequence
  Variant (2)..(2): Xaa in position 2 is any amino acid
  Variant (4)..(4): Xaa in position 4 is any amino acid
  Variant (5)..(5): Xaa in position 5 is any or no amino acid
  Variant (7)..(37): Xaa in position 7 to 37 is any amino acid
  Variant (38)..(48): Xaa in position 38 to 48 is any or no amino acid
  Variant (50)..(54): Xaa in position 50 to 54 is any amino acid
  Variant (55)..(56): Xaa in position 55 to 56 is any or no amino acid
  Variant (58)..(66): Xaa in position 58 to 66 is any amino acid
  Variant (67)..(68): Xaa in position 67 to 68 is any or no amino acid
  Variant (70)..(71): Xaa in position 70 to 71 is any amino acid
  Variant (72)..(73): Xaa in position 72 to 73 is any or no amino acid
  Variant (76)..(77): Xaa in position 76 to 77 is any amino acid
  Variant (79)..(83): Xaa in position 79 to 83 is any amino acid
  Variant (85)..(87): Xaa in position 85 to 87 is any amino acid
  Variant (89)..(89): Xaa in position 89 is any amino acid
  Variant (91)..(91): Xaa in position 91 is any amino acid
  Variant (93)..(93): Xaa in position 93 is any amino acid
  Variant (94)..(94): Xaa in position 94 is any or no amino acid
  Variant (101)..(102): Xaa in position 101 to 102 is any amino acid
  Variant (107)..(107): Xaa in position 107 is any amino acid
  Variant (109)..(109): Xaa in position 109 is any amino acid
  Variant (111)..(112): Xaa in position 111 to 112 is any amino acid
  Variant (114)..(114): Xaa in position 114 is any amino acid
  Variant (116)..(116): Xaa in position 116 is any amino acid
  Variant (123)..(123): Xaa in position 123 is any amino acid
  Variant (126)..(126): Xaa in position 126 is any amino acid
  Variant (130)..(130): Xaa in position 130 is any amino acid
  Variant (132)..(132): Xaa in position 132 is any amino acid
  Variant (143)..(143): Xaa in position 143 is any amino acid
  Variant (151)..(151): Xaa in position 151 is any amino acid
  Variant (154)..(155): Xaa in position 154 to 155 is any amino acid
  Variant (163)..(163): Xaa in position 163 is any amino acid
  Variant (168)..(168): Xaa in position 168 is any amino acid
  Variant (172)..(172): Xaa in position 172 is any amino acid
  Variant (182)..(182): Xaa in position 182 is any amino acid
  Variant (184)..(184): Xaa in position 184 is any amino acid
  Variant (186)..(186): Xaa in position 186 is any amino acid
  Variant (188)..(188): Xaa in position 188 is any amino acid
  Variant (192)..(192): Xaa in position 192 is any amino acid
  Variant (198)..(198): Xaa in position 198 is any amino acid
  Variant (205)..(205): Xaa in position 205 is any amino acid
  Variant (209)..(210): Xaa in position 209 to 210 is any amino acid
  Variant (213)..(213): Xaa in position 213 is any amino acid
  Variant (217)..(217): Xaa in position 217 is any amino acid
  Variant (218)..(222): Xaa in position 218 to 222 is any or no amino acid
  Variant (224)..(226): Xaa in position 224 to 226 is any amino acid
MXSXXSXXXXXXXXXXXXXXXXXXXXXXXXXXXXXXXXXXXXXXXXXXRXXXXXXXSXXXXXXXXXXXPXXXXARXXRXXXXXPXXXYXTXPXXGLKYYDXXEGKGXPXAXXGXTXQVHFDCXYRXITAXSXRESKLLAGNRXIAQPYEFXVGXXPGKERKRXFVDNXNGLXSAQAAPKPPXAXYXIXEGMXVGGKRXVIVPPEXGYGXXGMXEIPXXXXXXLXXXL

SEQ ID NO: 636 - protein, 60 aa, Artificial sequence
  protein pattern
  Variant (7)..(7): Xaa in position 7 is any amino acid
  Variant (10)..(10): Xaa in position 10 is Gly or Ser
  Variant (14)..(14): Xaa in position 14 is Ile or Val
  Variant (16)..(16): Xaa in position 16 is Ser or Thr
  Variant (19)..(19): Xaa in position 19 is Ala or Ser
  Variant (27)..(27): Xaa in position 27 is any or no amino acid
  Variant (33)..(33): Xaa in position 33 is any amino acid
  Variant (35)..(35): Xaa in position 35 is any amino acid
  Variant (38)..(38): Xaa in position 38 is Ala or Ser
  Variant (39)..(39): Xaa in position 39 is any amino acid
  Variant (47)..(47): Xaa in position 47 is Asp or Glu
  Variant (51)..(51): Xaa in position 51 is Asn or Ser
  Variant (52)..(52): Xaa in position 52 is Ala or Pro
  Variant (56)..(56): Xaa in position 56 is Phe or Tyr
QVHFDCXYRXITAXSXREXKLLAGNRXIAQPYXFXVGXXPGKERKRXFVDXXNGLXSAQA

SEQ ID NO: 637 - protein, 20 aa, Artificial sequence
  protein pattern
  Variant (2)..(2): Xaa in position 2 is any amino acid
  Variant (3)..(3): Xaa in position 3 is Ile or Val
  Variant (4)..(4): Xaa in position 4 is Thr or Val
  Variant (8)..(8): Xaa in position 8 is Lys or Arg
  Variant (14)..(14): Xaa in position 14 is any amino acid
YXXXEGMXVGGKRXVIVPPE

SEQ ID NO: 638 - protein, 20 aa, Artificial sequence
  protein pattern
  Variant (2)..(2): Xaa in position 2 is any amino acid
  Variant (4)..(4): Xaa in position 4 is Ala, Gly or Ser
  Variant (6)..(6): Xaa in position 6 is Asp or Glu
  Variant (10)..(10): Xaa in position 10 is any or no amino acid
  Variant (12)..(12): Xaa in position 12 is any or no amino acid
  Variant (14)..(14): Xaa in position 14 is Ile, Leu or Val
  Variant (15)..(15): Xaa in position 15 is any amino acid
  Variant (16)..(16): Xaa in position 16 is Asp or Glu
  Variant (18)..(18): Xaa in position 18 is any amino acid
  Variant (20)..(20): Xaa in position 20 is Ala or Pro
YXTXPXGLKXYXDXXXGXGX

SEQ ID NO: 639 - protein, 21 aa, Artificial sequence
  protein pattern
  Variant (4)..(4): Xaa in position 4 is any amino acid
  Variant (5)..(5): Xaa in position 5 is Lys or Arg
  Variant (8)..(8): Xaa in position 8 is Asn or Ser
  Variant (12)..(12): Xaa in position 12 is Pro or Val
  Variant (13)..(13): Xaa in position 13 is any amino acid
  Variant (14)..(14): Xaa in position 14 is Ala or Thr
  Variant (15)..(15): Xaa in position 15 is any amino acid
  Variant (16)..(16): Xaa in position 16 is Phe or Tyr
  Variant (17)..(17): Xaa in position 17 is any amino acid
  Variant (19)..(19): Xaa in position 19 is any amino acid
  Variant (20)..(20): Xaa in position 20 is Ile, Met or Val
  Variant (21)..(21): Xaa in position 21 is Glu or Ser
GYGXXGMXEIPXXXXXXLXXX

SEQ ID NO: 640 - protein, 14 aa, Artificial sequence
  protein pattern
  Variant (2)..(2): Xaa in position 2 is any amino acid
  Variant (3)..(3): Xaa in position 3 is any or no amino acid
  Variant (5)..(6): Xaa in position 5 to 6 is any or no amino acid
  Variant (9)..(9): Xaa in position 9 is Gly, Asn or Ser
  Variant (10)..(10): Xaa in position 10 is Lys or Arg
  Variant (11)..(11): Xaa in position 11 is any amino acid
  Variant (12)..(12): Xaa in position 12 is Ala, Thr or Val
  Variant (13)..(13): Xaa in position 13 is Ile or Val
  Variant (14)..(14): Xaa in position 14 is Pro or Ser
SXXAXXRRXXXXXX

SEQ ID NO: 641 - DNA, 381 bp, Arabidopsis thaliana
  CDS (1)..(381)
atgactaaaatctctgttggattgcaacttgtgacaagagattcgagggaaaaactaaacaatatagtgatcaaatcttcactgagactaaaccgatccaatccaaacatctcggagctttgtttccttaaaacatgtcatctctgcaataaacaactccatcaagacaaagatgtttacatgtacagaggagatttgggattttgtagtagagagtgcagagaaagtcagatgttgattgatgatagaaaagaactagaggcttcgacgaagatgatgttggcttcgtacagacgatgtaataacggcgccggaaaaagcgagtctcggaatttgtttgatgatctccggcgacgacgtcaattatttatagttccttga

SEQ ID NO: 642 - protein, 126 aa, Arabidopsis thaliana
MTKISVGLQLVTRDSREKLNNIVIKSSLRLNRSNPNISELCFLKTCHLCNKQLHQDKDVYMYRGDLGFCSRECRESQMLIDDRKELEASTKMMLASYRRCNNGAGKSESRNLFDDLRRRRQLFIVP

SEQ ID NO: 643 - DNA, 318 bp, Glycine max
  CDS (1)..(318)
atggatgttggtttgagacttctccctcaaattacaagctcaaatagcacatcaaatgtcctcttgaaatctgcagtgagaaaggcaaaccaacaatccatccctcaagacttatgcttccttaaaacttgcaatctatgcaataagcaacaaagtccagacaaagatatttacatgtacatcagagatcaaagtttctgcagtgtagtgaccaagcaaatggtagctgcttataggcaatgttctagtggggcacgtagtgagactcgccttatacttgaggacctacgaatgcacagacttaaatctagagtctaa

SEQ ID NO: 644 - protein, 105 aa, Glycine max
MDVGLRLLPQITSSNSTSNVLLKSAVRKANQQSIPQDLCFLKTCNLCNKQQSPDKDIYMYIRDQSFCSVVTKQMVAAYRQCSSGARSETRLILEDLRMHRLKSRV

SEQ ID NO: 645 - DNA, 471 bp, Glycine max
  CDS (1)..(471)
atgcttccaaagttcatcataagccccttcaaggtggaatcccaagaagggaagcatgtgaacaagagaagaaaacatgtgagatcatttgagagtaccaacatggacgttggtttgagacttctccctcaaattacaagctcaaagaacacgtcaaatgtcctcttgaaatctgcaatgagaaagacaaaccaacaatccatccctcaagacttttgcttccttaaaacttgcaatctatgcaataagcagctcagtccagacaaagatatttacatgtacaggggagatcaaggcttctgcagtgtagagtgccggaacagacaaatagttttggatgacatgagagaattagagaactctaccaagaaaatcgtagcagcttataggcaatgttctagtgaagcacatagagagacacgccttatacttgaggacctacgaatgcagagacttaaatctagagtataa

SEQ ID NO: 646 - protein, 156 aa, Glycine max
MLPKFIISPFKVESQEGKHVNKRRKHVRSFESTNMDVGLRLLPQITSSKNTSNVLLKSAMRKTNQQSIPQDFCFLKTCNLCNKQLSPDKDIYMYRGDQGFCSVECRNRQIVLDDMRELENSTKKIVAAYRQCSSEAHRETRLILEDLRMQRLKSRV

SEQ ID NO: 647 - DNA, 366 bp, Glycine max
  CDS (1)..(366)
atggatgttggtttgagacttctccctcaaattacaagctcaaatagcacatcaaatgtcctcttgaaatctgcagtgagaaaggcaaaccaacaatccatccctcaagacttttgcttccttaaaacttgcaatctatgcaataagcaactcagtccagacaaagatatttacatgtacagagatcaaggtttctgcagtgtagagtgccggaacagacaaatagttttggatgagatgagagaattagagagctctaccaagcaaatggtagctgcttataggcaatgttctagtgaggcacgtagtgagactcgccttatacttgaggacctacgaatgcagagacttaaatctagagtctaa

SEQ ID NO: 648 - protein, 121 aa, Glycine max
MDVGLRLLPQITSSNSTSNVLLKSAVRKANQQSIPQDFCFLKTCNLCNKQLSPDKDIYMYRDQGFCSVECRNRQIVLDEMRELESSTKQMVAAYRQCSSEARSETRLILEDLRMQRLKSRV

SEQ ID NO: 649 - DNA, 489 bp, Vitis vinifera
  CDS (1)..(489)
atgagccccttgaatgtggaagaagagggccatgagggcaagaggagacccaacttcccaggccatgaaagcttcaagaggagctcagttgatcctgttgggttgagaatccttacacagttctcacatggcgaatccaaccttgtccttaaatctgcatgcaggttgagggttccaacccctcctccacccagtggcgcctctcctgagagttgctttctcaaatcatgttatctctgcaacaaggagttaacccctgataaagacatatacatgaggagtgatgaaggcttttgcagtgtagagtgcaggaacagacagatagtaatggatgaaacgaaagaaatagagacttcaaccaagaaaattctagcatcttcccggcattgccgctctgctggtgggtgtgagacctgtgtgctcctagaggaccttcggcggcgaaggaagccaatctctcgccataaaaatcaagcattagtctcatag

SEQ ID NO: 650 - protein, 162 aa, Vitis vinifera
MSPLNVEEEGHEGKRRPNFPGHESFKRSSVDPVGLRILTQFSHGESNLVLKSACRLRVPTPPPPSGASPESCFLKSCYLCNKELTPDKDIYMRSDEGFCSVECRNRQIVMDETKEIETSTKKILASSRHCRSAGGCETCVLLEDLRRRRKPISRHKNQALVS

SEQ ID NO: 651 - DNA, 366 bp, Medicago truncatula
  CDS (1)..(366)
atggaagttggtctaagtctccttctccaaattataagctcaaagagtaactcaaatatccttgtcaaatctgcagtgaaaaagtcaaaccaaaccatccctatggatttttgcttccttaaaacttgcaatctgtgtaataaacagctcagccaagacaaagatatctacatgtacaggggagatcaaggtttctgcagtatagagtgcaggaacagacaaatagttttagatgagatgaaagaattagagatctctaccaaaaaaatggtacaatgttatagacaatgtagtaatgaggcacgcagagagacacgtcttatacttgaggacattcgaatgcaaagactcaaaaataaagtataa

SEQ ID NO: 652 - protein, 121 aa, Medicago truncatula
MEVGLSLLLQIISSKSNSNILVKSAVKKSNQTIPMDFCFLKTCNLCNKQLSQDKDIYMYRGDQGFCSIECRNRQIVLDEMKELEISTKKMVQCYRQCSNEARRETRLILEDIRMQRLKNKV

SEQ ID NO: 653 - DNA, 1070 bp, Oryza sativa subsp. indica
  CDS (106)..(681)
ttccctctcatctcctaccgccacaacgtacgcctaggctccaagcgtggtggtctcaccgcctcacctgaggtgaggtgattccacccgccgccgccggcagccatgcttccaagaagccagagcatcttccacctcggcgaggagggtggcgtcgtccactgccaccgcggcggtaaccacctcgtcgcggcgtccatggggatgggcggcgccggtggacactacgggtccggcacgcgcggcggcggccgccgcgcgcgcgagcgcgagcgcctcgtcgtcgggctccagatcatcgtgcacagccagcaccaccacggccggcacgcgcacgcgcacgcggcgagcgtagtgctcaagcagatggtccggccgcgcgccgccgccgccgccgctgcagggcgccacggcgccgtctcgtgcagcttcctcaaggcctgctccctgtgccggcgtgagctcagccctaccaaggatgtctacatgtatagaggtgaccaagggttctgcagcgaggagtgccggtggcagcagatcgccgtcgacgaggcgcgggagcgggaggcggcggcggcggcgggccggccggagcggcgaggtctggctcgccaccacagccctcaccgtgcggcggcgcccgtccgtggcaggccaaggaagacactagccgtagcctagagttattactatgtagtgttaaagtacttactgagaagaggagcacgtactactactgttcatggagaactttgagaggaagttattagccaggtatgtcaataactgaaggactttgcatatgtgtatgcatgcataagaagaagaagatgtgataagagagttaatttgagtggtaatgaagagaggttaatcatggagtagtagaaaggggttgatcagaatattgggtcagtattttttgtttctattttttgcgtgttgtaatcctagaagggatatgcaacttgttgttagatctgtgtgtttgtttgttatacacgtacgatccgatatggttgattaattatattctggaaggttgcatgcaagaaagttaagtggagaac

SEQ ID NO: 654 - protein, 191 aa, Oryza sativa subsp. indica
MLPRSQSIFHLGEEGGVVHCHRGGNHLVAASMGMGGAGGHYGSGTRGGGRRARERERLVVGLQIIVHSQHHHGRHAHAHAASVVLKQMVRPRAAAAAAAGRHGAVSCSFLKACSLCRRELSPTKDVYMYRGDQGFCSEECRWQQIAVDEAREREAAAAAGRPERRGLARHHSPHRAAAPVRGRPRKTLAVA

SEQ ID NO: 655 - DNA, 468 bp, Ricinus communis
  CDS (1)..(468)
atgctaagaggttacagctcccgagaaagctcagagaaaggattaatggtacttgttgggttgcaaacacttgtgcatgtatcagaaggaaaatcaaaatcaaatgttgttacaaaatctgcaatgagaaaagcacctcatcatcgtcatcgtcgtcctcatcatcagtccactgaatcttgctatctcaagacttgtcacttatgtaacaagaacttgagcctagacaaggatatctacatgtatagaggtgaccaaggcttttgcagcatagaatgcagaaacaggcaaatcgttttggatgaaatgagagaattagaagcatcaacagtgcaaatgagaaaatcttataacaggcactgcagttctgctggcaggcatgaaactcgcctaatcctagaagagatccgccgaagacataagccagttatagatgatcatcaaaaaaagcactgggcaatagtctga

SEQ ID NO: 656 - protein, 155 aa, Ricinus communis
MLRGYSSRESSEKGLMVLVGLQTLVHVSEGKSKSNVVTKSAMRKAPHHRHRRPHHQSTESCYLKTCHLCNKNLSLDKDIYMYRGDQGFCSIECRNRQIVLDEMRELEASTVQMRKSYNRHCSSAGRHETRLILEEIRRRHKPVIDDHQKKHWAIV

SEQ ID NO: 657 - DNA, 381 bp, Arabidopsis thaliana
  CDS (1)..(381)
atgactaaaatctccgttggattgcaacttgtgacaagagattcaaaggaaaaacttaacaacatagtgatcaaatcttcactgagactaaaccgatccaatccaaacatctcggagctttgtttcctcaaaacatgtcatctctgcaataaacaactccatcaagacaaagatttttacatgtacagaggagatttgggattttgtagtagagagtgcagagaaagtcagatgttgattgatgatagaaaagaactagaggcttcgacgaagatgatgttggcttcgtacagacgatgtaataacggcgccggaaaaagcgagtctcggaatttgtttgatgatctccggcgacgacgtcaattatttatagttccttga

SEQ ID NO: 658 - protein, 126 aa, Arabidopsis thaliana
MTKISVGLQLVTRDSKEKLNNIVIKSSLRLNRSNPNISELCFLKTCHLCNKQLHQDKDFYMYRGDLGFCSRECRESQMLIDDRKELEASTKMMLASYRRCNNGAGKSESRNLFDDLRRRRQLFIVP

SEQ ID NO: 659 - DNA, 417 bp, Brassica napus
  CDS (1)..(417)
atgaaaatggtgggactaagtattgttttggagtcttctaacaacaacactctcagcaacggctttgttagtcccaaaccgcatcaggttgtcaacaaatccaccgtcgtggtcaccgccatcgcctctgatctccgccgtggtagttcttatccggattctgggtttctcaaacattgttttctctgtaaaaggaaacttcttccagcgaaagatatctacatgtacaaaggtgatagaggtttctgtagcgtggagtgtagatcgaagcagatggtcatggacgaagaagaaagctttagaagagagaactgttccttcatggctgtcaataagacgaagtctgactctccggcgccggcgtcttcaggcggtggtcttcaccgtcaccgtcaccgtcgtgatacgagaaactga

SEQ ID NO: 660 - protein, 138 aa, Brassica napus
MKMVGLSIVLESSNNNTLSNGFVSPKPHQVVNKSTVVVTAIASDLRRGSSYPDSGFLKHCFLCKRKLLPAKDIYMYKGDRGFCSVECRSKQMVMDEEESFRRENCSFMAVNKTKSDSPAPASSGGGLHRHRHRRDTRN

SEQ ID NO: 661 - DNA, 471 bp, Glycine max
  CDS (1)..(471)
atgcttccaaagttcatcattagccccttcagggtggaatcccaagaagggaagcatgtgaacaagagaagaaagcatgtgagatcatttgagagtaccaacatggatgttggtttgagacttctccctcaaattacaagctcaaatagcacatcaaatgtcctcttgaaatctgcagtgagaaaggcaaaccaacaatccatccctcaagacttttgcttccttaaaacttgcaatctatgcaataagcaactcagtccagacaaagatatttacatgtacagcagagatcaaggtttctgcagtgtagagtgccggaacagacaaatagttttggatgagatgagagaattagagagctctaccaagcaaatggtagctgcttataggcaatgttctagtgaggcacgtagtgagactcgccttatacttgaggacctacgaatgcagagacttaaatctagagtctaa

SEQ ID NO: 662 - protein, 156 aa, Glycine max
MLPKFIISPFRVESQEGKHVNKRRKHVRSFESTNMDVGLRLLPQITSSNSTSNVLLKSAVRKANQQSIPQDFCFLKTCNLCNKQLSPDKDIYMYSRDQGFCSVECRNRQIVLDEMRELESSTKQMVAAYRQCSSEARSETRLILEDLRMQRLKSRV

SEQ ID NO: 663 - DNA, 369 bp, Brassica napus
  CDS (1)..(369)
atgactaaaatctctgttggattacaacttgtgacaacagattcaaaagaaaaactaaacaacatagtcatcaaatcttcactaagaccaaaccgatccaatccaaacatctcggagcgctgcttcctcaaaacatgtcacctctgtatgaaacagctccatcaagacaaagatgtttacatgtacaaaggagacttgggattttgtagcagagagtgtagagaaagtcagattttgatcgatgagaagaaagaattagaggcgtccacaaagatgatgttggcagcttacagacgctgtaactccggcgagaaccggaatttgttgaatgatctacggcggcgacgccagctatttatagttccttaa

SEQ ID NO: 664 - protein, 122 aa, Brassica napus
MTKISVGLQLVTTDSKEKLNNIVIKSSLRPNRSNPNISERCFLKTCHLCMKQLHQDKDVYMYKGDLGFCSRECRESQILIDEKKELEASTKMMLAAYRRCNSGENRNLLNDLRRRRQLFIVP

SEQ ID NO: 665 - DNA, 369 bp, Brassica napus
  CDS (1)..(369)
atgactaaagtctctgttggattacaacttgtgacaacagattctaaagaaaagctaaacaacatagtcatcaaatcttcactgagaccaaaccggtccattccaaacatctcggagctctgcttcctcaaaacatgtcatctgtgtttgaaacagctctctcaagacaaagatgtttacatgtacaaaggagacttgggattttgtagcagagagtgtagagaaagtcagattttgatcgatgagaagaaagaattagaggcgtccacaaagatgatgttggcagcttacagacgctgtaactccggcgagaaccggaatttgttgaatgatctacggcggcgacgccagctatttatagttccttaa

SEQ ID NO: 666 - protein, 122 aa, Brassica napus
MTKVSVGLQLVTTDSKEKLNNIVIKSSLRPNRSIPNISELCFLKTCHLCLKQLSQDKDVYMYKGDLGFCSRECRESQILIDEKKELEASTKMMLAAYRRCNSGENRNLLNDLRRRRQLFIVP

SEQ ID NO: 667 - DNA, 20 bp, Artificial sequence
  primer
atgactaaaatctctgttgg

SEQ ID NO: 668 - DNA, 21 bp, Artificial sequence
  primer
tcaaggaactataaataattg

SEQ ID NO: 669 - protein, 135 aa, Artificial sequence
  consensus sequence
  Variant (4)..(14): Xaa in position 4 to 14 is any amino acid
  Variant (15)..(22): Xaa in position 15 to 22 is any or no amino acid
  Variant (24)..(26): Xaa in position 24 to 26 is any amino acid
  Variant (29)..(30): Xaa in position 29 to 30 is any amino acid
  Variant (32)..(41): Xaa in position 32 to 41 is any amino acid
  Variant (42)..(48): Xaa in position 42 to 48 is any or no amino acid
  Variant (53)..(53): Xaa in position 53 is any amino acid
  Variant (55)..(55): Xaa in position 55 is any amino acid
  Variant (58)..(58): Xaa in position 58 is any amino acid
  Variant (60)..(60): Xaa in position 60 is any amino acid
  Variant (62)..(63): Xaa in position 62 to 63 is any amino acid
  Variant (67)..(67): Xaa in position 67 is any amino acid
  Variant (71)..(71): Xaa in position 71 is any amino acid
  Variant (72)..(72): Xaa in position 72 is any or no amino acid
  Variant (74)..(74): Xaa in position 74 is any amino acid
  Variant (79)..(79): Xaa in position 79 is any amino acid
  Variant (83)..(84): Xaa in position 83 to 84 is any amino acid
  Variant (86)..(88): Xaa in position 86 to 88 is any amino acid
  Variant (90)..(92): Xaa in position 90 to 92 is any amino acid
  Variant (94)..(94): Xaa in position 94 is any amino acid
  Variant (96)..(97): Xaa in position 96 to 97 is any amino acid
  Variant (99)..(105): Xaa in position 99 to 105 is any amino acid
  Variant (106)..(106): Xaa in position 106 is any or no amino acid
  Variant (108)..(108): Xaa in position 108 is any amino acid
  Variant (110)..(112): Xaa in position 110 to 112 is any amino acid
  Variant (113)..(116): Xaa in position 113 to 116 is any or no amino acid
  Variant (118)..(125): Xaa in position 118 to 125 is any amino acid
  Variant (127)..(127): Xaa in position 127 is any amino acid
  Variant (128)..(134): Xaa in position 128 to 134 is any or no amino acid
VGLXXXXXXXXXXXXXXXXXXXNXXXKSXXRXXXXXXXXXXXXXXXXXCFLKXCXLCXKXLXXDKDXYMYXXDXGFCSXECRXXQXXXDXXXEXEXXTXXXXXXXXRXCXXXXXXXEXXXXXXXXRXXXXXXXXR

SEQ ID NO: 670 - protein, 19 aa, Artificial sequence
  protein pattern
  Variant (3)..(3): Xaa in position 3 is Ser or Thr
  Variant (5)..(5): Xaa in position 5 is any amino acid
  Variant (8)..(8): Xaa in position 8 is any amino acid
  Variant (10)..(10): Xaa in position 10 is Glu, Asn or Gln
  Variant (11)..(13): Xaa in position 11 to 13 is any amino acid
  Variant (17)..(17): Xaa in position 17 is Phe, Ile or Val
LKXCXLCXKXXXXDKDXYM

SEQ ID NO: 671 - protein, 27 aa, Artificial sequence
  protein pattern
  Variant (2)..(4): Xaa in position 2 to 4 is any or no amino acid
  Variant (8)..(8): Xaa in position 8 is any amino acid
  Variant (12)..(12): Xaa in position 12 is any amino acid
  Variant (13)..(13): Xaa in position 13 is Gln, Arg or Ser
  Variant (15)..(15): Xaa in position 15 is Ile or Met
  Variant (16)..(16): Xaa in position 16 is Ala, Leu or Val
  Variant (17)..(17): Xaa in position 17 is Ile, Leu, Met or Val
  Variant (19)..(19): Xaa in position 19 is Asp or Glu
  Variant (20)..(20): Xaa in position 20 is any amino acid
  Variant (21)..(21): Xaa in position 21 is Lys or Arg
  Variant (23)..(23): Xaa in position 23 is any amino acid
  Variant (25)..(25): Xaa in position 25 is any amino acid
  Variant (26)..(26): Xaa in position 26 is Ala or Ser
  Variant (27)..(27): Xaa in position 27 is Ala or Thr
GXXXFCSXECRXXQXXXDXXXEXEXXX

SEQ ID NO: 672 - DNA, 600 bp, Arabidopsis thaliana
  CDS (1)..(600)
atgaattcaggaggtggaatcgttgctgcagcagctccttcaagcggcggtggtaatgttgaatggcatgtccgaccaccgaaccctaaaaacccagttgtcttcttcgacgtctctattggtggtatccccgccggtcgtatcaagatggagctcttcgccgacattgctcccaaaaccgctgaaaacttcaggcagttctgtactggtgaactcagaaaagctggaaagccgcttggttacaaagaatgtcagtttcacagagtcatcaaagattttatggttcaaagtggtgattttcttaagaatgatggtagtggatgcatgtcaatctacggccacaagtttgaggatgagaattttactgctaaacatactggaccaggattgctctccatggcaaatagtgggccaaacacaaatgggtgccagttcttcatcacttgtgcaaaatgcgattggcttgacaacaagcatgttgtctttgggagagtgcttggagatggtttgttggttatgcggaagattgagaacgtggctattggacccaataaccggcctaaacttgcggttgtaattactgagtgtggggagatgtga

SEQ ID NO: 673 - protein, 199 aa, Arabidopsis thaliana
MNSGGGIVAAAAPSSGGGNVEWHVRPPNPKNPVVFFDVSIGGIPAGRIKMELFADIAPKTAENFRQFCTGELRKAGKPLGYKECQFHRVIKDFMVQSGDFLKNDGSGCMSIYGHKFEDENFTAKHTGPGLLSMANSGPNTNGCQFFITCAKCDWLDNKHVVFGRVLGDGLLVMRKIENVAIGPNNRPKLAVVITECGEM

SEQ ID NO: 674 - DNA, 934 bp, Triticum aestivum
  CDS (87)..(683)
gaaactcgaagctcttccgcgcccccgctcgccccccgaaccttccagaagcttccagcgcgcagttgccccgagagccgagcggcatggcgtcggccatctccgcggggcccacgccgccggccgcggcgccgtcgtcggtggagtggcaccagcggccgccgaaccccaagaacccggtggtgttcttcgacgtgaccatcgggtccatcccggccgggcgcatcaagatggagctcttcgccgacatcgtccccaagaccgccgagaacttcaggcagttctgcactggcgagtacaggaaatcagctattccacaggggtataagggttgtcagttccatcgagtgatcaaagatttcatgattcagggaggtgacttcgtaaagggtgatggcagtggatgcatatcaatctatggcaccaaatttgatgatgaaaatttcattgcgaagcatactgggcctggcctgctctccatggcgaacagtggagctaactctaatgggtctcagttctttttaacttgtgcaaagtgtgagtggctggacaacaagcatgtggtttttgggagggtgctgggagatggtctgctcgtgctgcggaagattgagaacgtcgctactggaccaaacaaccggccgaagcttgcctgcgtgataagtgagtgcggtgagatgtagcttgctttttgagcgcggcatgtcctagcgctgccttgacatggatgaaagtactgaatcactggaaacagattggagtctagagcattgctgtattaatctacttattgtgacttgtgggcatgcggaatttggactctgacaaactggcaacatgtatctgtatcagccaatgctgtagagcctttaaaaaaacgtgtatggtgttgaataatattcaaagcaggagatgtggtttcatgaaaaaaaaa

SEQ ID NO: 675 - protein, 198 aa, Triticum aestivum
MASAISAGPTPPAAAPSSVEWHQRPPNPKNPVVFFDVTIGSIPAGRIKMELFADIVPKTAENFRQFCTGEYRKSAIPQGYKGCQFHRVIKDFMIQGGDFVKGDGSGCISIYGTKFDDENFIAKHTGPGLLSMANSGANSNGSQFFLTCAKCEWLDNKHVVFGRVLGDGLLVLRKIENVATGPNNRPKLACVISECGEM

SEQ ID NO: 676 - DNA, 573 bp, Glycine max
  CDS (1)..(573)
atggctggttcaatcggaagcggagggaacacaagcacgggtgtggagtggcacgtgcgacctccaaaccctaagaaccccatcgtcttcttcgatgtcaccatcggtaacattcccgccggtcgaatcaagatggaactcttcgccgatattgcccccaaaactgccgagaatttcaggcagttctgcactggggagtacaggaaagcaggactgcctgttggttacaagggttgtcaatttcatagagttatgattcaggccggtgattttgtaaagggagatggtagtggatgtgtttccatctatggactcaagtttgatgatgaaaactttacggccaaacacactggtcctggccttctgtcaatggcaaatagcggacaaaataccaatgggtgtcagttctttataacatgtgcaaaatgtgactggcttgacaacaagcatgttgtctttgggagagtgcttggagatggtcttttggttgtcaggaagattgagaacgtggcaaccggacccaataaccggccaaaattagcttgtgtcattgctgaatgtggtgaaatgtaa

SEQ ID NO: 677 - protein, 190 aa, Glycine max
MAGSIGSGGNTSTGVEWHVRPPNPKNPIVFFDVTIGNIPAGRIKMELFADIAPKTAENFRQFCTGEYRKAGLPVGYKGCQFHRVMIQAGDFVKGDGSGCVSIYGLKFDDENFTAKHTGPGLLSMANSGQNTNGCQFFITCAKCDWLDNKHVVFGRVLGDGLLVVRKIENVATGPNNRPKLACVIAECGEM

SEQ ID NO: 678 - DNA, 612 bp, Brassica napus
  CDS (1)..(612)
atgagttctggaggaatcgtggctggaccaacaggagcagcatcagctccttcaagcggcggtggaaacgtggagtggcacgtcagaccaccgaaccctaaaaacccagtcgtcttcttcgacgtctctattggtggtatccctgctggtcgtatcaagatggagcttttcgctgacattgctcccaaaacagctgaaaacttcaggcagttctgtactggtgaactcagaaaggctgggaagcctcttggttacaaagagtgtcagtttcacagagtcatcaaagattttatgattcaaagtggtgactttctcaagaatgatgggagtggatgcatgtcaatctatggccacaagttcgatgatgaaaactttactgccaaacatactggaccaggattgctctccatggcaaatagtgggccagacacaaatgggtgccagttcttcatcagctgttcaaaatgcgactggcttgacaacaagcatgttgtctttgggagagtgcttggagatggtttactggtggtgcggaagattgagaacgttgctgttggaccaaacaaccgtcctaagctttctgttgtgattacagagtgtggggagatgtga

SEQ ID NO: 679 - protein, 203 aa, Brassica napus
MSSGGIVAGPTGAASAPSSGGGNVEWHVRPPNPKNPVVFFDVSIGGIPAGRIKMELFADIAPKTAENFRQFCTGELRKAGKPLGYKECQFHRVIKDFMIQSGDFLKNDGSGCMSIYGHKFDDENFTAKHTGPGLLSMANSGPDTNGCQFFISCSKCDWLDNKHVVFGRVLGDGLLVVRKIENVAVGPNNRPKLSVVITECGEM

SEQ ID NO: 680 - DNA, 519 bp, Zea mays
  CDS (1)..(519)
atggcgaaccctcgcgtcttcttcgacatgaccgtcggcggcgccccggcgggccggatcgtgatggagctgtacgccaacgaggtgcccaagaccgcggagaacttccgcgcgctgtgcacgggcgagaagggcgtgggcaagtccgggaagccgctccactacaagggctccaccttccaccgcgtcatccccgagttcatgtgccagggcggcgacttcacccgcggcaacggcaccggcggcgagtccatctacggcgagaagttccccgacgagaagttcgtgcgcaagcacaccgcccccggtgtgctctccatggccaacgccgggcccaacaccaacggctcccagttcttcatctgcaccgtcgcgaccccttggctcgacggcaagcacgtcgtcttcggccaggtcgtcgagggcatggacgtcgtcaaggccatcgagaaggtgggcacccgcaacggctccacctccaaggtggtcaaggtcgctgactgcggacagctctcctag

SEQ ID NO: 681 - protein, 172 aa, Zea mays
MANPRVFFDMTVGGAPAGRIVMELYANEVPKTAENFRALCTGEKGVGKSGKPLHYKGSTFHRVIPEFMCQGGDFTRGNGTGGESIYGEKFPDEKFVRKHTAPGVLSMANAGPNTNGSQFFICTVATPWLDGKHVVFGQVVEGMDVVKAIEKVGTRNGSTSKVVKVADCGQLS

SEQ ID NO: 682 - DNA, 756 bp, Zea mays
  CDS (1)..(756)
atggcggcggcggcggctgctgccacctccttcaccaccctcgccgtcgcgcgttcggcggggcagcggtccctccttgcctccaaggccgcaccttcgccgctcctctccctccgtggcgcccgcatcccctcgcaggccgtctccttctccgggggccttgcggcgtcgccctctcacagccgcgcgcgcttcgctacatccgccagcgccgagcccaaggaagcagatcttcagtctaaaatcaccaataaggtgtattttgacataagcattgggaaccctgtggggaagaatgttgggaggattgtcatcggcttgtatggggatgatgttccacaaacagcagagaactttcgtgctctttgcactggagagaaagggtttggatacaagggatccagtttccaccgtgtcatcagcgactttatgatccagggcggagattttgacaagggcaatggtaccggtgggaaaagcatatatggacgcactttcaaagatgagaacttcaaattggttcacactggacctggagtggtcagcatggctaatgctggaccgaacaccaacggcagccagtttttcatttgcactgtcaagacgccttggttggatggaaggcatgtcgtgtttggccaggtcgtggaagggatggatattgtaaggctgatcgagtcacaggagactgacagaggtgaccgtccgaagaagaaagtagtcatcagcgagtgcggggagcttccagtggtctaa

SEQ ID NO: 683 - protein, 251 aa, Zea mays
MAAAAAAATSFTTLAVARSAGQRSLLASKAAPSPLLSLRGARIPSQAVSFSGGLAASPSHSRARFATSASAEPKEADLQSKITNKVYFDISIGNPVGKNVGRIVIGLYGDDVPQTAENFRALCTGEKGFGYKGSSFHRVISDFMIQGGDFDKGNGTGGKSIYGRTFKDENFKLVHTGPGVVSMANAGPNTNGSQFFICTVKTPWLDGRHVVFGQVVEGMDIVRLIESQETDRGDRPKKKVVISECGELPVV

SEQ ID NO: 684 - DNA, 717 bp, Oryza sativa
  CDS (1)..(717)
atggcttgcaggccggccgtgtgctccccctccgccctcgcgccgccgcgccaccgcctcctctccctcggctgcgcgcgcaccgccgccccctcgggcggactcccgctccgcctccgcctccgctccagccccgcgccccgcggccacggcgccgacctcgtcgtccgcgcggcggccgcagagggggccgtggagctgcaggcgaaggtgaacagcaaatgcttcttcgacgtcgaggtcggcggggagcccgcggggaggatcgtcatcgggctcttcggggaagtcgtccccaagacggtggacaacttccgcgccctgtgcactggtgataagggctacgggtacaagggttgctccttccaccgaatcatcaaggacttcatgattcagggcggggacttccagaacaacaatggtactggtggtaggagtatctatggtgaatgttttgacgatgaaaattttacattaaagcacaccggtcctggtgtactaagcatggcaaacgctggccctgacacaaatggaagccaatttttcatttgtactgtgaagacaccatggttggacaatcgtcacgttgtctttgggcatgtcttggaggggatggacgtggtgaagaatcttgaatcacaagaaaccagcaggtccgatattcctaagcagccctgcagaatcgtgaattgtggcgagctgcccgtggacggttga

SEQ ID NO: 685 - protein, 238 aa, Oryza sativa
MACRPAVCSPSALAPPRHRLLSLGCARTAAPSGGLPLRLRLRSSPAPRGHGADLVVRAAAAEGAVELQAKVNSKCFFDVEVGGEPAGRIVIGLFGEVVPKTVDNFRALCTGDKGYGYKGCSFHRIIKDFMIQGGDFQNNNGTGGRSIYGECFDDENFTLKHTGPGVLSMANAGPDTNGSQFFICTVKTPWLDNRHVVFGHVLEGMDVVKNLESQETSRSDIPKQPCRIVNCGELPVDG

SEQ ID NO: 686 - DNA, 519 bp, Oryza sativa
  CDS (1)..(519)
atgtcgaacacgagggtgttcttcgacatgaccgtcggcggagctccggcggggcggatcgtgatggagctgtacgcgaaggacgtgccgcggacggcggagaacttccgcgcgctctgcaccggcgagaagggcgtgggcaagagcggcaagccgctgcactacaaggggagcaccttccaccgcgtgatcccggagttcatgtgccagggcggcgacttcacccgcggcaacggcacgggaggggagtcgatctacggcgagaagttcgccgacgaggtgttcaagttcaagcacgacagccccggcatcctgtccatggcgaacgccgggcccaacactaacgggtcccagttcttcatctgcaccgtgccctgcagctggctggacgggaagcacgtcgtgttcggccgcgtcgtcgagggcatggacgtcgtcaaggccatcgagaaggtgggatcccgcggcgggagcaccgccaagccggtcgtcatcgccgactgcggccagctctcctag

SEQ ID NO: 687 - protein, 172 aa, Oryza sativa
MSNTRVFFDMTVGGAPAGRIVMELYAKDVPRTAENFRALCTGEKGVGKSGKPLHYKGSTFHRVIPEFMCQGGDFTRGNGTGGESIYGEKFADEVFKFKHDSPGILSMANAGPNTNGSQFFICTVPCSWLDGKHVVFGRVVEGMDVVKAIEKVGSRGGSTAKPVVIADCGQLS

SEQ ID NO: 688 - DNA, 1212 bp, Oryza sativa
  CDS (1)..(1212)
atggagggcggtggggagggcaccaccaccgccgcggcggcggcggcggtggctgcggggaaggaggaggaggcggaggtggtggtggtgaggaacccgaggtgctacctcgacgtgagcatcggcggggatatggaggggcggatcgtggtggagctctacgcctccgtggcccctcgcacggcggagaacttccgcgcgctctgcaccggcgagaagggcgtcagcgccgccaccggcgtgccgcttcactacaagggttcatgtattcaccggattgtcaaaggttttatggtgcaaggtggggatattaccgctggtgatggaactgggggagagtcaatatatggattgaattttgaggatgaaaattttgtcctgaagcatgagagaaaagggatgttatcaatggctaatgctggtcccgatacaaatggatctcagtttttcatcactacaacccgaacaccacaccttgatgggaaacatgttgtttttggaagggttataaaaggaatgggggtggttcgctcaatggaacatgtttctgttggagaatctgaccgtccaattactgatattgttattgttgattgcggagaactaccagaaggtgccagtgatggagttgtgaactttttcagtgatggtgacatgtatcctgattggccaaatgatctcgaagaaaaacctgcagaaatttcttggtggatgactgctgttgactctgcaaaatcttttggaaatgaatatttcaagaaaaaagattacaagacagccctcaaaaagtacagaaaagctatgagatacttagatctttgctgggagaaagaagagatagatgaagagaagagctcagcactacggaagacaaagtcaattatactcacaaatagttctgcttgcaagctgaagttgggagatttgaaaggtgctttactagatgcagactttgcattgcgtgaaggggagggaaacccaaaagcttttttccgtcaaggacaggcacgcatcgcactcaatgatattgatgctgcagttgagagcttcaagcatgctctgcagttggagccaaacgatggaggaattaagcgggagctggctgctgcaaaaaagaagattgctgacagacgggatcaggagcggaaagcattttctaggatgttccaaccatcaggaggttcagagaagatcgatgaagagaataactga

SEQ ID NO: 689 - protein, 403 aa, Oryza sativa
MEGGGEGTTTAAAAAAVAAGKEEEAEVVVVRNPRCYLDVSIGGDMEGRIVVELYASVAPRTAENFRALCTGEKGVSAATGVPLHYKGSCIHRIVKGFMVQGGDITAGDGTGGESIYGLNFEDENFVLKHERKGMLSMANAGPDTNGSQFFITTTRTPHLDGKHVVFGRVIKGMGVVRSMEHVSVGESDRPITDIVIVDCGELPEGASDGVVNFFSDGDMYPDWPNDLEEKPAEISWWMTAVDSAKSFGNEYFKKKDYKTALKKYRKAMRYLDLCWEKEEIDEEKSSALRKTKSIILTNSSACKLKLGDLKGALLDADFALREGEGNPKAFFRQGQARIALNDIDAAVESFKHALQLEPNDGGIKRELAAAKKKIADRRDQERKAFSRMFQPSGGSEKIDEENN

SEQ ID NO: 690 - DNA, 615 bp, Oryza sativa
  CDS (1)..(615)
atggcgtcctcggggggagcggcgatctcggcggggcccacgccgccgtcggcggcggcggcgtcgtcgtcggtggactggcacctgcggccgccgaacccgaagaacccggtggtgttcttcgacgtgaccatcgggtccatccccgccggccgcatcaagatggagctcttcgccgacatcgtccccaagacggcggagaacttccggcagttctgcactggagagcacaggaaatcaggtttaccacagggatataagggttgtcagttccatcgagtgatcaaagatttcatgattcagggaggtgactatatgaagggggatggtactggatgcacgtcaatctatggtaccaaatttgatgatgaaaacttcattgcaaagcatactggtcctggcctactttctatggcaaatagtggggtgaactctaatggatctcagttctttataacttgtgcaaaatgtgaatggctggacaacaagcatgtggtttttgggagggtgctaggggatggtatgcttgctgtgcggaagatcgagaatgttgcaactggaccaaacaaccgaccgaagctcgcatgtgtcataagcgagtgtggtgagatgtag

SEQ ID NO: 691 - protein, 204 aa, Oryza sativa
MASSGGAAISAGPTPPSAAAASSSVDWHLRPPNPKNPVVFFDVTIGSIPAGRIKMELFADIVPKTAENFRQFCTGEHRKSGLPQGYKGCQFHRVIKDFMIQGGDYMKGDGTGCTSIYGTKFDDENFIAKHTGPGLLSMANSGVNSNGSQFFITCAKCEWLDNKHVVFGRVLGDGMLAVRKIENVATGPNNRPKLACVISECGEM

SEQ ID NO: 692 - DNA, 1191 bp, Oryza sativa
  CDS (1)..(1191)
atggagggcggcggcgagggcgcggagtcagcagctgtcgcctccgcggcggcggcggaggtggaggtgaagaacccgaggtgcttcatggacgtcagcatcggcggcgagattgaggggaggatcgttatagagctctacgcgtcggtggtgccgcggacggcggagaacttccgcgcgctctgcaccggggagaagggcgtcggcgccgtcaccgggaagcacctacactacaagggatcttgcttccatcgcgttatcaaaggctttatggtacaaggtggagatataactgctggtgatggaacaggaggggagtcaatttatgggttgaagtttgaggatgagaattttgttttgaagcatgagaggaaaggaatgctatcaatggctaattctggtcccaacacaaatggatctcagtttttcatcactacaactcggacacctcatttagatgggaaacatgtagtttttggtagagtaattaagggaatgggggtggttcgctctgttgagcatgctcctgttggagaggctgaccgcccgacttctgatgttgaaattgtcgattgtggggaacttccggaaggtgctgatgatggagttgtgaacttcttcaatgatggtgatacgtatcctgattggcccaatgatcttgatgagaagcctatggaggtttcatggtggatggatgctgttgagtctgctaaggcttttgggaataataatttcaagaaacaggattacaaggcagctctgagaaagtacaggaaagcactgcgttacttggacgtttgctgggagaaagaagatatagatgaagagaagagctcagcactgcggaagaccaaatcgattatactcacaaatagctctgcatgcaaattgaagttgggagatttgaagggtgctctgttggatgctgattttgcactgcgtgaaagtgagggcaatgctaaggcattttttcgacaaggacaggcacacattgcactcaatgacattgatgcggcagtggagagcttcaagcatgcattggagttggagccaagtgatggaggaattaaacgagagctagctgctgcaaagaagaagattgccgacagaaggaatcaggagcggaaggcatttgcaaggatgttccaaccttctggaaaatcagacaaagacaatgaagagagcaagtga

SEQ ID NO: 693 - protein, 396 aa, Oryza sativa
MEGGGEGAESAAVASAAAAEVEVKNPRCFMDVSIGGEIEGRIVIELYASVVPRTAENFRALCTGEKGVGAVTGKHLHYKGSCFHRVIKGFMVQGGDITAGDGTGGESIYGLKFEDENFVLKHERKGMLSMANSGPNTNGSQFFITTTRTPHLDGKHVVFGRVIKGMGVVRSVEHAPVGEADRPTSDVEIVDCGELPEGADDGVVNFFNDGDTYPDWPNDLDEKPMEVSWWMDAVESAKAFGNNNFKKQDYKAALRKYRKALRYLDVCWEKEDIDEEKSSALRKTKSIILTNSSACKLKLGDLKGALLDADFALRESEGNAKAFFRQGQAHIALNDIDAAVESFKHALELEPSDGGIKRELAAAKKKIADRRNQERKAFARMFQPSGKSDKDNEESK

SEQ ID NO: 694 - DNA, 627 bp, Oryza sativa
  CDS (1)..(627)
atggcggcgagggagacgtcgcgccacgcgtcgctctgcctgtggctcgcgctcgtcgccgccaccctctctctcgcccaggcggtagaatcagaagccgaattgaccaaggtcaccaccaaggtcttcttcgacatcacaatcaatggcaagccggcaggtcggattgtcatggggctttttggaaacactgttcctaaaacagcagagaacttccgagcaatttgcacaggtgagaaaggacttggcaagagtggcaaacctctctcctacaaaggaacgccattccacaggatcatcccaggcttcatgatccaaggaggcgacaccgtgagcggcaatggaaccggctgtgattcgatctatggtggaatgttccctgatgagaacttcaagatcaaccactctgcaccagggttgctgtccatggccaactatgcgaaagatacaaacggatcccagttcttcatcaccaccgtaaagctaacccggttggatgggaagcatgttgtgtttggcaaggtgctttctggaatggacgtcgtctacaagattgaagctgaaggcagtcagagtggtactccacggtccaaagtcctcatatcagacagcggcgaactgaagtga

SEQ ID NO: 695 - protein, 208 aa, Oryza sativa
MAARETSRHASLCLWLALVAATLSLAQAVESEAELTKVTTKVFFDITINGKPAGRIVMGLFGNTVPKTAENFRAICTGEKGLGKSGKPLSYKGTPFHRIIPGFMIQGGDTVSGNGTGCDSIYGGMFPDENFKINHSAPGLLSMANYAKDTNGSQFFITTVKLTRLDGKHVVFGKVLSGMDVVYKIEAEGSQSGTPRSKVLISDSGELK

SEQ ID NO: 696 - DNA, 678 bp, Oryza sativa
  CDS (1)..(678)
atggcggggagcgggtggaggaggatcccggcggtgaggaggccgcccatgtcgcgcccggcctcggtctgcctctggatcgtgctcgtcgccgccaccctggcgctcgcccaggtgctcatccacctcgcgaagaaatcgaaggcggatttgactgaggtcacccacaaggtctacttcgacgtcgagattgatggcaagcccgcaggacgggttgtcatgggacttttcgggaagactgttcctaaaacggcagagaacttccgagcactttgcacaggagagaaaggaactggaaagagtggcaaagcactccacttcaagggaagtgcattccacagaattatacccagctttatgatccaaggaggtgacttcacacttggtgatggaaggggtggtgaatctatctatgggacgaagttcgccgatgaaaacttcaagatcaagcacaccggaccaggcctcctgtccatggccaatgctgggagagacacaaacgggtcccagtttttcatcaccactgtaaccaccagctggttggacgggaagcacgtcgtgttcggtaaggtgctgtctggaatggatgtggtttacaagattgaagctgagggccagcagagtgggtcaccgaagagcaaagttgtcatcgcggacagcggcgaactgccgatgtaa

SEQ ID NO: 697 - protein, 225 aa, Oryza sativa
MAGSGWRRIPAVRRPPMSRPASVCLWIVLVAATLALAQVLIHLAKKSKADLTEVTHKVYFDVEIDGKPAGRVVMGLFGKTVPKTAENFRALCTGEKGTGKSGKALHFKGSAFHRIIPSFMIQGGDFTLGDGRGGESIYGTKFADENFKIKHTGPGLLSMANAGRDTNGSQFFITTVTTSWLDGKHVVFGKVLSGMDVVYKIEAEGQQSGSPKSKVVIADSGELPM

SEQ ID NO: 698 - DNA, 663 bp, Unknown
  Unidentified
  CDS (1)..(663)
atggcggggagcgggtggaggaggatcccggcggtgaggaggccgcccatgtcgcgcccggcctcggtctgcctctggatcgtgctcgtcgccgccaccctggcgctcgcccaggcgaagaaatcgaaggcggatttgactgaggtcacccacaaggtctacttcgacgtcgagattgatggcaagcccgcaggacgggttgtcatgggacttttcgggaagactgttcctaaaacggcagagaacttccgagcactttgcacaggagagaaaggaactggaaagagtggcaaagcactccacttcaagggaagtgcattccacagaattatacccagctttatgatccaaggaggtgacttcacacttggtgatggaaggggtggtgaatctatctatgggacgaagttcgccgatgaaaacttcaagatcaagcacaccggaccaggcctcctgtccatggccaatgctgggagagacacaaacgggtcccagtttttcatcaccactgtaaccaccagctggttggacgggaagcacgtcgtgttcggtaaggtgctgtctggaatggatgtggtttacaagattgaagctgagggccagcagagtgggtcaccgaagagcaaagttgtcatcgcggacagcggcgaactgccgatgtaa

SEQ ID NO: 699 - protein, 220 aa, Unknown
  Unidentified
MAGSGWRRIPAVRRPPMSRPASVCLWIVLVAATLALAQAKKSKADLTEVTHKVYFDVEIDGKPAGRVVMGLFGKTVPKTAENFRALCTGEKGTGKSGKALHFKGSAFHRIIPSFMIQGGDFTLGDGRGGESIYGTKFADENFKIKHTGPGLLSMANAGRDTNGSQFFITTVTTSWLDGKHVVFGKVLSGMDVVYKIEAEGQQSGSPKSKVVIADSGELPM

SEQ ID NO: 700 - DNA, 648 bp, Oryza sativa
  CDS (1)..(648)
atgctgcggaaggtggccgtcgccttcctcgcttgcgccgccctctacctcgccttcgccgcctactcccgccgcgagagccttggagaggttcgattacctgcagttactaacagggtatacttggatgtggaaattgatgggcaacatataggtagaattgtcattggcctttatggagatgttgtgccaaaaacagttgcaaattttagggctctttgtacaggagaagagggcattgggcacaagggtaaatctcttcactataaaggatcaagatttcatcgtattatcccaggcttcatgattcagggtggggacatagttagaggtgatggaaaaggaagtgagtctatatatgggggcaccttcccagatgagaatttcatagtaaaacatacacatccaggtgttattgccatggcaaattctggacctgattccaatggatcgcagttttacattaccacaatcaagacaagctggttggatggggagcatgttgtgtttggcagggtgattcagggaatggattatgtgtacgccattgaagggggtgctggaacttacaatggcaagcctaggaagaaagttgtaatcaccgactctggtgagataccgaaggagaaatgggctgaagaagtgtag

SEQ ID NO: 701 - protein, 215 aa, Oryza sativa
MLRKVAVAFLACAALYLAFAAYSRRESLGEVRLPAVTNRVYLDVEIDGQHIGRIVIGLYGDVVPKTVANFRALCTGEEGIGHKGKSLHYKGSRFHRIIPGFMIQGGDIVRGDGKGSESIYGGTFPDENFIVKHTHPGVIAMANSGPDSNGSQFYITTIKTSWLDGEHVVFGRVIQGMDYVYAIEGGAGTYNGKPRKKVVITDSGEIPKEKWAEEV

SEQ ID NO: 702 - DNA, 540 bp, Oryza sativa
  CDS (1)..(540)
atggcgagcaagaaccccaaggtgttcttcgacatcctcatcggcaaggccagggccggccgcgtcgtcatggagctcttcgccgacaccgtccccaagacggccgagaactttcgctgcctctgcaccggcgagaagggcctcggcgcctccggcaagccgctgcattacaagggttctgccttccaccgtatcatacccaacttcatgtgccagggcggcgacttcacccgcggcaacggcaccggcggcgagtccatctacggcgacaggtttgccgacgagaacttcaagctgcgccacaccggcccaggcgtgctctccatggccaacgcagggccaaacaccaacggctcccaattcttcatctgcaccacgcgtaccacctggctcgacggcaagcacgtcgttttcggcaaggtcgtcgacggatacaccgtcgtcgagaagatggagcaagtcggctccggctctggcggcacggccgagcgcgtcctcatcgaggactgcggccagctcgccgacgaccacgccaactga

SEQ ID NO: 703 - protein, 179 aa, Oryza sativa
MASKNPKVFFDILIGKARAGRVVMELFADTVPKTAENFRCLCTGEKGLGASGKPLHYKGSAFHRIIPNFMCQGGDFTRGNGTGGESIYGDRFADENFKLRHTGPGVLSMANAGPNTNGSQFFICTTRTTWLDGKHVVFGKVVDGYTVVEKMEQVGSGSGGTAERVLIEDCGQLADDHAN

SEQ ID NO: 704 - DNA, 546 bp, Oryza sativa
  CDS (1)..(546)
atggcgccggcggcgtcctccaagtccaacccaagggtgttccttgacatcgccatcggcggcgagtgggttggccgcgtggtgatcgagctgctcgccgacaaggtgcccgacacggcggagaacttccggcggctgtgcaccggcgagcgcgccgggcgctccggcaagagcaggctccactacaaggggtcggcgttccaccgcgtggtgcccgggttcatgtgccagggcggcgacatcacggccgggaacggcaccggcggcgagtcggcgctggacggcgccgcgaggcacttccccgacgaggggttcgcggtgaagcacgacgggcccggggtggtgtccatggcgaacgccgggcccaacaccaacggctcccagttcttcatcaccgtcgacaaggcgccgtggctggacggccgccacgtcgcgttcggccgcgtcgtcgccgggatgggcgccgtccgcgccatcgacaggacgggaacctggagcggcaagacggtgaagcccgtcgtcatcaccgactgcggcgtgctctag

SEQ ID NO: 705 - protein, 181 aa, Oryza sativa
MAPAASSKSNPRVFLDIAIGGEWVGRVVIELLADKVPDTAENFRRLCTGERAGRSGKSRLHYKGSAFHRVVPGFMCQGGDITAGNGTGGESALDGAARHFPDEGFAVKHDGPGVVSMANAGPNTNGSQFFITVDKAPWLDGRHVAFGRVVAGMGAVRAIDRTGTWSGKTVKPVVITDCGVL

SEQ ID NO: 706 - DNA, 585 bp, Glycine max
  CDS (1)..(585)
atggctggttcaatcggaagcggagggaacacaagcacgggtgtggagtggcacgtgcgacctccaaaccctaagaaccccatcgtcttcttcgatgtcaccatcggtaacattcccgccggtcgaatcaagatggaactcttcgccgatattgcccccaaaactgccgagaatttcaggcagttctgcactggggagtacaggaaagcaggactgcctgttggttacaagggttgtcaatttcatagagttattaaggattttatgattcaggccggtgattttgtaaagggagatggtagtggatgtgtttccatctatggactcaagtttgatgatgaaaactttacggccaaacacactggtcctggccttctgtcaatggcaaatagcggacaaaataccaatgggtgtcagttctttataacatgtgcaaaatgtgactggcttgacaacaagcatgttgtctttgggagagtgcttggagatggtcttttggttgtcaggaagattgagaacgtggcaaccggacccaataaccggccaaaattagcttgtgtcattgctgaatgtggtgaaatgtaa

SEQ ID NO: 707 - protein, 194 aa, Glycine max
MAGSIGSGGNTSTGVEWHVRPPNPKNPIVFFDVTIGNIPAGRIKMELFADIAPKTAENFRQFCTGEYRKAGLPVGYKGCQFHRVIKDFMIQAGDFVKGDGSGCVSIYGLKFDDENFTAKHTGPGLLSMANSGQNTNGCQFFITCAKCDWLDNKHVVFGRVLGDGLLVVRKIENVATGPNNRPKLACVIAECGEM

SEQ ID NO: 708 - DNA, 1083 bp, Glycine max
  CDS (1)..(1083)
atggtgaaccctagatgcttcctcgacgtcagcatcggcggcgagttagaaggccggatcgttgtggagctcttccacgacgtcgttcccaaaactgccgagaatttccgcgccctctgcaccggcgaaaagggcatcggtcccaacaccggcgtccccctccactacaaaggcgtgtgtttccaccgcgtgatcaaaggtttcatgatccagggcggcgacatctccgccggggacggaaccggcggtgaatcaatctacggcgccaagttcgaggatgaaaacttggaggtgaagcacgagaggaaggggatgctctccatggccaatgcgggacccaacaccaacggctcccagttcttcatcaccaccacccgcacccctcacttggacggaaagcacgtcgtgttcggtaaggttctgaaagggatgggcatcgttcgttccgcggaacatgttgttaccggggaaaacgaccgtcccactcaggatgttgtgatagttaattgtggggaaattgctgaaggggaagatgatggagttgttaacttctttaaggatggtgacacctatcctgattggcccgctgatctcgatgtcaaacccgatgaactttcttggtggatgagtgccgtggacgctatcaaaacccttgggaatgagcagtataagaagcaagattataagatggctctcagaaagtatcgaaaagctttgcgctatttggatgtgtgttgggagaaggaggacattgaccaagagaatagcgctgccttaaggaagacaaaatctcaaatctttaccaacagttctgcttgtaaattgaaattaggtgatctacaaggagctttactggattcagactttgcgatgcatgatggagataatgcgaaagctctgtttcgcaaaggccaggcatatatgttactcaacgacctagatgctgctgttgaaagtttcaagaaagcgttagagttggagccgaatgatggagggattaaaaaagagtatgccactgccaggaggaaggttgctgatagacgtgatctagagaaaaaagcttattctagaatgttcaaatag

SEQ ID NO: 709 - protein, 360 aa, Glycine max
MVNPRCFLDVSIGGELEGRIVVELFHDVVPKTAENFRALCTGEKGIGPNTGVPLHYKGVCFHRVIKGFMIQGGDISAGDGTGGESIYGAKFEDENLEVKHERKGMLSMANAGPNTNGSQFFITTTRTPHLDGKHVVFGKVLKGMGIVRSAEHVVTGENDRPTQDVVIVNCGEIAEGEDDGVVNFFKDGDTYPDWPADLDVKPDELSWWMSAVDAIKTLGNEQYKKQDYKMALRKYRKALRYLDVCWEKEDIDQENSAALRKTKSQIFTNSSACKLKLGDLQGALLDSDFAMHDGDNAKALFRKGQAYMLLNDLDAAVESFKKALELEPNDGGIKKEYATARRKVADRRDLEKKAYSRMFK

SEQ ID NO: 710 - DNA, 528 bp, Glycine max
  CDS (1)..(528)
atgtcaaagaatccaaaagttttctttgatattctaattggaaagatgaaagctggacgagtagtgatggagttgtttgccgatgcaaccccaaaaacagctgaaaacttcagggctctctgcactggggaaaaggggattggacgatctgggaaacctttacactacaaaggttctgtatttcatcgtattattccagaatttatgtgtcagggaggagatttcacaagagggaatgggaccgggggtgagtcaatctacggttccaaatttgaagatgagaatttcaatttgaggcataccggtcctggtattctctccatggcaaatgctggagctcatactaatggttctcagttcttcatatgtactacaaagacaccatggcttgatgggaaacatgttgtgtttggaaaagttgttgatggatacagcgttgtgcaggagatggagaaagtgggttcaggaagtggcaggacatctgaaccggtagtaatagaagattgtggccagattgtagagaagtga

SEQ ID NO: 711 - protein, 175 aa, Glycine max
MSKNPKVFFDILIGKMKAGRVVMELFADATPKTAENFRALCTGEKGIGRSGKPLHYKGSVFHRIIPEFMCQGGDFTRGNGTGGESIYGSKFEDENFNLRHTGPGILSMANAGAHTNGSQFFICTTKTPWLDGKHVVFGKVVDGYSVVQEMEKVGSGSGRTSEPVVIEDCGQIVEK

SEQ ID NO: 712 - DNA, 639 bp, Glycine max
  CDS (1)..(639)
atgcgggggtttggcggttgttctggagtggcagtgagtgtgagaattggaattggaagggttcgggcgagttcgagttcttcttcttctgaggaggaggaggaggcagtgagtgtgcagtcaaaagtgactcagaaagtatacttcgacgtgagtattggaaatccagttgggaagtttgtgggacggattgtgattggactgtacggcgacgatgtcccccaaacggctgagaacttccgtgccctttgtactggcgagaagggctttggatataagggttctaccgtccatcgtgtcatcaaggatttcatgattcaaggaggagactttgacaaaggaaatggaactggaggcaaaagtatatatggtcgtactttcaaagatgagaattttaatttgtctcacactggaccgggagttgtcagcatggcaaatgcaggtcccaacacaaatgggagtcagttttttatatgcactgtcaagacaccttggctggatcagaggcatgtggtatttggccaagttttggaaggcatggccattgttaggttgatcgaatcacaggagacagataggggtgaccgtcctagaaagaaggtgaccattagtgactgtggtgagcttccaattgcttga

SEQ ID NO: 713 - protein, 212 aa, Glycine max
MRGFGGCSGVAVSVRIGIGRVRASSSSSSSEEEEEAVSVQSKVTQKVYFDVSIGNPVGKFVGRIVIGLYGDDVPQTAENFRALCTGEKGFGYKGSTVHRVIKDFMIQGGDFDKGNGTGGKSIYGRTFKDENFNLSHTGPGVVSMANAGPNTNGSQFFICTVKTPWLDQRHVVFGQVLEGMAIVRLIESQETDRGDRPRKKVTISDCGELPIA

SEQ ID NO: 714 - DNA, 519 bp, Glycine max
  CDS (1)..(519)
atgcctaaccctaaggtcttcttcgacatgaccatcggcggtcaatctgctggccgcatcgtgatggagctctacgccgacgtcactccccgcaccgccgagaacttccgcgcgctttgcaccggcgagaagggcgtagggcggagcggcaagcccctccactacaagggctcgtccttccaccgcgtgatcccgagtttcatgtgtcagggtggcgacttcaccgccggaaacggaaccggcggcgagtcgatttatggcgccaagttcgccgacgagaacttcgtgaagaagcacaccggtcccggcatcctctccatggcgaacgccggtcccggaaccaacggatctcagttcttcatttgcacggagaagacagagtggctcgacggaaagcatgtcgtgttcggacaggtcatcgaaggattgaacgttgtcaaggacatcgagaaggtcggatccagctccggcaggacctccaagcccgttgtcatcgccaactgcggtcaactctcttag

SEQ ID NO: 715 - protein, 172 aa, Glycine max
MPNPKVFFDMTIGGQSAGRIVMELYADVTPRTAENFRALCTGEKGVGRSGKPLHYKGSSFHRVIPSFMCQGGDFTAGNGTGGESIYGAKFADENFVKKHTGPGILSMANAGPGTNGSQFFICTEKTEWLDGKHVVFGQVIEGLNVVKDIEKVGSSSGRTSKPVVIANCGQLS

SEQ ID NO: 716 - DNA, 528 bp, Glycine max
  CDS (1)..(528)
atgtcaaaaaatccaaaagttttctttgatattctaattggaaagatgaaagctgggcgagtagtaatggagttgtttgttgatgcaaccccaaaaacagctgaaaacttcagggccctctgcactggggaaatggggattggaaaatctgggaaacctttacattacaaaggttctgcatttcatcgtattattccagagtttatgtgtcagggaggagattttacaaaagggaatggaacagggggtgagtcaatctacggttccaaattcaatgatgagaatttcaatttgaggcatactggtcctggtattctctccatggcaaatgctggaccccatactaatggttctcagttcttcatatgtactgcaaagacaccatggcttgatgggaaacatgttgtgtttggaaaagttgttgatggatacagcgttgtggaggagatggagaaagtgggttcaggaagtggcaggacatctgaaccggtagtgatcgaagattgtggccagatagtagagaaatga

SEQ ID NO: 717 - protein, 175 aa, Glycine max
MSKNPKVFFDILIGKMKAGRVVMELFVDATPKTAENFRALCTGEMGIGKSGKPLHYKGSAFHRIIPEFMCQGGDFTKGNGTGGESIYGSKFNDENFNLRHTGPGILSMANAGPHTNGSQFFICTAKTPWLDGKHVVFGKVVDGYSVVEEMEKVGSGSGRTSEPVVIEDCGQIVEK

SEQ ID NO: 718 - DNA, 639 bp, Glycine max
  CDS (1)..(639)
atgggggggtttggaggttgttctggagtggcagtgggtgtgagagaaagaaaaggaattggaagggttagggttcgggttcgggcgagttcttcgtcggacgaggcagtgagtgcgcagtcaaaagtgactcagaaagtattctttgacgtcagtattggaaatccagttgggaagcttgtgggacgtattgtgattggactgtacggcgacgatgtcccccaaacggccgagaacttccgtgccctttgtactggagagaagggctttggctataagggctccaccttccatcgtgtcatcaaggatttcatgattcaaggaggagactttgacaaaggaaatggaactggaggcaaaagtatatatggtcgtactttcaaagatgagaattttaatttgtctcacactggaccgggtgttgttagcatggcaaatgcaggacccaacacaaatgggagtcagtttttcatatgcactgtcaagacaccttggctggatcagagacatgtagtatttgggcaagttttggaaggcatggatattgttaggttgatcgaatcacaggagacagataggggtgaccgtcctacaaagaaggtgaccatcagtgactgtggtgagcttccaaatgcttga

SEQ ID NO: 719 - protein, 212 aa, Glycine max
MGGFGGCSGVAVGVRERKGIGRVRVRVRASSSSDEAVSAQSKVTQKVFFDVSIGNPVGKLVGRIVIGLYGDDVPQTAENFRALCTGEKGFGYKGSTFHRVIKDFMIQGGDFDKGNGTGGKSIYGRTFKDENFNLSHTGPGVVSMANAGPNTNGSQFFICTVKTPWLDQRHVVFGQVLEGMDIVRLIESQETDRGDRPTKKVTISDCGELPNA

SEQ ID NO: 720 - DNA, 762 bp, Glycine max
  CDS (1)..(762)
atgaccgtgaccatggcggctgcgtttacaagtacaagtgcaacactgagactgtcaaatgttggagagagcagaggtttgcagctgcgtaagtgtaaccctaatcctaataagctgaaggttatgggggggtttggaggttgttctggagtggcagtgggtgtgagagaaagaaaaggaattggaagggttagggttcgggttcgggcgagttcttcgtcggacgaggcagtgagtgcgcagtcaaaagtgactcagaaagtattctttgacgtcagtattggaaatccagttgggaagcttgtgggacgtattgtgattggactgtacggcgacgatgtcccccaaacggccgagaacttccgtgccctttgtactggagagaagggctttggctataagggctccaccttccatcgtgtcatcaaggatttcatgattcaaggaggagactttgacaaaggaaatggaactggaggcaaaagtatatatggtcgtactttcaaagatgagaattttaatttgtctcacactggaccgggtgttgttagcatggcaaatgcaggacccaacacaaatgggagtcagtttttcatatgcactgtcaagacaccttggctggatcagagacatgtagtatttgggcaagttttggaaggcatggatattgttaggttgatcgaatcacaggagacagataggggtgaccgtcctacaaagaaggtgaccatcagtgactgtggtgagcttccaaatgcttga

SEQ ID NO: 721 - protein, 253 aa, Glycine max
MTVTMAAAFTSTSATLRLSNVGESRGLQLRKCNPNPNKLKVMGGFGGCSGVAVGVRERKGIGRVRVRVRASSSSDEAVSAQSKVTQKVFFDVSIGNPVGKLVGRIVIGLYGDDVPQTAENFRALCTGEKGFGYKGSTFHRVIKDFMIQGGDFDKGNGTGGKSIYGRTFKDENFNLSHTGPGVVSMANAGPNTNGSQFFICTVKTPWLDQRHVVFGQVLEGMDIVRLIESQETDRGDRPTKKVTISDCGELPNA

SEQ ID NO: 722 - DNA, 759 bp, Glycine max
  CDS (1)..(759)
atgaatattattattaatgatagggttcatttgtgtgtgttgtgttggcagtcaaatgttggagagagcagaggtttgcagctgcgtaagtgtaaccctaatcctaataagctgaaggttatgggggggtttggaggttgttctggagtggcagtgggtgtgagagaaagaaaaggaattggaagggttagggttcgggttcgggcgagttcttcgtcggacgaggcagtgagtgcgcagtcaaaagtgactcagaaagtattctttgacgtcagtattggaaatccagttgggaagcttgtgggacgtattgtgattggactgtacggcgacgatgtcccccaaacggccgagaacttccgtgccctttgtactggagagaagggctttggctataagggctccaccttccatcgtgtcatcaaggatttcatgattcaaggaggagactttgacaaaggaaatggaactggaggcaaaagtatatatggtcgtactttcaaagatgagaattttaatttgtctcacactggaccgggtgttgttagcatggcaaatgcaggacccaacacaaatgggagtcagtttttcatatgcactgtcaagacaccttggctggatcagagacatgtagtatttgggcaagttttggaaggcatggatattgttaggttgatcgaatcacaggagacagataggggtgaccgtcctacaaagaaggtgaccatcagtgactgtggtgagcttccaaatgcttga

SEQ ID NO: 723 - protein, 252 aa, Glycine max
MNIIINDRVHLCVLCWQSNVGESRGLQLRKCNPNPNKLKVMGGFGGCSGVAVGVRERKGIGRVRVRVRASSSSDEAVSAQSKVTQKVFFDVSIGNPVGKLVGRIVIGLYGDDVPQTAENFRALCTGEKGFGYKGSTFHRVIKDFMIQGGDFDKGNGTGGKSIYGRTFKDENFNLSHTGPGVVSMANAGPNTNGSQFFICTVKTPWLDQRHVVFGQVLEGMDIVRLIESQETDRGDRPTKKVTISDCGELPNA

SEQ ID NO: 724 - DNA, 519 bp, Glycine max
  CDS (1)..(519)
atgcctaaccctaaggtcttcttcgacatgaccatcggcggtcaacctgccggccgcatcgtgatggagctctacgccgacgtgactccgagcaccgccgagaacttccgcgcgctctgcaccggcgagaagggcgccgggcggagcggcaagcccctccactacaaaggctcgtccttccaccgcgtgatcccgaacttcatgtgccagggcggcgacttcaccgccggaaacggcaccggaggcgagtcgatctacggcgccaagttcgccgacgagaacttcgtgaagaagcacactggtcccggcatcctctccatggcgaacgccggtcccggaaccaacggatctcagttcttcatctgcacgacgaagacggagtggctcgacggaaagcacgtcgtgttcggacaggtcgtcgaggggatggacgtcgtcaaggagatagagaaggtcggatccagctccggcaggaccgccaagcctgtcgtcgtcgccgactgtggtcaactctcttag

SEQ ID NO: 725 - protein, 172 aa, Glycine max
MPNPKVFFDMTIGGQPAGRIVMELYADVTPSTAENFRALCTGEKGAGRSGKPLHYKGSSFHRVIPNFMCQGGDFTAGNGTGGESIYGAKFADENFVKKHTGPGILSMANAGPGTNGSQFFICTTKTEWLDGKHVVFGQVVEGMDVVKEIEKVGSSSGRTAKPVVVADCGQLS

SEQ ID NO: 726 - DNA, 711 bp, Glycine max
  CDS (1)..(711)
atgcatagagcgatcgtgtttctcattcacccacgattcctcctcctcttccttgtcctctcaattttcctcattttcacattttctggttctactactaccagtggttttgctacacctcaacaggttgttgagatcattgaggagaaaccagaagaggagcctgaaattacacacagagtattcttggatattgatattgataaacagcgtttaggtaggatagtgattggattatatggcaaagttgtaccgaaaactgtggaaaattttagagctttgtgtacaggggagaaaggcaagagtgaaaatggcataaagcttcattacaaaggaacaccatttcatcggataatatctggttttgtgattcagggtggagacattgttcatcatgatggtaaagggtctgaatctatttatggtggcacctttcctgatgataatttcaagattaaacattctcacgctggtgttgtttctatggcaaattcaggacctgattccaatggctcacagtttttctttaccacagtgaaggccagatggttggatggagagcatgttgtctttggcagggttgttcaaggcatggatattgtgtatgtaattgaagggggagccggaacctacagtggaaaacccagaaagaaggtagtgatagcagactctggggagataccaaagaaccactgggatgaggaaaattga

SEQ ID NO: 727 - protein, 236 aa, Glycine max
MHRAIVFLIHPRFLLLFLVLSIFLIFTFSGSTTTSGFATPQQVVEIIEEKPEEEPEITHRVFLDIDIDKQRLGRIVIGLYGKVVPKTVENFRALCTGEKGKSENGIKLHYKGTPFHRIISGFVIQGGDIVHHDGKGSESIYGGTFPDDNFKIKHSHAGVVSMANSGPDSNGSQFFFTTVKARWLDGEHVVFGRVVQGMDIVYVIEGGAGTYSGKPRKKVVIADSGEIPKNHWDEEN

SEQ ID NO: 728 - DNA, 708 bp, Glycine max
  CDS (1)..(708)
atggccttcagaggaactggaacgctgattttggtgagtctcttatggcttttcttcctctgcgccaccattgctttctttcagctccacttggtagacaaccgaaccagcaacccttcctctcgcagtaacttcattgcaactcaacatgatcgctcagatacccctttggaacaggatttggagggtgtcactcacaaggtgtattttgatattcagatccatggcaaagtagcaggtcgcatagtcatgggcctttttgggaacacagtaccaaaaactgcagaaaactttcgggcgctttgtacaggagagaaaggagtgggaagaagtgggaagtctcttcattataaagggagcacattccataggattatgccgagctttatggtccaggggggtgatttcacccgtggtgatggaagaggtggagaatcaatctatggtgataagtttgccgatgaaaactttaagctgaagcatactgggccaggatacttatccatggcaaattctggggaagacaccaacggctcccagttcttcataacaacagttaaaaccagctggctggatggacaccatgtcgtattcggcaaggtactttccggtatggacgttttgtacaagattgaagcagaaggaagtgaaaatggctcgccaaaaaacaaggttgtcatattagacagcggagaattaacttcatga

SEQ ID NO: 729 - protein, 235 aa, Glycine max
MAFRGTGTLILVSLLWLFFLCATIAFFQLHLVDNRTSNPSSRSNFIATQHDRSDTPLEQDLEGVTHKVYFDIQIHGKVAGRIVMGLFGNTVPKTAENFRALCTGEKGVGRSGKSLHYKGSTFHRIMPSFMVQGGDFTRGDGRGGESIYGDKFADENFKLKHTGPGYLSMANSGEDTNGSQFFITTVKTSWLDGHHVVFGKVLSGMDVLYKIEAEGSENGSPKNKVVILDSGELTS

SEQ ID NO: 730 - DNA, 486 bp, Glycine max
  CDS (1)..(486)
atggcgaaccctaaggtctacttcgacatgaccattggaggccaaccggcggggcgcatagtgatggagctgtacgccgacacgactcctcgcaccgctgagaacttccgcgccctctgcaccggcgagaagggcgtgggccgcagcgggaagcccctccactacaagggctccaccttccaccgcgtgattccgaacttcatgtgccagggcggagacttcaccgccggtaacgggaccggtggtgagtccatctacgggtccaagtttgcggacgagaacttcataaagaagcacacgggccccggcattctttcgatggcaaacgccggacctggcacgaacgggtctcagttcttcatctgcaccgttaagacggagtggctcgacgggaagcacgtggttttcggacaggttgtggagggccttgacgtcgtgaaggacatcgagaaggtggggtccagctccgtaatagttatagattaa

SEQ ID NO: 731 - protein, 161 aa, Glycine max
MANPKVYFDMTIGGQPAGRIVMELYADTTPRTAENFRALCTGEKGVGRSGKPLHYKGSTFHRVIPNFMCQGGDFTAGNGTGGESIYGSKFADENFIKKHTGPGILSMANAGPGTNGSQFFICTVKTEWLDGKHVVFGQVVEGLDVVKDIEKVGSSSVIVID

SEQ ID NO: 732 - DNA, 552 bp, Glycine max
  CDS (1)..(552)
atggctggttcaattggaagcggagggaacacaagcacgggtgtggagtggcacgtgcgacctccaaaccctaagaatcccatcgtcttcttcgatgtcaccatcggtaacattcccgccggtcgaatcaagatggaactcttcgccgatattgcccccaaaactgccgagaatttcaggcagttctgcactggggaatacaggaaagcaggactgcctgttggttacaagggttgtcaatttcatagagttattaaggattttatgattcaggctggtgattttgtaaagggagatggtagtggatgtgtttccatctatggactcaagtttgatgatgaaaactttacggccaaacacactggtcctggccttctgtcgatggcaaatagcggacaaaataccaatggctgtcagttctttataacatgtgcaaaatgtgactggcttgacaacaagcatgttgtctttgggagagtgctgggagatggtcttttggttgtcaggaagattgagaacgtggcaaccggaccaataaccggccaaaattag

SEQ ID NO: 733 - protein, 183 aa, Glycine max
MAGSIGSGGNTSTGVEWHVRPPNPKNPIVFFDVTIGNIPAGRIKMELFADIAPKTAENFRQFCTGEYRKAGLPVGYKGCQFHRVIKDFMIQAGDFVKGDGSGCVSIYGLKFDDENFTAKHTGPGLLSMANSGQNTNGCQFFITCAKCDWLDNKHVVFGRVLGDGLLVVRKIENVATGPITGQN

SEQ ID NO: 734 - DNA, 519 bp, Glycine max
  CDS (1)..(519)
atgccgaaccctaaggtctacttcgacatgaccatcggaggccaaccggccggtcgcatagtgatggagctgtacgccgacacgacccctcgcaccgccgagaatttccgcgccctttgcaccggcgagaagggcgtgggccgcagcggcaagcccctccactacaagggctccgccttccaccgcgtcattcccaacttcatgtgccagggcggtgacttcaccgccggaaacggcaccggtggcgagtccatctacggatcgaagttcgcggacgagaacttcataaagaagcacacgggtcccggcattctatcgatggcgaacgcgggacctggcacgaacgggtctcagttcttcatctgcaccgttaagacggagtggctcgacggaaagcacgtggttttcgggcaggtggtggagggccttgacgtcgtgaaggacatcgagaaggtgggttccagctccggtaagacctccaagcccgttgttgttgctgactccggacaactctcctag

SEQ ID NO: 735 - protein, 172 aa, Glycine max
MPNPKVYFDMTIGGQPAGRIVMELYADTTPRTAENFRALCTGEKGVGRSGKPLHYKGSAFHRVIPNFMCQGGDFTAGNGTGGESIYGSKFADENFIKKHTGPGILSMANAGPGTNGSQFFICTVKTEWLDGKHVVFGQVVEGLDVVKDIEKVGSSSGKTSKPVVVADSGQLS

SEQ ID NO: 736 - DNA, 630 bp, Glycine max
  CDS (1)..(630)
atgcatagagcgatctcgttcttcgttcaaccgcgatgcctccttctcataggtgttctctcaattttcttgattctcgcattatcgggtaccaaatgggttgaagagaaagaagaacaacctgaaattacagacagagtattctttgatgttgatattgatggacaacgtttaggtaggattgtcattggattgtatggccaagttgtaccaaaaactaaaattttagagctttgtgcacaggggagaaagggaagaatgccagtggtgataatatcaggtttcatgattcagggcggagatattgttcatcatgatggtagaggatacgaatctatttatggtggcacctttcctgatgagaatttcaagataaaacattcacatgctggtgtagtctctatggtgaattcaggtcccgattacaatggctcacagttttttattaccacagtgaagaccggttggttagatggagaacatggtgtgtttggcaaggttgtccaaggcatggattctgtgtttgcaattgaaggaggtgctggaacctacaatgggaaacccagaaagaaggtagtgattgcagactctggagagatacccaagagtcagtgggataaggaaagatga

SEQ ID NO: 737 - protein, 209 aa, Glycine max
MHRAISFFVQPRCLLLIGVLSIFLILALSGTKWVEEKEEQPEITDRVFFDVDIDGQRLGRIVIGLYGQVVPKTKILELCAQGRKGRMPVVIISGFMIQGGDIVHHDGRGYESIYGGTFPDENFKIKHSHAGVVSMVNSGPDYNGSQFFITTVKTGWLDGEHGVFGKVVQGMDSVFAIEGGAGTYNGKPRKKVVIADSGEIPKSQWDKER

SEQ ID NO: 738 - DNA, 717 bp, Glycine max
  CDS (1)..(717)
atggcctctagaggaactggaacgctgattttggtttgtctcttatggcttttcttcctatgcgccaccatagctttcttgcagctcaacttcgtagacaaaggaaccaccaacaacaacccttcctctcgcagtagtaacttcatcgcaactcaacagcatagcgctgatacccctttggaacaggatttggagggtgtcacccacaaggtgtattttgatattcagatccatggcaaattagcgggtcgcatagtcatgggcctttatgggaacacagtaccgaaaactgcagaaaactttcgagcgctttgtacaggagagaaaggagtgggaagaagtgggaagtctcttcattataaagggagcacattccataggattataccgagctttatggtccaagggggtgatttcacccgtggtgatggaagaggtggagaatcaatctatggtgataagtttgctgatgaaaactttaagctgaagcataccggaccgggatacttatccatggcaaattctggggaagacaccaatggctcccagttcttcattacaacagttaaaaccagctggctggatggacgccatgtcgtatttggcaaggtactttccggtatggatgttttgtacaagattgaagcagaaggaagtgaaagcggctcgccaaagaacaaggttgtcatattagacagtggagaattaacttcatga

SEQ ID NO: 739 - protein, 238 aa, Glycine max
MASRGTGTLILVCLLWLFFLCATIAFLQLNFVDKGTTNNNPSSRSSNFIATQQHSADTPLEQDLEGVTHKVYFDIQIHGKLAGRIVMGLYGNTVPKTAENFRALCTGEKGVGRSGKSLHYKGSTFHRIIPSFMVQGGDFTRGDGRGGESIYGDKFADENFKLKHTGPGYLSMANSGEDTNGSQFFITTVKTSWLDGRHVVFGKVLSGMDVLYKIEAEGSESGSPKNKVVILDSGELTS

SEQ ID NO: 740 - DNA, 615 bp, Glycine max
  CDS (1)..(615)
atggcgaaaacgacgtcgttgctgctctttacactgctcctcttcggaaccctagctctcatccaggcgaagaaatcgaaggaggatttgaaggaggtgacccacaaggtttactttgatgttgagattaatggaaaagaagcaggtcgtattgtaatgggtctttatgggaaggctgttccaaaaactgcagaaaacttccgagcactttgcacaggggaaaagggaactggtaaaagtggaaagcctctccattacaaaggtagctcattccatagaattattcctagctttatgcttcaaggaggtgattttacacaaggaaatggaatgggtggagaatcaatttacggagagaagtttgctgatgagaacttcaagttaaagcatactggaccaggacttctatcaatggcaaatgctggtcctaataccaatggttcacaatttttcattacaactgtgacaactagctggttggacggaaggcatgttgtttttggtaaagttctttctggaatggatgttgtttacaagattgaagctgaaggaacacaaagtggcactcccaagagcaaggttgtgattgttgacagtggtgaactccctctataa

SEQ ID NO: 741 - protein, 204 aa, Glycine max
MAKTTSLLLFTLLLFGTLALIQAKKSKEDLKEVTHKVYFDVEINGKEAGRIVMGLYGKAVPKTAENFRALCTGEKGTGKSGKPLHYKGSSFHRIIPSFMLQGGDFTQGNGMGGESIYGEKFADENFKLKHTGPGLLSMANAGPNTNGSQFFITTVTTSWLDGRHVVFGKVLSGMDVVYKIEAEGTQSGTPKSKVVIVDSGELPL

SEQ ID NO: 742 - DNA, 606 bp, Sorghum bicolor
  CDS (1)..(606)
atggcgtccggcggagcggccatctcggcggggccgacgccaccgtcggcgacggcgacggcggtggagtggcaccagcggccgccgaacccgaagaaccccgtggtgttcttcgacgtgaccatcgggtccatccccgccggccgcatcaagatggagctcctcgccgacatcgcccccaagaccgcggagaacttccggcagttctgcactggggagcatagaaaaaatgctttgccacagggttataagggctgtcaattccatagagtgatcaaagatttcatgattcagggtggtgacttcttgaagaatgatggtactggatgcacatcaatctatggtaccaaatttgatgatgaaaattttattgcaaagcatacagggcctggactgctctcaatggcaaacagtggaattaactctaatggatctcagttctttataacatgtgcgaagtgtgactggcttgacaacaaacatgtggtatttgggagagtgcttggagacggtttgctcgtcgtgaggaagattgaaaatgttgcaactggagcgaataacaaaccaaagcttgcctgcattataagcgagtgcggtgaaatgtag

SEQ ID NO: 743 - protein, 201 aa, Sorghum bicolor
MASGGAAISAGPTPPSATATAVEWHQRPPNPKNPVVFFDVTIGSIPAGRIKMELLADIAPKTAENFRQFCTGEHRKNALPQGYKGCQFHRVIKDFMIQGGDFLKNDGTGCTSIYGTKFDDENFIAKHTGPGLLSMANSGINSNGSQFFITCAKCDWLDNKHVVFGRVLGDGLLVVRKIENVATGANNKPKLACIISECGEM

SEQ ID NO: 744 - DNA, 660 bp, Strongylocentrotus purpuratus
  CDS (1)..(660)
atggacttcagtactattcttgctctgttagttggcttcttatctgcgtttgtaagggcagacgacccagatgttgttgccatggtaactcacaaagtcttctttgacatcagcattggaggagagccagcaggcacaatcgagcttggtctctttggagatgttgtccccaagacagttgcaaatttcctgtttttcgctgatcctttgagcaaggaaaactatgttgactccaaatttcacagggtgatcaagaacttcatgatccaaggtggtgactttgctagtgaggatggatctggaagcaggagcatctatggcaaggaccatttcgatgatgagaacttcaatctggaccactatggagctggctggctggcaatggctaatgcaggacctaacacaaatggatgccagttctacatcaccacagtcaagaccaagtggctgaacggtgcccatgttgtctacggtaaagtcctggatggccttgatgttctggccaccattgagaactctgctacagatgagaacgacaagcctctcacagaggtagtcatcaccgcatcaagaaccgaagacctaccaccccaggatgagtttatcgtggagaaattaggtatcacaatgccagttgtgggaagtactggtgatttctaa

SEQ ID NO: 745 - protein, 219 aa, Strongylocentrotus purpuratus
MDFSTILALLVGFLSAFVRADDPDVVAMVTHKVFFDISIGGEPAGTIELGLFGDVVPKTVANFLFFADPLSKENYVDSKFHRVIKNFMIQGGDFASEDGSGSRSIYGKDHFDDENFNLDHYGAGWLAMANAGPNTNGCQFYITTVKTKWLNGAHVVYGKVLDGLDVLATIENSATDENDKPLTEVVITASRTEDLPPQDEFIVEKLGITMPVVGSTGDF

SEQ ID NO: 746 - DNA, 498 bp, Bombyx mori
  CDS (1)..(498)
atgtctctaccacgagtattcttcgacgtcactgttgacgatgccccactgggaaaaattgttattgagctgagaagtgacgtcactcccaagacatgtgaaaacttccgtgccctgtgcactggcgagaaaggcttcggttacaagggctccattttccatcgtgtcatccccaatttcatgctgcaaggaggggacttcaccaaccataacggcactgggggaaaatccatctacggcaataagtttgaggacgagaatttcacccttaagcacactggacctggcgttctctccatggctaatgctggtgctgatactaatggttccctgttcttcatcacctctgtcaagacctcctggctggatggcagacatgttgtctttgggaatgttgttgaaggcatggaagttgtcaagcagattgagacctttggcagccagtctgggaagacctctaagagaatcgttatcaaagactgtggtcagattgcctaa

SEQ ID NO: 747 - protein, 165 aa, Bombyx mori
MSLPRVFFDVTVDDAPLGKIVIELRSDVTPKTCENFRALCTGEKGFGYKGSIFHRVIPNFMLQGGDFTNHNGTGGKSIYGNKFEDENFTLKHTGPGVLSMANAGADTNGSLFFITSVKTSWLDGRHVVFGNVVEGMEVVKQIETFGSQSGKTSKRIVIKDCGQIA

SEQ ID NO: 748 - DNA, 594 bp, Bombyx mori
  CDS (1)..(594)
atgaaaatcccaatcatgataccggtatcaatgcttcggcgaactttagtcaatgggacaatatactctgctgcagcacttcgttttgcttcgactcaacctgataaacaagtttatttcgatgtaactgctgacggagagccattgggacgtatagtcataaaattgaacacggatgaagtaccgaaaactgctgagaactttagagctctgtgtactggtgaaaaaggttttgggtacaagggttcatcatttcatagaataataccagacttcatgtgtcaaggtggagattttaccaatcacaacggtaccggcggaaagtctatttacgggcgtaccttctcagatgagaatttcaaattaaagcatactgggcctggaattttatcaatggcgaatgctggaccgaatacaaatgggtctcaattttttataaccacagttccgactccttggttggatagaaaacatgtagtatttgggtctgtggttgaaggtatggatgttgtgcagaaaatggaaaaacttggttctaaaagtggtaaaccaataaagaaagttgtcatctcagattcaggtgagttagattaa

SEQ ID NO: 749 - protein, 197 aa, Bombyx mori
MKIPIMIPVSMLRRTLVNGTIYSAAALRFASTQPDKQVYFDVTADGEPLGRIVIKLNTDEVPKTAENFRALCTGEKGFGYKGSSFHRIIPDFMCQGGDFTNHNGTGGKSIYGRTFSDENFKLKHTGPGILSMANAGPNTNGSQFFITTVPTPWLDRKHVVFGSVVEGMDVVQKMEKLGSKSGKPIKKVVISDSGELD

SEQ ID NO: 750 - DNA, 618 bp, Bombyx mori
  CDS (1)..(618)
atgggtacccttacaatggctttaggaattttgttgttcatcgctagtgccaaatctgatgaaattcccaaaggacctaaagttactcataaggtgagctttgacatgaagattggtgatgacaatattggtactattgtgattggattatttggaaagactgtacctaagacaactgagaacttctttcaactagctcagaaacctgagggggaggggtacaaagggagcaagttccacagagtaattaaaaatttcatgatccaaggtggtgattttaccaagggtgatggaactggagggcgcagtatatatggtgaacgttttgaagatgaaaacttcaagctgaagcactatggtgctggttggttatctatggctaatgcaggcaaagacacaaatggatctcaatttttcatcacaactgttaagacaccctggttagatggcagacatgttgttttcggtaaagttttagaaggaatggatgttgtacagaaaattgagatgactgttacgggtgcgaatgatcgcccagtcaaagatgttgttatatctgacacgaaaactgaagttgtagctgaacctttcagtgtcacaaaagagagtgctcactaa

SEQ ID NO: 751 - protein, 205 aa, Bombyx mori
MGTLTMALGILLFIASAKSDEIPKGPKVTHKVSFDMKIGDDNIGTIVIGLFGKTVPKTTENFFQLAQKPEGEGYKGSKFHRVIKNFMIQGGDFTKGDGTGGRSIYGERFEDENFKLKHYGAGWLSMANAGKDTNGSQFFITTVKTPWLDGRHVVFGKVLEGMDVVQKIEMTVTGANDRPVKDVVISDTKTEVVAEPFSVTKESAH

SEQ ID NO: 752 - DNA, 531 bp, Arabidopsis thaliana
  CDS (1)..(531)
atggcgaatcctaaagtcttcttcgacatcttgattggtaagatgaaggcagggcgtgttgtaatggagttatttgcagatgtgactccgagaacagctaataatttccgtgctttgtgcactggggagaatggtattgggaaagcagggaaggctttacactacaaaggctcagcctttcaccgtataatcccagggttcatgtgtcaaggtggagatttcactcgtgggaatggaactggaggagaatctatttacgggtctaaatttgaagatgagaacttcaagttgaagcacactggtccagggattttgtctatggctaactctggtcccaacactaatggttctcagttcttcatctgcacagagaagacttcgtggcttgatgggaaacatgttgttttcgggaaagttgttgatggatacaatgtggtcaaggcaatggaggatgttggctctgacatgggaaatccttctgaacgagttgtgattgaagattgtggtgagctcaagaacccaagttcataa

SEQ ID NO: 753 - protein, 176 aa, Arabidopsis thaliana
MANPKVFFDILIGKMKAGRVVMELFADVTPRTANNFRALCTGENGIGKAGKALHYKGSAFHRIIPGFMCQGGDFTRGNGTGGESIYGSKFEDENFKLKHTGPGILSMANSGPNTNGSQFFICTEKTSWLDGKHVVFGKVVDGYNVVKAMEDVGSDMGNPSERVVIEDCGELKNPSS

SEQ ID NO: 754 - DNA, 606 bp, Zea mays
  CDS (1)..(606)
atggcgtccggcggagcggccatctcggcggggcctacaccgccgtcggcgacggcgtcgtcggttgagtggcaccagcggccgccgaacccgaagaaccccgtggtgttcttcgacgtgaccatcgggtccatcgccgccggccgcatcaagatggagctcttcgccgacatcgcccccaagaccgcggagaacttccggcagttctgcactggggagcatagaaaaaatgctttgccacaaggttataagggctgccaattccatagagtgatcaaagatttcatgattcagggtggtgacttcttgaagaatgatggtactggatgcacatcaatctacggtaccaaatttgatgatgaaaattttatagcaaagcatacagggcctggactgctctcgatggcaaacagtggaattaactctaatggatctcagttctttataacatgtgcaaagtgtgactggcttgacaacaaacatgtggtatttgggagagtgcttggagacggtttgctcgtcgtgaggaagattgaaaatgttgcaactggagcgaataacaaaccaaagcttgcctgcgttataagtgagtgtggtgaaatgtag

SEQ ID NO: 755 - protein, 201 aa, Zea mays
MASGGAAISAGPTPPSATASSVEWHQRPPNPKNPVVFFDVTIGSIAAGRIKMELFADIAPKTAENFRQFCTGEHRKNALPQGYKGCQFHRVIKDFMIQGGDFLKNDGTGCTSIYGTKFDDENFIAKHTGPGLLSMANSGINSNGSQFFITCAKCDWLDNKHVVFGRVLGDGLLVVRKIENVATGANNKPKLACVISECGEM

SEQ ID NO: 756 - DNA, 528 bp, Zea mays
  CDS (1)..(528)
atggcgaagaaccccaaggtgttcttcgacatcctcatcggcaagtccaaggccgggcgggtcgtgatggagctcttcgccgacaaggtgcccaagacggccgagaacttccgctgcctgtgcacgggcgagaagggcctgggctccgcggggaagccgctgcactacaagggctcggccttccaccgcgtcatcccgggcttcatgtgccagggcggcgacttcacccggggcaacggcacgggcggcgagtccatctacggcgccaggttcgccgacgagaacttcaagctgcgccacacgggacccggcgtgctctccatggccaacgcggggcccgacaccaacggctcccagttcttcatctgcaccgcgcagacgccctggcttgacggcaagcacgtcgtcttcggcaaggtcgtcgatggctacgccgtcgtggacaagatggaggctgtcggttctcagtcaggtgccacggccgagagcgtacgcatcgaggactgcggccagcttgccgacgactga

SEQ ID NO: 757 - protein, 175 aa, Zea mays
MAKNPKVFFDILIGKSKAGRVVMELFADKVPKTAENFRCLCTGEKGLGSAGKPLHYKGSAFHRVIPGFMCQGGDFTRGNGTGGESIYGARFADENFKLRHTGPGVLSMANAGPDTNGSQFFICTAQTPWLDGKHVVFGKVVDGYAVVDKMEAVGSQSGATAESVRIEDCGQLADD

SEQ ID NO: 758 - DNA, 489 bp, Saccharomyces cerevisiae
  CDS (1)..(489)
atgtcccaagtctattttgatgtcgaagctgatggccaaccaattggccgtgtcgttttcaagttgtacaacgacatagtcccaaagactgcagaaaacttcagagctctatgtaccggtgaaaagggattcggctacgctggctctccattccacagagttattccagacttcatgttgcaaggtggtgacttcactgctggtaacggtaccggcggtaagtctatctacggtggcaaattcccagatgaaaacttcaagaagcaccacgacagaccaggtttgttgtccatggccaacgccggtccaaacaccaacggttctcaattcttcatcaccaccgttccatgcccatggttggacggtaagcatgttgtctttggtgaagttgttgacggttacgacatcgttaagaaggttgagtccttgggttctccttccggtgccaccaaggctagaattgttgttgccaagtccggtgaattataa

SEQ ID NO: 759 - protein, 162 aa, Saccharomyces cerevisiae
MSQVYFDVEADGQPIGRVVFKLYNDIVPKTAENFRALCTGEKGFGYAGSPFHRVIPDFMLQGGDFTAGNGTGGKSIYGGKFPDENFKKHHDRPGLLSMANAGPNTNGSQFFITTVPCPWLDGKHVVFGEVVDGYDIVKKVESLGSPSGATKARIVVAKSGEL

SEQ ID NO: 760 - DNA, 678 bp, Saccharomyces cerevisiae
  CDS (1)..(678)
atgaagcttcaatttttttcctttattaccttatttgcttgtctcttcacaacagccatttttgcgaaagaggacacggcagaagatcctgagatcacacacaaggtctactttgacattaatcacggtgataaacaaattggtagaattgttatgggattgtatggtctcaccacaccccaaaccgttgaaaacttttaccagttgaccatttccagggaccctaagatgggttatttgaactctatcttccatcgcgttattcctaacttcatgattcaaggtggcgatttcactcacagatcaggtattgggggtaagtctatcttcggaaacacgttcaaagatgagaattttgatgtcaaacatgacaaaccaggcagattgtctatggccaatcgtggtaaaaacaccaacggatcccaatttttcatcaccaccgtcccatgcccatggttggacggtaagcacgttgtctttggagaagtcttggatggtatggacgtagttcactacattgaaaacgttaagaccgacagtagaaatatgcctgtaaaggaagttattattgtggaaagtggtgaactggaaactgttcctttggacaataaagacgccgccaagctacaggaagagatcaaagcggaagctagcgaagcagcccacgatgaactctaa

SEQ ID NO: 761 - protein, 225 aa, Saccharomyces cerevisiae
MKLQFFSFITLFACLFTTAIFAKEDTAEDPEITHKVYFDINHGDKQIGRIVMGLYGLTTPQTVENFYQLTISRDPKMGYLNSIFHRVIPNFMIQGGDFTHRSGIGGKSIFGNTFKDENFDVKHDKPGRLSMANRGKNTNGSQFFITTVPCPWLDGKHVVFGEVLDGMDVVHYIENVKTDSRNMPVKEVIIVESGELETVPLDNKDAAKLQEEIKAEASEAAHDEL

SEQ ID NO: 762 - DNA, 618 bp, Saccharomyces cerevisiae
  CDS (1)..(618)
atgaaattcagtggcttgtggtgttggttgttattattccttagcgttaatgttattgcatctgatgtgggtgagttgattgatcaggacgacgaagtaattacacaaaaggtgtttttcgatattgaacatggtgaagagaaagttggcagaatcgttattgggttgtacggaaaggtatgtcctaagacggcgaagaacttctacaagttaagcaccaccactaattccaaaaaggggttcatcgggtccactttccatagggtgattcccaacttcatggtacagggaggggacttcacagacggcactggcgttggtggcaaatccatctatggagatactttccctgacgaaaactttactttgaagcatgatcgcaagggcagactatcgatggctaatcgtggtaaagataccaatggatctcagttcttcatcaccactacggaagaagcgtcgtggctcgatggaaagcatgtggtatttggacaggttgtggacggcatggatgtggtgaactacatacagcacgtgtccagagatgcgaatgacaaacctctcgaggcggtcaagatcgcaaaatgcggtgagtggacgcctgagctctcttcttga

SEQ ID NO: 763 - protein, 205 aa, Saccharomyces cerevisiae
MKFSGLWCWLLLFLSVNVIASDVGELIDQDDEVITQKVFFDIEHGEEKVGRIVIGLYGKVCPKTAKNFYKLSTTTNSKKGFIGSTFHRVIPNFMVQGGDFTDGTGVGGKSIYGDTFPDENFTLKHDRKGRLSMANRGKDTNGSQFFITTTEEASWLDGKHVVFGQVVDGMDVVNYIQHVSRDANDKPLEAVKIAKCGEWTPELSS

SEQ ID NO: 764 - DNA, 1116 bp, Saccharomyces cerevisiae
  CDS (1)..(1116)
atgactagacctaaaactttttttgatatttctattggaggtaaaccccaaggccgtatagtttttgagttgtacaatgacatagtgcctaaaacggctgaaaattttttgaagttgtgtgaaggaaatgctggtatggcaaagactaaacctgatgtaccattgtcgtacaagggttccattttccacagagtgatcaaagacttcatgtgtcaatttggtgattttaccaattttaatggtactggcggtgagagcatatacgatgaaaaattcgaggatgaaaatttcactgttaaacatgataaaccattccttctatccatggccaacgccggtccaaataccaatggatctcaagctttcataacctgtgttcctacacctcatttggacgggaagcacgttgtgtttggtgaagtgattcaaggtaaaagaattgttcgtttgattgaaaaccaacaatgtgaccaagaaaacaacaagccattgcgtgatgtaaagattgatgactgtggcgtgttacctgacgattatcaagtgccagagaatgccgaagctacaccaacagatgagtacggcgataattatgaagatgttttaaaacaagacgaaaaagttgacttgaagaatttcgacaccgtcttgaaagctatcgaaacggtaaagaacattggtactgaacagttcaagaaacagaactattccgtggctttagaaaaatatgtcaaatgtgataaattcttgaaagagtatttcccagaagatttggagaaggaacaaattgaaaaaatcaatcaattgaaagtgtctattccattgaatattgccatctgtgctcttaaattaaaagattacaagcaagtattagtagcctcatcggaggtgttatatgccgaagcggctgacgaaaaagccaaggccaaagctttgtaccgtcgtggcctggcctattaccatgttaatgacacagatatggctctcaatgacctagaaatggccactactttccagccaaatgacgctgccattttgaaagctattcataatactaaattaaaaagaaagcaacaaaacgaaaaagctaaaaagtctctttcgaagatgttctcctga

SEQ ID NO: 765 - protein, 371 aa, Saccharomyces cerevisiae
MTRPKTFFDISIGGKPQGRIVFELYNDIVPKTAENFLKLCEGNAGMAKTKPDVPLSYKGSIFHRVIKDFMCQFGDFTNFNGTGGESIYDEKFEDENFTVKHDKPFLLSMANAGPNTNGSQAFITCVPTPHLDGKHVVFGEVIQGKRIVRLIENQQCDQENNKPLRDVKIDDCGVLPDDYQVPENAEATPTDEYGDNYEDVLKQDEKVDLKNFDTVLKAIETVKNIGTEQFKKQNYSVALEKYVKCDKFLKEYFPEDLEKEQIEKINQLKVSIPLNIAICALKLKDYKQVLVASSEVLYAEAADEKAKAKALYRRGLAYYHVNDTDMALNDLEMATTFQPNDAAILKAIHNTKLKRKQQNEKAKKSLSKMFS

SEQ ID NO: 766 - DNA, 549 bp, Saccharomyces cerevisiae
  CDS (1)..(549)
atgtttaaacgttccatcattcaacagtcccgcttattctccaattctgcttctagactaggtaaaaaagtgttctttgatcctgcggtcaatggaaccaaaatcggcagaatagaatttgaattatatgataatgtggttcctaaaactgctgaaaatttcagagccttatgtaccggcgaaaagggctggggctataaaggtgtccctttccacagaatcatcccagacttcatgatccaaggtggtgacactgatttgactaacggttttgggggcaaatccatttacggttccaagttcgctgacgaaaattttgtcaaaaagcatgacaaggcaggtttgttatctatggcaaatgctggaccaaacactaacggttctcaattcttcattaccactgtgccttgtccatggttggatggaaaacacgttgtctttggtgaggtaaccaaaggtatggacattgtcaaagcaatcgaatcatacggtactgcttctggtaaaccaagagctgaaatcgttatcgaagaagctggtgagttatga

SEQ ID NO: 767 - protein, 182 aa, Saccharomyces cerevisiae
MFKRSIIQQSRLFSNSASRLGKKVFFDPAVNGTKIGRIEFELYDNVVPKTAENFRALCTGEKGWGYKGVPFHRIIPDFMIQGGDTDLTNGFGGKSIYGSKFADENFVKKHDKAGLLSMANAGPNTNGSQFFITTVPCPWLDGKHVVFGEVTKGMDIVKAIESYGTASGKPRAEIVIEEAGEL

SEQ ID NO: 768 - DNA, 522 bp, Arabidopsis thaliana
  CDS (1)..(522)
atggcaacaaaccctaaagtctacttcgacatgaccgtcggtggcaaatccgccggtcgtatcgtgatggagctttacgccgacacaacaccagaaaccgccgagaatttcagagcactctgtaccggagagagaggaatcggtaaacaaggtaagccattacactacaaaggatcaagctttcaccgagtgattccgaaattcatgtgtcaaggaggtgatttcacagccgggaatggtaccggaggtgaatctatctatggatcgaagttcaaagacgagaactttatcaagaaacatacaggaccaggtattttgtctatggctaacgctggtgcgaacacgaatggatctcagttttttatttgtactgagaagacttcgtggctcgatgggaaacatgttgtgtttggtcaagttgttgagggattgaatgttgttagagatattgagaaggttggatctgactctggaagaacttctaagcctgttgtcattgctgattgtggtcagatttcttag

SEQ ID NO: 769 - protein, 173 aa, Arabidopsis thaliana
MATNPKVYFDMTVGGKSAGRIVMELYADTTPETAENFRALCTGERGIGKQGKPLHYKGSSFHRVIPKFMCQGGDFTAGNGTGGESIYGSKFKDENFIKKHTGPGILSMANAGANTNGSQFFICTEKTSWLDGKHVVFGQVVEGLNVVRDIEKVGSDSGRTSKPVVIADCGQIS

SEQ ID NO: 770 - DNA, 525 bp, Arabidopsis thaliana
  CDS (1)..(525)
atggcgtcgcatcctaaagttttcttcgacatgaccatcggcggtgcaccagcggggaagatcgtgatggagctttacaccgacaagacaccaaagacggcggagaatttcagagctctatgcaccggagagaaaggcgtcggacgtagcggaaagccacttcacttcaaaggatcttcgtttcaccgcgtgatcccaaatttcatgtgccaaggaggagatttcaccaaaggtaacggaactggtggcgaatcgatctacggagccaaatttgaggatgagaatttcgagaggaagcacacaggacctgggattttgtcgatggctaacgctggtgctaacactaatggatctcagtttttcatctgtacggtgaagactgattggcttgatggtaagcatgtggtgtttggtcaggtggttgaaggcttggacgttgttaaggctattgagaagatcggatcttcttctggaaagccgacgaagcctgttgtgatcgctgattgtggtgagatctcttcttag

SEQ ID NO: 771 - protein, 174 aa, Arabidopsis thaliana
MASHPKVFFDMTIGGAPAGKIVMELYTDKTPKTAENFRALCTGEKGVGRSGKPLHFKGSSFHRVIPNFMCQGGDFTKGNGTGGESIYGAKFEDENFERKHTGPGILSMANAGANTNGSQFFICTVKTDWLDGKHVVFGQVVEGLDVVKAIEKIGSSSGKPTKPVVIADCGEISS

SEQ ID NO: 772 - DNA, 519 bp, Arabidopsis thaliana
  CDS (1)..(519)
atgtcgaaccctagagttttcttcgacatgagtctcagcggtactcccatcggacggatcgagatggagcttttcgctgatacaaccccaaacacggcggagaatttccgtgctctctgtaccggcgagaaaggaatgggaaagctaggtaagccacttcacttcaaaggatcgatcttccaccgtgtgattcccggattcatgtgtcaaggaggtgatttcaccgccaagaacggaaccggtggtgaatcgatctacggtgctaagttcaaggacgagaactttatcaagaagcatacaggagctgggattctctcaatggctaactctggtcctaacactaacggatctcagttcttcatctgtaccgataagacgtcgtggttagatggtaagcacgttgtgtttggacaagttgttaaaggcttggacgtcgtgaaggcgattgagaaagttggatctgattctggaaagacttccaaagtcgttaccatcactgattgtggtcagctttcttag

SEQ ID NO: 773 - protein, 172 aa, Arabidopsis thaliana
MSNPRVFFDMSLSGTPIGRIEMELFADTTPNTAENFRALCTGEKGMGKLGKPLHFKGSIFHRVIPGFMCQGGDFTAKNGTGGESIYGAKFKDENFIKKHTGAGILSMANSGPNTNGSQFFICTDKTSWLDGKHVVFGQVVKGLDVVKAIEKVGSDSGKTSKVVTITDCGQLS

SEQ ID NO: 774 - DNA, 594 bp, Staphylococcus aureus subsp. aureus Mu50
  CDS (1)..(594): transl_table=11
atggctaactatccacagttaaacaaagaagtacaacaaggtgaaattaaagtggttatgcacacaaataaaggtgacatgacattcaaattatttccaaatattgcaccaaaaacagttgaaaattttgtgacacatgcaaaaaatggttattatgatggaataacattccaccgtgtcattaatgacttcatgattcaaggtggcgatccaacagctactggtatgggtggcgaaagtatttatggcggtgcttttgaagatgaattttcattaaatgcatttaacttatatggcgcattatcaatggctaactcaggacctaatactaatggttcacaatttttcattgttcaaatgaaagaagtacctcaaaatatgttaagtcaacttgcagatggtggctggcctcaaccaatcgttgatgcatatggcgaaaagggtggtacaccatggttagatcaaaaacatacagtattcggtcaaatcattgatggtgaaactactttagaagatattgcaaatacaaaagtgggaccacaagacaaaccacttcatgatgttgtaattgaatctattgatgttgaagaataa

SEQ ID NO: 775 - protein, 197 aa, Staphylococcus aureus subsp. aureus Mu50
MANYPQLNKEVQQGEIKVVMHTNKGDMTFKLFPNIAPKTVENFVTHAKNGYYDGITFHRVINDFMIQGGDPTATGMGGESIYGGAFEDEFSLNAFNLYGALSMANSGPNTNGSQFFIVQMKEVPQNMLSQLADGGWPQPIVDAYGEKGGTPWLDQKHTVFGQIIDGETTLEDIANTKVGPQDKPLHDVVIESIDVEE

SEQ ID NO: 776 - DNA, 516 bp, Synechocystis sp. PCC 6803
  CDS (1)..(516): transl_table=11
atgatgagcaaagttttttttgatattaccatcggcagcgataccgcaggtcgcattgtgatggaattgtttgacgaagttacccccaaaaccgctgaaaatttccgggccctttgcactggagaaaaaggtgtgggtaaagctggtaaacccctacacttcaaaggttcccatttccatcgagtcatcaccgatttcatggcccaagggggagattttacccggggcaacggtaccggcggtgagtctatttatggagaaaaatttgccgatgaaaatttccagttaaagcacgatcgccctgggctattgtccatggccaatgccgggcccaataccaacggttcccaattcttcttaacctttgtaccttgcccttggcttgatggtaagcacgtcgtttttggtgaagtggtggaaggtttagaaattctagagcaacttgaagctaacggttcccaaagtggtcaaactaaacaggcgatcgttatcagcgattgtggtgaaattaaataa

SEQ ID NO: 777 - protein, 171 aa, Synechocystis sp. PCC 6803
MMSKVFFDITIGSDTAGRIVMELFDEVTPKTAENFRALCTGEKGVGKAGKPLHFKGSHFHRVITDFMAQGGDFTRGNGTGGESIYGEKFADENFQLKHDRPGLLSMANAGPNTNGSQFFLTFVPCPWLDGKHVVFGEVVEGLEILEQLEANGSQSGQTKQAIVISDCGEIK

SEQ ID NO: 778 - DNA, 585 bp, Listeria monocytogenes EGD-e
  CDS (1)..(585): transl_table=11
atgacttacccacaattatcaaaagaagtggcacctaacgaaatcgaagcagaaatgattacaaatcgcggaactatccgcatcaaattgttccctgaaattgctccaaaaacagtagaaaactttgttacacattccaaaaatggctactacgatggccttattttccatcgtgttatccctgagtttatgatccaaggtggcgacccagacggccgcggtactggtggcgaaagtatttggggcgaatcttttgaagacgaattttctacagaagctttcaacctacgcggagctctatcaatggcaaacgccggtccaaacacaaacggtagccaattcttcatcgttcaaaaacccgacatgcctgctgacatgcttggccaaatggaacaagctggcttcccagtagaagttatcgaagcatataaacagggcgggacaccgtggttagacggacgccacacagttttcggtcacgtaatcgaaggcatggacgtagtagacgaaattgccaacctaccaactggcatgcaagacaaaccagtgaatgacgttgtgattgagaagattaatattaaataa

SEQ ID NO: 779 - protein, 194 aa, Listeria monocytogenes EGD-e
MTYPQLSKEVAPNEIEAEMITNRGTIRIKLFPEIAPKTVENFVTHSKNGYYDGLIFHRVIPEFMIQGGDPDGRGTGGESIWGESFEDEFSTEAFNLRGALSMANAGPNTNGSQFFIVQKPDMPADMLGQMEQAGFPVEVIEAYKQGGTPWLDGRHTVFGHVIEGMDVVDEIANLPTGMQDKPVNDVVIEKINIK

SEQ ID NO: 780 - DNA, 585 bp, Listeria innocua Clip11262
  CDS (1)..(585): transl_table=11
atgacttacccacaattatcaaaagaagtggcacctaatgaaatcgaagcagaaatgattacaaaccgaggaactatccgcatcaaactgttccctgaaattgcaccaaaaacagtagaaaactttgttacacattccaaaaacggctactatgatggtcttattttccaccgtgttattcctgaattcatgatccaaggtggcgacccagacggccgcggtactggtggcgaaagtatttggggcgaatcttttgaagatgaattctctacagaagctttcaacttacgcggagctctatcaatggcaaacgctggtccaaacacaaacggcagccaattcttcatcgttcaaaaaccagatatgcctgctgacatgcttggccaaatggaacaagctggcttcccagtagaaattatcgaagcttacaaacaaggcggaacaccatggttagacggccgccacacagttttcggtcacgtaatcgaaggcatggacgtagtagacgaaatcgccaacctaccaactggcatgcaagacaaaccagtgaatgacgttgtgattgagaagattaatattaaataa

SEQ ID NO: 781 - protein, 194 aa, Listeria innocua Clip11262
MTYPQLSKEVAPNEIEAEMITNRGTIRIKLFPEIAPKTVENFVTHSKNGYYDGLIFHRVIPEFMIQGGDPDGRGTGGESIWGESFEDEFSTEAFNLRGALSMANAGPNTNGSQFFIVQKPDMPADMLGQMEQAGFPVEIIEAYKQGGTPWLDGRHTVFGHVIEGMDVVDEIANLPTGMQDKPVNDVVIEKINIK

SEQ ID NO: 782 - DNA, 615 bp, Caenorhabditis elegans
  CDS (1)..(615)
atgaagtcgcttcttgttgtggcggccgtgctcgctgtcggagctcttgctcagggagacgatgccaaaggaccaaaggtcactgacaaggtctactttgacatggaaattggaggaaaaccaatcggacgtatcgtcatcggacttttcggaaaaaccgtcccaaagaccgccaccaacttcattgagctcgccaagaagccaaagggagaaggatatccaggaagcaagttccaccgagtcatcgcagacttcatgattcaaggaggagatttcacccgtggagatggaaccggaggacgctctatctacggagagaagttcgccgacgagaacttcaagctgaagcactacggagccggatggttgtcgatggccaacgctggagctgataccaatggatcccaattcttcatcaccacagtcaagaccccatggctcgatggacgccacgtcgttttcggaaagatcctcgaaggaatggatgtggtccgcaagatcgaacagaccgagaagcttcctggggaccgcccgaagcaagacgtcatcatcgccgcttctggacacatcgccgtcgacactccattctctgttgaacgcgaggccgtcgtctaa

SEQ ID NO: 783 - protein, 204 aa, Caenorhabditis elegans
MKSLLVVAAVLAVGALAQGDDAKGPKVTDKVYFDMEIGGKPIGRIVIGLFGKTVPKTATNFIELAKKPKGEGYPGSKFHRVIADFMIQGGDFTRGDGTGGRSIYGEKFADENFKLKHYGAGWLSMANAGADTNGSQFFITTVKTPWLDGRHVVFGKILEGMDVVRKIEQTEKLPGDRPKQDVIIAASGHIAVDTPFSVEREAVV

SEQ ID NO: 784 - DNA, 552 bp, Caenorhabditis elegans
  CDS (1)..(552)
atgactgaatacgacaagtttgccgagcagctccgtcatccggataacccaatcgtttttctagaagttaccgccggtggtgcaccaatcggaactattgttatcgagttatttgctgatgtaacaccgagaactgctgaaaactttcgtcagttctgtacaggagaatacaaaaaagatggtgtcccaaacggatacaaaaactgcacatttcatcgtgtgatcaaggactttatgattcagggtggcgacttctgcaacggcgatggaaccggtttgatgagcatctatggttcaaagttccgtgacgagaatttcgagctgaagcacataggaccaggaatgctttcgatggctaacgctggctctgacacaaatggttgtcagttttttatcacttgcgcaaaaaccgatttccttgacaacaaacatgtagtttttggacgagtactcgatggaatgctgacggttcggaaaatcgaaaatgttccaactggagccaataacaagccgaaacttccgattgttgttgttcaatgtggccaactctaa

SEQ ID NO: 785 - protein, 183 aa, Caenorhabditis elegans
MTEYDKFAEQLRHPDNPIVFLEVTAGGAPIGTIVIELFADVTPRTAENFRQFCTGEYKKDGVPNGYKNCTFHRVIKDFMIQGGDFCNGDGTGLMSIYGSKFRDENFELKHIGPGMLSMANAGSDTNGCQFFITCAKTDFLDNKHVVFGRVLDGMLTVRKIENVPTGANNKPKLPIVVVQCGQL

SEQ ID NO: 786 - DNA, 606 bp, Caenorhabditis elegans
  CDS (1)..(606)
atgagccgtgctcttcttttcttcgttctcgccattctggctttgtcagccgaggcacgtggaccacgtgtcactgacaaggtcttctttgacatggagatcggaggaagacctgttgggaaaatcgtcatcggacttttcggagaggtcgtgccgaagacagtgaagaatttcgttgagttggcacagagagctgagggagaaggatacgttggtagcaagttccaccgtgtcatcgaaaacttcatgattcaaggtggagacttcacacgtggcgacggaaccggtggacgatcgatctacggcgagcgctttgaagatgagaacttcaagcttcaacactacggaccaggatggttgtcaatggccaacgctggagaagataccaatggatctcaatttttcatcactaccgccaaaacctcatggctcgatggaaagcatgtggtgttcggtaagatcctggaaggaatggacgtagttcgtgagatcgaggctacaccaaaaggagctggagatcggccaattgaggatgttgtcatcgccaacgctggacatattccagtagagaacccattcactgtcgccagagcaggagttaattaa

SEQ ID NO: 787 - protein, 201 aa, Caenorhabditis elegans
MSRALLFFVLAILALSAEARGPRVTDKVFFDMEIGGRPVGKIVIGLFGEVVPKTVKNFVELAQRAEGEGYVGSKFHRVIENFMIQGGDFTRGDGTGGRSIYGERFEDENFKLQHYGPGWLSMANAGEDTNGSQFFITTAKTSWLDGKHVVFGKILEGMDVVREIEATPKGAGDRPIEDVVIANAGHIPVENPFTVARAGVN

SEQ ID NO: 788 - DNA, 519 bp, Caenorhabditis elegans
  CDS (1)..(519)
atgccacgtgtcaaagtgttcttcgatatcacgattggcggaaagaagggaggacgcatcgttatggagctctacaacgacatcgtgccgaagacagcggaaaacttccgcgctctgtgcaccggcgagaaaggaaaagggaaatcgggcaagaagttgcactttaaaggatccaaatttcatcgcatcatccccgagtttatgatccagggcggcgattttacggagggaaacggcaccggcggagaatcgattcatggcgagaagtttgacgacgagaacttcaaggagaagcataccggacccggagtcttgtcgatggcaaactgtggggcgaacacaaacggctcgcaattcttcctgtgcacagtcaaaaccacgtggctagacggaaaacacgtggttttcggcaaagtgatcgaaggaatggatgtggtgaaggcgatcgagtcgaaaggatccgaagatggggcaccgtcggctccgtgcgtcattgctgactgcggagaaatgaagtga

SEQ ID NO: 789 - protein, 172 aa, Caenorhabditis elegans
MPRVKVFFDITIGGKKGGRIVMELYNDIVPKTAENFRALCTGEKGKGKSGKKLHFKGSKFHRIIPEFMIQGGDFTEGNGTGGESIHGEKFDDENFKEKHTGPGVLSMANCGANTNGSQFFLCTVKTTWLDGKHVVFGKVIEGMDVVKAIESKGSEDGAPSAPCVIADCGEMK

SEQ ID NO: 790 - DNA, 579 bp, Caenorhabditis elegans
  CDS (1)..(579)
atgaaatttctactccgtgcctcctcacttgccggtcaatcacttcgattcgcctctcaaagaccgaaggtgtttttcgacgtgagtattggagaagaaccagcaggacgtgtcaccatggagttgttcaacgatgttgtcccaaaaacagcagagaatttccgcgcattgtgcaccggtgagaagggcgtcggagagcaaggagttgcacttcacttcaagggatcaaaattccacagaatcattccagagttcatgattcagggaggagatttcactcgccacaacggaactggtggtgaatcaatctacggaaataaattcaaggacgagaatttcgatcttaagcacaccggaccaggatgcctttcaatggccaacgctggaccaaacaccaacggatctcagtttttcatttgcacagtcgacactccatggcttgatggaggtcacgtcgttttcggacaagtcaccgacggcatgtctgttgtgaagaagatcgaaaagatgggatcccgatccggagccccagccaagactgtcacaatcgccgattgcggagagttgaagagcgagtaa

SEQ ID NO: 791 - protein, 192 aa, Caenorhabditis elegans
MKFLLRASSLAGQSLRFASQRPKVFFDVSIGEEPAGRVTMELFNDVVPKTAENFRALCTGEKGVGEQGVALHFKGSKFHRIIPEFMIQGGDFTRHNGTGGESIYGNKFKDENFDLKHTGPGCLSMANAGPNTNGSQFFICTVDTPWLDGGHVVFGQVTDGMSVVKKIEKMGSRSGAPAKTVTIADCGELKSE

SEQ ID NO: 792 - DNA, 516 bp, Caenorhabditis elegans
  CDS (1)..(516)
atgagccgcccaagagtcttcttcgacatcaccatcgccggaaaaccaaccggacgtatcgttatggagctctacaacgatattgttccaaaaaccgctgagaacttccgtgctctttgcactggtgagaagggagtcggaaagtccggaaagccactccacttcaagggatccaagttccatcgtatcatcccagaattcatgatccagggaggagacttcacccgcgggaacggaactggaggagaatccatctacggagagaagttcccagacgagaacttcaaggagaagcacaccggaccaggagtcctttccatggctaacgctggaccaaacaccaacggatctcaattcttcctctgcaccgtcaagactgcctggctcgacggaaagcacgtcgttttcggacgtgtcgtcgaaggattggacatcgtcagcaaggtcgagggcaacggaagcagctccggaactccaaagtccgagtgcctcatcgccgactgcggacagctctaa

SEQ ID NO: 793 - protein, 171 aa, Caenorhabditis elegans
MSRPRVFFDITIAGKPTGRIVMELYNDIVPKTAENFRALCTGEKGVGKSGKPLHFKGSKFHRIIPEFMIQGGDFTRGNGTGGESIYGEKFPDENFKEKHTGPGVLSMANAGPNTNGSQFFLCTVKTAWLDGKHVVFGRVVEGLDIVSKVEGNGSSSGTPKSECLIADCGQL

SEQ ID NO: 794 - DNA, 522 bp, Caenorhabditis elegans
  CDS (1)..(522)
atgagccgctcaaaggtctttttcgacatcaccatcggtggtaaggcttccggacgtatcgtcatggagctttacgatgacgttgtcccaaagaccgccggtaatttccgcgctctctgcaccggagaaaatggaatcggaaagtctggaaagccactccacttcaagggatccaagtttcatcgcatcatcccgaacttcatgatccagggaggagacttcacccgcggaaacggaactggaggagaatccatctacggagagaagttcccagacgagaacttcaaggagaagcacaccggaccaggagtcctctccatggctaatgctggaccaaacaccaacggatctcaattcttcctctgcaccgtcaagaccgagtggctcgacggaaagcacgtcgttttcggacgtgtcgtcgaaggattggacgtcgtgaaggctgtcgaatccaacggatcccaatccggaaagccagtcaaggactgcatgatcgctgactgtggacaactcaaggcataa

SEQ ID NO: 795 - protein, 173 aa, Caenorhabditis elegans
MSRSKVFFDITIGGKASGRIVMELYDDVVPKTAGNFRALCTGENGIGKSGKPLHFKGSKFHRIIPNFMIQGGDFTRGNGTGGESIYGEKFPDENFKEKHTGPGVLSMANAGPNTNGSQFFLCTVKTEWLDGKHVVFGRVVEGLDVVKAVESNGSQSGKPVKDCMIADCGQLKA

SEQ ID NO: 796 - DNA, 684 bp, Drosophila melanogaster
  CDS (1)..(684)
atggtctctttttgtgcaactctgattcgacagtttcggcacaggtcggcagcggcatttcagattgcggagtccgccattttagctaacaaatctataaccctagcttcgtcagcgtgcagtgtgaataggggtcagttgcagtttggaattcagattgttcgcgaatattcgaaagcgtcaaagatgagtactttgcctagggtgttttttgatatgaccgccgacaacgagcccctcggtcggatcgtcatggagctgcgctccgatgtcgtgcccaagaccgccgagaacttccgcgccttgtgcaccggcgagaagggattcgggtacaagggctccattttccaccgcgtcatccccaacttcatgtgccagggcggcgacttcaccaaccacaacggcactggcggcaagtccatctacggcaacaagttccccgatgagaacttcgagctgaagcacaccggctccggcatcctgtcgatggccaacgctggcgccaacacgaacggctcccagttctttatttgcactgtgaagaccgcctggttggacaacaagcacgtcgtcttcggcgaggtcgtcgagggactggatgtggtcaagaagatcgaatcttatggatcgcagtctggcaagacctccaagaagatcattgtggctaactctggttctctttaa

SEQ ID NO: 797 - protein, 227 aa, Drosophila melanogaster
MVSFCATLIRQFRHRSAAAFQIAESAILANKSITLASSACSVNRGQLQFGIQIVREYSKASKMSTLPRVFFDMTADNEPLGRIVMELRSDVVPKTAENFRALCTGEKGFGYKGSIFHRVIPNFMCQGGDFTNHNGTGGKSIYGNKFPDENFELKHTGSGILSMANAGANTNGSQFFICTVKTAWLDNKHVVFGEVVEGLDVVKKIESYGSQSGKTSKKIIVANSGSL

SEQ ID NO: 798 - DNA, 603 bp, Encephalitozoon cuniculi GB-M1
  CDS (1)..(603)
atgaaaggccataataccttaatccttttattgtttggagaagtattaaaagcactagcaatgcatggaactccatacctagacgttgaatataatgttggaggagaaaagaggtctggaaggattacatttgaattgtactgggacatcactcccaaaacagctagaaatttctatgagtttgtaaaaggaacagaaattggagggaagtactataaatacgaaaatggcctgttccacaggattattccgggcttcatgatgcagggaggagatgtcgtgatgggaaacggctctggctccatctccatatacaatgccgaacctttctccgacgaaaacttcgaaatcgctcatgatagcataggcaagctgtctatggctaataggggtccacacaccaatggatcacaattttttatcacatttgataaacaacatcatcttgacggcaagcacgtagtgttcggaaatgtctctggagaatgtctttccttgatcagagacatacaaaagatcgatatcgatcgtgataggccagtacacccggtgagaatagtcaggtccggaatagtggaggaaggagaggaaaaatatctttaa

SEQ ID NO: 799 - protein, 200 aa, Encephalitozoon cuniculi GB-M1
MKGHNTLILLLFGEVLKALAMHGTPYLDVEYNVGGEKRSGRITFELYWDITPKTARNFYEFVKGTEIGGKYYKYENGLFHRIIPGFMMQGGDVVMGNGSGSISIYNAEPFSDENFEIAHDSIGKLSMANRGPHTNGSQFFITFDKQHHLDGKHVVFGNVSGECLSLIRDIQKIDIDRDRPVHPVRIVRSGIVEEGEEKYL

SEQ ID NO: 800 - DNA, 522 bp, Schizosaccharomyces pombe
  CDS (1)..(522)
atgagcaccgaacctgttgtttttatggatattgctattgatgggagattattaggaaggatcaagatccggttgttttccagtatagtcccgaagactgctgaaaacttcagacaattttgtacaggagaaacgcttggagttaatcaaaaaccgatcggttacaaaaatagtacttttcataggattattcaaggttttatgatacaaggaggtgattttgtgagtggagatggtactggcagcgcgaccattttcaattcacgtacatttcctgacgaaaattttactctcaaacatgatcgccctggtttactgagtatggctaatgctgggaaagactcaaatggatgccaattctttattactaccgttccttgcgattttttggacggcaaacatgtcgtctttggcgaagtaattgagggctacgacattgttaaagaaattgaatctactcctgttggagcaaattcacgacccaagtcaaacgttgcgatagtcgaatgtggagaaatgtag

SEQ ID NO: 801 - protein, 173 aa, Schizosaccharomyces pombe
MSTEPVVFMDIAIDGRLLGRIKIRLFSSIVPKTAENFRQFCTGETLGVNQKPIGYKNSTFHRIIQGFMIQGGDFVSGDGTGSATIFNSRTFPDENFTLKHDRPGLLSMANAGKDSNGCQFFITTVPCDFLDGKHVVFGEVIEGYDIVKEIESTPVGANSRPKSNVAIVECGEM

SEQ ID NO: 802 - DNA, 489 bp, Schizosaccharomyces pombe
  CDS (1)..(489)
atgtccaactgcttttttgacgttattgccaacggccaacctttaggacgtatcgtcttcaaattattcgacgatgtcgttcccaagactgctgctaacttccgtgctctctgcaccggcgagaagggctatggctatgctggctccaccttccaccgtgtcattccccaattcatgctccaaggtggtgatttcactcgcggtaacggtaccggtggaaagtccatttatggcgagaaatttcctgatgaaaactttgccttgaagcataacaagcctggtttgttgtctatggccaacgctggtcctaacaccaacggttctcaatttttcattaccaccgttgtcactccctggttagatggcaagcatgtcgttttcggtgaggtcactgagggtatggatgttgtcaagaaggttgaaagcttgggttctaactctggtgctactcgtgctcgcattgtcattgacaagtgtggtaccgtctaa

SEQ ID NO: 803 - protein, 162 aa, Schizosaccharomyces pombe
MSNCFFDVIANGQPLGRIVFKLFDDVVPKTAANFRALCTGEKGYGYAGSTFHRVIPQFMLQGGDFTRGNGTGGKSIYGEKFPDENFALKHNKPGLLSMANAGPNTNGSQFFITTVVTPWLDGKHVVFGEVTEGMDVVKKVESLGSNSGATRARIVIDKCGTV

SEQ ID NO: 804 - DNA, 519 bp, Encephalitozoon cuniculi GB-M1
  CDS (1)..(519)
atggctaaggaggcgagtggaaacgtctacttcgatgtgtatgcaaacgaagagagcctcgggaggatagtgatgaagcttgaagacgacatcgttccgaagacagcaaagaacttcaggactctttgcgaaagacccaagggggagggatacaagggatccaccttccatagaataattcctgggttcatggtccagggtggagattacaccgcgcacaacggaactggggggagaagtatctatggagaaaagtttcccgacgagaactttgagctgaaacacacaaaggaggggatcctctctatggcaaactgcggggcccacacaaacgggtctcaattcttcataacccttggaaagacccaatggctcgatgaaaaacacgttgtctttggggaggtggttgagggcatggacgttgtccacaagatagctaaatatggatccgaaagcggccaggtcaagaaagggtataggattgaaatcagggattgtggggtcctcggaagtaattaa

SEQ ID NO: 805 - protein, 172 aa, Encephalitozoon cuniculi GB-M1
MAKEASGNVYFDVYANEESLGRIVMKLEDDIVPKTAKNFRTLCERPKGEGYKGSTFHRIIPGFMVQGGDYTAHNGTGGRSIYGEKFPDENFELKHTKEGILSMANCGAHTNGSQFFITLGKTQWLDEKHVVFGEVVEGMDVVHKIAKYGSESGQVKKGYRIEIRDCGVLGSN

SEQ ID NO: 806 - DNA, 552 bp, Drosophila melanogaster
  CDS (1)..(552)
atgcctaactggaatcaaatacagtcccaactgagaagctccaacaatcccgtcgttttcttcgacattgccgtaggcacaacggaaatcggacgaatgatattcgaactctttgcggacacagtgccccgcacggcggaaaacttccggcagttctgcacgggcgagtaccgaccggatggcgttcccattggctacaaaggcgccagtttccatcgggtgatcaaggacttcatgatccagggcggcgactttgtgcagggcgacggcaccggcgtgaccagcatatacggcaacaccttcggcgacgagaactttaccctgaagcacgactcgcccggcctcctttccatggcaaacagtggcaaggagacgaacggctgccaattctttatcacctgcgccaagtgcaactttttagacggaaagcacgtggtgttcggtcgggttctggatggactgctcatcatgcgcaagatcgagaacgtgcccacgggccccaataacaagccgaagctcccagtgaccatttcgcagtgcgggcaaatgtag

SEQ ID NO: 807 - protein, 183 aa, Drosophila melanogaster
MPNWNQIQSQLRSSNNPVVFFDIAVGTTEIGRMIFELFADTVPRTAENFRQFCTGEYRPDGVPIGYKGASFHRVIKDFMIQGGDFVQGDGTGVTSIYGNTFGDENFTLKHDSPGLLSMANSGKETNGCQFFITCAKCNFLDGKHVVFGRVLDGLLIMRKIENVPTGPNNKPKLPVTISQCGQM

SEQ ID NO: 808 - DNA, 618 bp, Drosophila melanogaster
  CDS (1)..(618)
atgaagctgttcttatccgttttcgtggtagccctggtggccggcgtcgttgttgccgacgatagcaagggtcccaaagtgaccgagaaggttttctttgacatcaccattggcggcgagcccgctggtcgcatcgagatcggtctgttcggcaagacggtgcccaagacggtggagaacttcaaggagctggcgctgaagccgcagggcgagggctacaagggcagcaagttccaccgcatcatcaaggacttcatgatccagggcggtgacttcaccaagggcgacggcaccggcggtcgctccatctacggcgagcgcttcgaggatgagaacttcaagctgaagcactatggcgccggctggctgagcatggccaacgctggcaaggacaccaacggatcgcagttcttcatcaccaccaagcagaccagctggctggatggacgccacgtcgtcttcggcaagatcctgtcgggcatgaatgtggtgcgccagatcgagaactcggccactgatgcccgcgaccgtcccgtcaaggatgtggtcatcgccaacagcggcaccctgcccgtttcggaggccttctccgtggccaaggccgatgccaccgactaa

SEQ ID NO: 809 - protein, 205 aa, Drosophila melanogaster
MKLFLSVFVVALVAGVVVADDSKGPKVTEKVFFDITIGGEPAGRIEIGLFGKTVPKTVENFKELALKPQGEGYKGSKFHRIIKDFMIQGGDFTKGDGTGGRSIYGERFEDENFKLKHYGAGWLSMANAGKDTNGSQFFITTKQTSWLDGRHVVFGKILSGMNVVRQIENSATDARDRPVKDVVIANSGTLPVSEAFSVAKADATD

SEQ ID NO: 810 - DNA, 498 bp, Streptomyces coelicolor A3(2)
  CDS (1)..(498): transl_table=11
atgagcaattccaaggtttacttcgacatcgacatcgacggccaggatgcgggccgcatcgtcttcgagctcttcgaggacgtcacccccaagaccgccaggaacttcctggagctggccaccggcgagcacggcttcggctacgccggttccccgttccaccgtgtgatcccgcagttcatgctccagggcggtgacttcaccaacggcaacggcaccgggggcaagagcatctacggcgagaagttcgcggacgagaacttccagctgaagcacaccgagccgtacctcctgtccatggcgaacgcgggtccgaacaccaacggctcgcagttcttcgtcacgaccgtccccaccccgtggctggacggcaagcacgtcgtcttcggcaaggtcgtcgagggcacggacgtggtcgacaagatcgagggctacggctcctcgcccgcgggcaagacctccaaggagatcaaggtgcgcgcgtccggcaagctgtaa

SEQ ID NO: 811 - protein, 165 aa, Streptomyces coelicolor A3(2)
MSNSKVYFDIDIDGQDAGRIVFELFEDVTPKTARNFLELATGEHGFGYAGSPFHRVIPQFMLQGGDFTNGNGTGGKSIYGEKFADENFQLKHTEPYLLSMANAGPNTNGSQFFVTTVPTPWLDGKHVVFGKVVEGTDVVDKIEGYGSSPAGKTSKEIKVRASGKL

SEQ ID NO: 812 - DNA, 495 bp, Drosophila melanogaster
  CDS (1)..(495)
atgtcgttgccacgcgtttacttcgatatagccgcaggaggtgagaagttaggtagaattgtgatggaactacgttcggatgtggtgcccaagacggcggagaatttccgggccctctgcaccggagagaaggggtacggctacaagggatcaccattccaccgcgtcatcccgaatttcatgtgtcagggcggtgatttcactaatcaaaacggaactggaggacgctccatttatggaaacaagtttcccgatgagaatttcgagctaaagcataccggagctggtgtactttcgatggccaatgctggggccaataccaatggatctcagtttttcatttgcaccgggaaaaccacatggctggataataagcatgtcgtgttcggcaaggtcgttgagggaatggatatcgtccagaaggtagaatcttacggttcacaagatgggaagaccagcaagaaagtaattatcgaagactgcggagccctctga

SEQ ID NO: 813 - protein, 164 aa, Drosophila melanogaster
MSLPRVYFDIAAGGEKLGRIVMELRSDVVPKTAENFRALCTGEKGYGYKGSPFHRVIPNFMCQGGDFTNQNGTGGRSIYGNKFPDENFELKHTGAGVLSMANAGANTNGSQFFICTGKTTWLDNKHVVFGKVVEGMDIVQKVESYGSQDGKTSKKVIIEDCGAL

SEQ ID NO: 814 - DNA, 594 bp, Staphylococcus epidermidis ATCC 12228
  CDS (1)..(594): transl_table=11
atgacgaactatcctcagttaaataaagagattcaagataacgaaattaaagtagttatgcatacaaataaaggtgacatgacatttaaattatttcccgacattgctccaaagacagttgaaaactttgtgacacattcaaaaaatggatactacgatggtgtaacgttccaccgtgttatcaatgattttatggtacaaggcggggacccaactgcaactggtatgggcggagaaagtatttatggtagtgcttttgaagatgaattttctctagaagcttttaacctttacggtgcattatcaatggctaatgcaggtcctaatacaaatggatctcaattctttattgtccaaatgaaggaagtgcctgaaaatatgttaagtcaattagcagatggtggatggcctcaacctattgtagaagcatatggtgaaaaaggtggtacgccttggttagatcaaaaacatacagtatttggtcaacttattgagggtgaatcaactttagaagatattgcaaatactaaagttggtgctcaagacaaacctgtttatgatgtagtcattgaatcgatagatgtagaagaataa

SEQ ID NO: 815 - protein, 197 aa, Staphylococcus epidermidis ATCC 12228
MTNYPQLNKEIQDNEIKVVMHTNKGDMTFKLFPDIAPKTVENFVTHSKNGYYDGVTFHRVINDFMVQGGDPTATGMGGESIYGSAFEDEFSLEAFNLYGALSMANAGPNTNGSQFFIVQMKEVPENMLSQLADGGWPQPIVEAYGEKGGTPWLDQKHTVFGQLIEGESTLEDIANTKVGAQDKPVYDVVIESIDVEE

SEQ ID NO: 816 - DNA, 624 bp, Rhodopirellula baltica SH 1
  CDS (1)..(624): transl_table=11
atgactgttcgtgctttcgttttgtcgctggttggaatcgcaaccttcggtttgactgcaggccccgcctcctcgacttccgcggctgatccagccaaaggcgaggttactcataaagtctatttcgatgtctcaatcggcagcgagccagcgggacgcatcgtcttggggttgttcggcaaggacgtccccaaaacagccgagaacttccgtgcactgtcgaccggggaaaaaggcgaaggaaaattgggcgtgcctctggatttcgaaggcagcgcatttcaccgcgtgattcccggattcatgcttcagggcggcgacttcaccgccggcaacggaaccggtggtgaaagcatttatgggatgaagtttgccgacgaaaacttcaaattccaacacacgacccctggtctgctgagcatggcaaacagtggtcgtaacaccaatggttcacaattctttatcaccgtcgctccaaccccgtggttggacggaaaacacgtcgttttcgggcgagtgattgagggcatggatgtcgtcaagaaaattgaagctcaaggcagtggatcgggccagactcgtaagttgatcaagatcaccgaagccggcgaagttaaagagtaa

SEQ ID NO: 817 - protein, 207 aa, Rhodopirellula baltica SH 1
MTVRAFVLSLVGIATFGLTAGPASSTSAADPAKGEVTHKVYFDVSIGSEPAGRIVLGLFGKDVPKTAENFRALSTGEKGEGKLGVPLDFEGSAFHRVIPGFMLQGGDFTAGNGTGGESIYGMKFADENFKFQHTTPGLLSMANSGRNTNGSQFFITVAPTPWLDGKHVVFGRVIEGMDVVKKIEAQGSGSGQTRKLIKITEAGEVKE

SEQ ID NO: 818 - DNA, 588 bp, Lactobacillus johnsonii NCC 533
  CDS (1)..(588): transl_table=11
atggaatatccacaattagaccttgaaaatgtaaaaggtccaaaagcagtaattaaaactaatcatggagatattaaagttcaattatttgaaaaagatgctccaatgactgtagaaaattttgttcgtttagctaaaaagggttactatgataatactacttttcatcgtgtaattagtgactttatgatccaaggtggtgatccaaagggtgacggtactggcggtgagagtatctggggacatccttttgaagatgagttttcaaataaactctttaacttacgtggtgcactttccatggctaattctggtcctaatactaatggtagtcaattctttattgttcaaaataagaatgtgcctaaacgaatgattaaggaaatggatgcagctggctatccaaaagaaattgtaaaagcatataaacagggtggaaccccatggttagatggtcgtcatacagtttttggtcaagtaattgatggtatggatgtcgttgatgaaattgcaaaggttccacgtgataaggcaaatgataagcctaaagaagatgtaattattaagaacattcagattgaagattaa

SEQ ID NO: 819 - protein, 195 aa, Lactobacillus johnsonii NCC 533
MEYPQLDLENVKGPKAVIKTNHGDIKVQLFEKDAPMTVENFVRLAKKGYYDNTTFHRVISDFMIQGGDPKGDGTGGESIWGHPFEDEFSNKLFNLRGALSMANSGPNTNGSQFFIVQNKNVPKRMIKEMDAAGYPKEIVKAYKQGGTPWLDGRHTVFGQVIDGMDVVDEIAKVPRDKANDKPKEDVIIKNIQIED

SEQ ID NO: 820 - DNA, 636 bp, Bdellovibrio bacteriovorus HD100
  CDS (1)..(636): transl_table=11
atgtcgaagaatatcgatgttaagaaggtattttggatctacctttttgcattcctattggcagctttcagcttccgcgcagatgcaaagaccgaatccaaggcaaaggctacgaagaagggaaaagacatgatcgcagtatttgagacatctaaaggcactttcaaagtaaaacttttcgcagataaagcgccgaaaacagtagaaaacatcgtgggcctgatcgaaggcaccaaagaatggactgatcctaaaactggcgagaaagtgaagaagccattctatgatggtctgactttccaccgcgtgatcaaagatttcatgattcagggtggttgcccacttggaactggaactggcggcccaggcttccgtttcgaagatgagttcccagctggcgctccgaaacacgacaaaccaggcatcctttccatggcgaacgcgggtcctaacaccaatggttcccagttcttcgtaacaactgttccaactccttggttggatggccgtcacacggtgttcggtgaagttgttgaaggtatggacgtggttaaatccatcgagaactccaaaacaggagctatggatcgcccggttgaaccaatcgtgatcaaacacgtaacgatccagaagtaa

SEQ ID NO: 821 - protein, 211 aa, Bdellovibrio bacteriovorus HD100
MSKNIDVKKVFWIYLFAFLLAAFSFRADAKTESKAKATKKGKDMIAVFETSKGTFKVKLFADKAPKTVENIVGLIEGTKEWTDPKTGEKVKKPFYDGLTFHRVIKDFMIQGGCPLGTGTGGPGFRFEDEFPAGAPKHDKPGILSMANAGPNTNGSQFFVTTVPTPWLDGRHTVFGEVVEGMDVVKSIENSKTGAMDRPVEPIVIKHVTIQK

SEQ ID NO: 822 - DNA, 1110 bp, Ashbya gossypii ATCC 10895
  CDS (1)..(1110)
atgaccgaaagacagaagacgtactttgacttgagcatcggaggcaagcccgcgggccgcgtcgtgttcgaggtgtacagcgacgtgacgcccaagaccgcggaaaactttgtccggctgtgcgcgggcgacgcgggcgagtgtcgcaccaagcccggcgtaccgctctgctaccagggctcgctgttccaccgcgtgatcaagggcttcatgtgccagttcggcgacttcaccaacggcgacggcacgggtggcgagtccatctacggcgagaagttcgaggacgagaacttcgcgcgcaagcacgaccggccgttcctgctgtcgatggccaacgccggccccaacaccaacggctcgcagtgcttcatcacgtgcgcgcccacgccgcacctggacggcaagcacgtcgtgttcggcgaggtgatccagggcaagcgcgtcgtgcgcgccatcgagcgccaggagaccgccgcggaccgtccgcttgcggacgtccgcatcgacgcctgcggcatcctgcctgcgtcctacgaggtgcccgcggacgccgaggctacgcccgcagacgagtacggcgacgactacgaggagaccctggccgacgacgcgaaggtcgacctggccgacccccgcagcgtcatccgcgccgttgaggccgtcaaggccatcggcaccgcacagctccaggctgcccgcttcgacgttgccgtccagaagtacgccaaggccgccggcttcctgcaggagtacttcccggacgacctgccggacgcagatgtcgccgcgctcgagcagctcaaggtcgccgtccacctcaacctcgcgctggccgccctgaaggccggcaaccaccagcgcgtgctctccgccgcctccgaggtcctgcacggcgccgcggacgacaaggccaaggccaaggcactctaccgccgcggcctggcataccaccacctcaaggacccggagatggccctcaccgacctcgagctcgccgccacctaccagccgggcgacgccggcattgcgcaggccatcgtcaacgcccgcgcgctgaagcagaagctgcgcgagcagcagaaaaaggccctttccaagatgttcagctga

SEQ ID NO: 823 - protein, 369 aa, Ashbya gossypii ATCC 10895
MTERQKTYFDLSIGGKPAGRVVFEVYSDVTPKTAENFVRLCAGDAGECRTKPGVPLCYQGSLFHRVIKGFMCQFGDFTNGDGTGGESIYGEKFEDENFARKHDRPFLLSMANAGPNTNGSQCFITCAPTPHLDGKHVVFGEVIQGKRVVRAIERQETAADRPLADVRIDACGILPASYEVPADAEATPADEYGDDYEETLADDAKVDLADPRSVIRAVEAVKAIGTAQLQAARFDVAVQKYAKAAGFLQEYFPDDLPDADVAALEQLKVAVHLNLALAALKAGNHQRVLSAASEVLHGAADDKAKAKALYRRGLAYHHLKDPEMALTDLELAATYQPGDAGIAQAIVNARALKQKLREQQKKALSKMFS

SEQ ID NO: 824 - DNA, 567 bp, Ashbya gossypii ATCC 10895
  CDS (1)..(567)
atgcttgctaactcctccagatccctgctaccttcttccagaagactattctcgtcatctgctgccagtctaggtaccaaggtgttctttgacacctccattaacggcgccaaggccggccgtatcgagttcgaactctacgatgacgtcgtcccaaagacagcggagaacttccgcgctctgtgtaccggcgagaagggttggggctacaagggcgtcccattccaccggatcatcccagacttcatgttgcagggcggtgacacggacctcaccaacggcttcggcggaaagtccatctacggcgcccgcttcccagacgagaacttcaccaagaagcacacgcgggccggcctgctctccatggccaacgcgggccggaacaccaacgggtcccagttcttcatcaccaccgtgccctgcccatggcttgacgggaagcacgtggtgttcggcgaggtcaccaagggtatggatgtcgtgaaggccattgagtcctacggcaccggcaacggccagccaagcgctaaggttgtcatcgaggacgctggtgagctcaaagaataa

SEQ ID NO: 825 - protein, 188 aa, Ashbya gossypii ATCC 10895
MLANSSRSLLPSSRRLFSSSAASLGTKVFFDTSINGAKAGRIEFELYDDVVPKTAENFRALCTGEKGWGYKGVPFHRIIPDFMLQGGDTDLTNGFGGKSIYGARFPDENFTKKHTRAGLLSMANAGRNTNGSQFFITTVPCPWLDGKHVVFGEVTKGMDVVKAIESYGTGNGQPSAKVVIEDAGELKE

SEQ ID NO: 826 - DNA, 489 bp, Ashbya gossypii ATCC 10895
  CDS (1)..(489)
atgtctaaggtgtttttcgatgtggaggccgatggccagccattgggcagaattgtgttccagttgtacaacgacgtgactccaaagactgcggagaacttcagagcgctatgcactggcgagaagggtttcgggtacgctggctgcccattccacagagtcatccctgacttcatgttgcagggcggtgacttcactcacgggaccggcgtgggcggcaagtcgatctacggcggcaagttcccagacgagaacttcgtcaagaagcacgagaagccaggtttgttgtcgatggccaacgcgggccccaacaccaacggctcccagttcttcatcacgactgtgccatgtccatggttgaacggtaagcacgttgtgttcggcgaggtgagcgagggtatggacgttgtcaagaaggtggagtccatggggtcctcttctggcgcgacccgtgctagaatcgtgatctccaagtcgggtgaattgtaa

SEQ ID NO: 827 - protein, 162 aa, Ashbya gossypii ATCC 10895
MSKVFFDVEADGQPLGRIVFQLYNDVTPKTAENFRALCTGEKGFGYAGCPFHRVIPDFMLQGGDFTHGTGVGGKSIYGGKFPDENFVKKHEKPGLLSMANAGPNTNGSQFFITTVPCPWLNGKHVVFGEVSEGMDVVKKVESMGSSSGATRARIVISKSGEL

SEQ ID NO: 828 - DNA, 609 bp, Aspergillus terreus NIH2624
  CDS (1)..(609)
atgaacttcaagaatattttcctgtccttcttccttgtcctggccgtgggactggccctggtcaatgccgaacaggcgaaggagccccgtggtcctaagatcaccaacaaggtgtactttgatattgagcatggtgacaagcctctgggccgcattgtgcttgggtttgctctggccactggcgaaaagggatttggctatcagggctctaccttccaccgtgtcatcaagaacttcatgattcagggtggtgacttcacccgcggcgatggcaccggcggcaagtccatctatggcaacaagttcgaggacgagaacttcaagatccggcacacccgcaagggtctccttagcatggccaacgctggcaaggacaccaacggatcccagttcttcatcaccaccgttcctacctcttggctggacggccgtcacgtcgtgttcggcgaggtccttgaaggctacgagattgttgaggccatcgagaacgtgcccaagggccccggtgacaagccccagcaggtggtgaagattgtgaagagtggcgagctcgagactgagtctgaggcggaggcagaggacaaaggtaccccacacgaggagctgtag

SEQ ID NO: 829 - protein, 202 aa, Aspergillus terreus NIH2624
MNFKNIFLSFFLVLAVGLALVNAEQAKEPRGPKITNKVYFDIEHGDKPLGRIVLGFALATGEKGFGYQGSTFHRVIKNFMIQGGDFTRGDGTGGKSIYGNKFEDENFKIRHTRKGLLSMANAGKDTNGSQFFITTVPTSWLDGRHVVFGEVLEGYEIVEAIENVPKGPGDKPQQVVKIVKSGELETESEAEAEDKGTPHEEL

SEQ ID NO: 830 - DNA, 519 bp, Aspergillus terreus NIH2624
  CDS (1)..(519)
atggcctccaccgcttggttcgacatccagtacgcccccgtgggctctagcacccccaagactggccgcgtcaacttcaagctcttcaacgacgttgtccccaagactgccgcgaacttcgctgagctctgcaagaagccccagggcgagggttacaagggctccagcttccaccgtatcatcccccagttcatgctccagggtggtgacttcactcgcggcaacggcaccggtggtcgttccatctacggcgagaagttcgccgatgagaacttccagctcaagcacaccaagcctggtatcctctccatggctaacgctggccccaacaccaacggctctcagttcttcatcaccaccgttgtgacctcctggctcgacggcaagcacgtcgtcttcggcgaggttgccgacgatgcctccatgcaggttgtcaaggagatcgaggctcttggcagctccagcggctctgtccgctctgctgtcaagcccacgatcgtcgactgcggcagcgcttaa

SEQ ID NO: 831 - protein, 172 aa, Aspergillus terreus NIH2624
MASTAWFDIQYAPVGSSTPKTGRVNFKLFNDVVPKTAANFAELCKKPQGEGYKGSSFHRIIPQFMLQGGDFTRGNGTGGRSIYGEKFADENFQLKHTKPGILSMANAGPNTNGSQFFITTVVTSWLDGKHVVFGEVADDASMQVVKEIEALGSSSGSVRSAVKPTIVDCGSA

SEQ ID NO: 832 - DNA, 624 bp, Chaetomium globosum CBS 148.51
  CDS (1)..(624)
atgctcaaccttaagaagatcttcgtcgccgcctccctgatggtgggcgcgaccatgatgtttgcgcagcctgccgccgccgctaagggtcccaagatcacccacaaggtctacttcgacattcagcacggcgatgaggcgcttggccgtgtcgttatgggcctctacggaaagaccgtccccgagacggccgagaacttccgtgctctggctactggcgagaagggcttcggttatgagggttccaccttccaccgcgtgatcaagcagttcatgatccagggcggtgacttcaccaagggtgatggaaccggtggcaagtcgatttacggcgacaagttccccgatgagaacttcaagctcaagcacaccaagaaaggcctgctctccatggccaacgcgggcaaggacaccaacggctctcagttcttcattaccactgttgtcacttcttggctcgatggccgtcacgttgtcttcggcgaggtcctcgagggctacgacgtcgtcgagaagatcgagaacgtcgataccgcaccgggcgataagccagttcagactgtcaagattgccaagagcggcgagttggaggtccctcctgaaggtatccacgtggagctctaa

SEQ ID NO: 833 - protein, 207 aa, Chaetomium globosum CBS 148.51
MLNLKKIFVAASLMVGATMMFAQPAAAAKGPKITHKVYFDIQHGDEALGRVVMGLYGKTVPETAENFRALATGEKGFGYEGSTFHRVIKQFMIQGGDFTKGDGTGGKSIYGDKFPDENFKLKHTKKGLLSMANAGKDTNGSQFFITTVVTSWLDGRHVVFGEVLEGYDVVEKIENVDTAPGDKPVQTVKIAKSGELEVPPEGIHVEL

SEQ ID NO: 834 - DNA, 1125 bp, Chaetomium globosum CBS 148.51
  CDS (1)..(1125)
atgagcaccgacgaggcgaagcaggctcgcagccgcgtcttcttcgatatcaccattggcgggcagtccgctggtcgcgtgacgttcgagctgttcaatgacattgttcccaagacggctgagaacttccgtgctctgtgcactggcgagaagggcatcggtaaggccggcaagcccttgcacttcaaaggctcagccttccaccgcgtcatcaaacagtttatgatccagggcggtgattttactgctggcaatggcaccggcggcgaatctatctacggtgccaaattcgccgacgagaacttcgagctgaagcacgaccgtcctttccttctatccatggctaatgccggcccgggaaccaatggctcccaattcttcgttaccacagttgctaccccccatctcgacagcaagcacgtcgtcttcggagaagttctcagcggcaagtccgtcgtgcgccaaattgaaaacctccgaacccagagcgacaaacccatcaaggatgcggttattgccgactgtggcgagctgtcgccgtcggaagctgttgctgccgacattaaagcccccgatgcctacggcgatgactacgaggatttccccgaggaccaaacgaccggcgacgaacccctctctgcctccaagatcgccaagattgcgagcgactgcaaggatttcggcaacaaggcgtttaaggcaggcgacttcagtgttgctcttgacaagtatcagaagggcctgcgatacttgaacgaggatcccgacctggataacgaacccgccgagacgaaggagaaattagacgcactgcgcatgagcctgaatagcaatgctgcgctgatgaatatcaagctctgtgcgtgggacgaaactatccgggccgcggaaagtggccttgccgtccccaagatctcggacaaggacaaggccaagttactctatcgccgcggcgtcgcgctcgtgcggctgaaggatgaagatgccgcgctcgagagtcttgagcaggcgaagaagctcaaccctgaggatgcggccatcaatgccgagttgaactcggtgaagaaagccgctgcggctagactggctaaggagaaggctgcctactccaagttcttcagctaa

SEQ ID NO: 835 - protein, 374 aa, Chaetomium globosum CBS 148.51
MSTDEAKQARSRVFFDITIGGQSAGRVTFELFNDIVPKTAENFRALCTGEKGIGKAGKPLHFKGSAFHRVIKQFMIQGGDFTAGNGTGGESIYGAKFADENFELKHDRPFLLSMANAGPGTNGSQFFVTTVATPHLDSKHVVFGEVLSGKSVVRQIENLRTQSDKPIKDAVIADCGELSPSEAVAADIKAPDAYGDDYEDFPEDQTTGDEPLSASKIAKIASDCKDFGNKAFKAGDFSVALDKYQKGLRYLNEDPDLDNEPAETKEKLDALRMSLNSNAALMNIKLCAWDETIRAAESGLAVPKISDKDKAKLLYRRGVALVRLKDEDAALESLEQAKKLNPEDAAINAELNSVKKAAAARLAKEKAAYSKFFS

SEQ ID NO: 836 - DNA, 714 bp, Coccidioides immitis RS
  CDS (1)..(714)
atgcccctccttgcgcgctgccccaccttgctctctgctaccccgcctctggtcacttcgtctacaagtgctgctctctcccgctctcttcctcgttattcttcttcctctcttcgacccattgctcgtccttccatcaatctctccaccaagaacaactcccaattctctcgacagtttcacgcttcctccgcagccatgacgatcaagactttcttcgacgtcgaatacaccgatctctcgggggctaagaagactgagcggatcgtcttcaacctcttcgatgaggatgtcccaaagactgcggagaacttccgtgctctctgcaccggcgagaagggcttcggatacaagggttcttctttccacagaatcatccccaagttcatgcttcagggcggtgacttcactcgcggcaatggcactggtggcaagtccatctacggtgacaagttcgccgatgagaacttcaagcgcacccacaccggccctggtatcctgtccatggctaatgccggccctaacaccaacggctctcaattcttcatcaccaccgagaagactagctggcttgacggcaagcacgtcgtcttcggtgaagttgccaaccctgagtccctgcaggctgtcatgaacatcgaaaagactggcagcagctccggcgccatcaccaccaagaccaagccaaccatcgtcgactgcggtcagctctaa

SEQ ID NO: 837 - protein, 237 aa, Coccidioides immitis RS
MPLLARCPTLLSATPPLVTSSTSAALSRSLPRYSSSSLRPIARPSINLSTKNNSQFSRQFHASSAAMTIKTFFDVEYTDLSGAKKTERIVFNLFDEDVPKTAENFRALCTGEKGFGYKGSSFHRIIPKFMLQGGDFTRGNGTGGKSIYGDKFADENFKRTHTGPGILSMANAGPNTNGSQFFITTEKTSWLDGKHVVFGEVANPESLQAVMNIEKTGSSSGAITTKTKPTIVDCGQL

SEQ ID NO: 838 - DNA, 516 bp, Neosartorya fischeri NRRL 181
  CDS (1)..(516)
atgtctcaggtcttcttcgacgtcgagtacgcccctgtgggcaccgctgaaaccaaggtcggccgtattgtattcaacctcttcgataatgatgtccccaagacagccaagaacttccgtgagctctgcaagagacctgctggtgaaggctacagggagtctaccttccaccgcatcatccccaacttcatgctccagggtggtgacttcactcgtggcaatggcactggtggtcgctctatctacggcgacaaatttgccgacgagaacttcagccgcaagcacgacaagaagggtatcctctccatggccaacgctggtcctaacaccaacggctctcagttcttcatcaccacggctgtgacttcctggctcgatggcaagcacgttgtctttggtgaagttgcggatgagaagtcctacagcgtcgtcaaggagatcgaggctctcggaagcagcagcggttctgtccgttccaacactcgtcccaagatcgtcaactgtggtgagctgtaa

SEQ ID NO: 839 - protein, 171 aa, Neosartorya fischeri NRRL 181
MSQVFFDVEYAPVGTAETKVGRIVFNLFDNDVPKTAKNFRELCKRPAGEGYRESTFHRIIPNFMLQGGDFTRGNGTGGRSIYGDKFADENFSRKHDKKGILSMANAGPNTNGSQFFITTAVTSWLDGKHVVFGEVADEKSYSVVKEIEALGSSSGSVRSNTRPKIVNCGEL

SEQ ID NO: 840 - DNA, 453 bp, Neosartorya fischeri NRRL 181
  CDS (1)..(453)
atggagttattcgcagatgtcactcctcggacagccgaaaatttccgcagattctgcacaggtgaaagcaaaaactcccaaggaaagccacaaggatacaagaacagcaagttccaccgagtaatcaaagattttatgatacaaggaggcgattttgtcaatggagatggaacaggatcttgtaccatttatggcacccccaaattcccagatgagaactttgtcttgaagcacgaccgcgcaggtctcttaagcatggctaactctgggccaaatacaaatggctgccagttcttcataacaactacagcgactccattcttgaatgggaagcatgtcgtgtttgggcaggtagtggatggcatggatatcgtgcggatgatcgaaaatacacgcacaattagggacaagccaagccaagatgtgatcattacacaatgcggagagatgtga

SEQ ID NO: 841 - protein, 150 aa, Neosartorya fischeri NRRL 181
MELFADVTPRTAENFRRFCTGESKNSQGKPQGYKNSKFHRVIKDFMIQGGDFVNGDGTGSCTIYGTPKFPDENFVLKHDRAGLLSMANSGPNTNGCQFFITTTATPFLNGKHVVFGQVVDGMDIVRMIENTRTIRDKPSQDVIITQCGEM

SEQ ID NO: 842 - DNA, 492 bp, Neosartorya fischeri NRRL 181
  CDS (1)..(492)
atggttgtcaagactttcttcgatatcgccattgacggccagccggctggccgcatcaccttcaagctgttcgacgaagtcgtccccaagaccgctgagaacttccgtgctctctgcactggtgagaagggattcggttacaagggttctagcttccaccgcatcatcccccagttcatgctccagggtggcgacttcaccaagggcaacggcactggtggcaagtccatctacggcgagaagttcgcggatgagaacttccagctgaagcacgacaagcccggtctgctctccatggccaacgccggcaggaacaccaacggctcccagttcttcatcaccaccgtcgttaccgactggcttaacggcgctcacgtcgtcttcggtgaggtcgaggagggcatggaccttgtcaagaagattgagagctacggcagctcgtccggtacccccaagaagaagattaccattgccgactgcggtcagctgtaa

SEQ ID NO: 843 - protein, 163 aa, Neosartorya fischeri NRRL 181
MVVKTFFDIAIDGQPAGRITFKLFDEVVPKTAENFRALCTGEKGFGYKGSSFHRIIPQFMLQGGDFTKGNGTGGKSIYGEKFADENFQLKHDKPGLLSMANAGRNTNGSQFFITTVVTDWLNGAHVVFGEVEEGMDLVKKIESYGSSSGTPKKKITIADCGQL

SEQ ID NO: 844 - DNA, 492 bp, Aspergillus clavatus NRRL 1
  CDS (1)..(492)
atgggtgtcaagactttcttcgatattgccattgatggcgcccccgctggccgcatcaccttcaacctcttcgatgatgttgtccccaagaccgccgagaacttccgcgctctctgcaccggcgagaagggcttcggctacaagggctctgccttccaccgtgtcatcccccagttcatgctccagggtggtgacttcacccgtggcaacggcactggtggcaagtccatctacggcgagaagttcgccgatgagaacttcaccctgaagcacaacaagcccggtctgctctccatggccaacgctggcaagaacaccaacggctcccagttcttcatcaccaccgtcgttacatcgtggctcgatggcgctcacgtcgtcttcggcgaggttgaggacggcatggacctcgtcaagaagatcgagggtcttggcacctcgtctggcactaccaagaagaagatcgtcattgagaactgcggccagctgtaa

SEQ ID NO: 845 - protein, 163 aa, Aspergillus clavatus NRRL 1
MGVKTFFDIAIDGAPAGRITFNLFDDVVPKTAENFRALCTGEKGFGYKGSAFHRVIPQFMLQGGDFTRGNGTGGKSIYGEKFADENFTLKHNKPGLLSMANAGKNTNGSQFFITTVVTSWLDGAHVVFGEVEDGMDLVKKIEGLGTSSGTTKKKIVIENCGQL

SEQ ID NO: 846 - DNA, 552 bp, Drosophila pseudoobscura pseudoobscura
  CDS (1)..(552)
atgcccaactggaaccaaattcagtcccagctgcgcagctccaacaacccagttgtatttttcgacattgccgtgggcacaaccgaaatcggccgcatgatcttcgagctgtttgctgatacagtgccgcggacagcagaaaactttcgacaattctgcacaggagagtatcggccagatggtgtgcctattggttacaagggcgcaagcttccacagagtaattaaagatttcatgatacaaggcggagactttgtccagggcgatggcaccggcgtcacctgcatctatggcaacacatttggcgatgagaactttaccttgaagcacgactcacctggcctgctggccatggccaacagcggcaaagacaccaatggctgccagttcttcattacctgtgccaaatgcaacttccttgatggcaagcatgtggtatttggacgcgtacttgacggcctgctgataatgcgaaagattgaaaatgttcccacggggcccaacaacaagcccaagcttccagtgacgatttcgcaatgtggacagatgtag

SEQ ID NO: 847 - protein, 183 aa, Drosophila pseudoobscura pseudoobscura
MPNWNQIQSQLRSSNNPVVFFDIAVGTTEIGRMIFELFADTVPRTAENFRQFCTGEYRPDGVPIGYKGASFHRVIKDFMIQGGDFVQGDGTGVTCIYGNTFGDENFTLKHDSPGLLAMANSGKDTNGCQFFITCAKCNFLDGKHVVFGRVLDGLLIMRKIENVPTGPNNKPKLPVTISQCGQM

SEQ ID NO: 848 - DNA, 528 bp, Pichia stipitis CBS 6054
  CDS (1)..(528): transl_table=12
atggaaaacccagtcgtgttttttgacatcaacatcgatgaccaaccgttggggagggtcaaaatcgagctttatgctgatcaattgccaagaacatcagagaatttccgtcagttctgcacaggtgagtacagagagctcggtgtgccgataggatacaaaggatgtggcttccaccgagtcatcaagggatttatgatccaaggaggagactttgtcagagggaacgggttgggaaccaaaaccatttacggcaaggaatcatttgcagacgaggctttcacgtatgatctactaacattattagataagaaatacagtgtgtcaatggccaactctgggccaaactccaacggatgccagttctttatctgctgtaaagacacaccacatctcgatggaaaacatgttgtgtttggacaagtaattgaaggttttgaaattgtggacaagatcgagaacatcaacgtggatgccaatgacaaaccgaaacagaacgtagttatcgccgagtgtggcgagatgtaa

SEQ ID NO: 849 - protein, 175 aa, Pichia stipitis CBS 6054
MENPVVFFDINIDDQPLGRVKIELYADQLPRTSENFRQFCTGEYRELGVPIGYKGCGFHRVIKGFMIQGGDFVRGNGLGTKTIYGKESFADEAFTYDLLTLLDKKYSVSMANSGPNSNGCQFFICCKDTPHLDGKHVVFGQVIEGFEIVDKIENINVDANDKPKQNVVIAECGEM

SEQ ID NO: 850 - DNA, 1119 bp, Aspergillus niger CBS 513.88
  CDS (1)..(1119)
atggccgagtctcagcgccgcccccgtgttttcttcgacatccagatcggtaaacagcagaccggtcgcattgctcttgaactgcaaatagtcgttcccaagaccgcggagaatttccgggctctgtgcactggcgaaaagggcatgggcaagcagggcaagccattgcacttcaaaggctccattttccaccgtgtcatcaagcagttcatgatccagggtggtgacttcaccgcgttcaacggcacgggcggcgagtcgatctatggagagaaattccccgacgagaacttcgaccttaagcatgaccgccccttccttctctccatggccaactccggccccggcaccaacggcagtcagttcttcatcacaaccgtgcccaccccccacctggatggcaagcacgttgtcttcggtgaggtgatcaacggcaagagcgttgtccgcaaggtcgagaatatgtctacccaggccgacaagcccaccaccgatgtcactatcgtcgactgcggagagctcaccggtgacgagtacgaaaacgctgataagcagatccccgatgcgactggcgatccttatgaggacttccccgatgaccaccagggcgaggagctgagcgcacctgtctgctttaagatcgcttctgagctcaagaacttcggcaacaccgctttcaagagcggaaacctgaccctcggtctcgagaagtaccagaagggtttgcgttatctcaacgagttccctgagcccgatgagcaggaccccaaggatctggacccccagatgaaggccctccgcttcactctgcactcgaactcatctctgcttgctaacaagcttggtcagttcaagaacggccagacctgggctacctatgctctcgaaacggctgctgctgcgaacgccaaggatgccgacaaggccaaggcttactaccgccgcgcggtggcctacagcggtctgaaggaggaggacgaggctctcaaggatctccaggaggcctctcagctggctcctggtgatgctggcattaccaacgagattgcccgggtcaagaaggccgtcaaggaccgccaggctcgcgagagggctaccgctcagaagttcttctcgtga

SEQ ID NO: 851 - protein, 372 aa, Aspergillus niger CBS 513.88
MAESQRRPRVFFDIQIGKQQTGRIALELQIVVPKTAENFRALCTGEKGMGKQGKPLHFKGSIFHRVIKQFMIQGGDFTAFNGTGGESIYGEKFPDENFDLKHDRPFLLSMANSGPGTNGSQFFITTVPTPHLDGKHVVFGEVINGKSVVRKVENMSTQADKPTTDVTIVDCGELTGDEYENADKQIPDATGDPYEDFPDDHQGEELSAPVCFKIASELKNFGNTAFKSGNLTLGLEKYQKGLRYLNEFPEPDEQDPKDLDPQMKALRFTLHSNSSLLANKLGQFKNGQTWATYALETAAAANAKDADKAKAYYRRAVAYSGLKEEDEALKDLQEASQLAPGDAGITNEIARVKKAVKDRQARERATAQKFFS

SEQ ID NO: 852 - DNA, 525 bp, Aspergillus niger CBS 513.88
  CDS (1)..(525)
atgtctggaaacaccaaggccttctttgatatccagtacgcccccgtgggctccagcgcccccaagacgggccgtgtcgtcttcaacctcttcgagaaggacgtccccaagactgctaagaacttccgtgagctctgcaagcttccccagggtcagggttacaagggctctaccttccaccgtgtcatcccccagttcatgctccagggtggtgacttcacccgccacaacggtaccggtggtcgctccatctacggtgagaagttcgccgatgagaacttcatctacaagcacaacaagcccggtctcctctccatggccaacgctggtcccaacaccaacggctcccagttcttcatcaccaccgttgtcacctcttggctcgatggcaagcacgtcgtcttcggtgaggttgccgatgccgagtccatgcaggtcgtgaaggagatcgaggctctcggctcctcctccggctccgtccgctctgccgtcaagcccaccatcgtcgactgcggtgagttgtaa

SEQ ID NO: 853 - protein, 174 aa, Aspergillus niger CBS 513.88
MSGNTKAFFDIQYAPVGSSAPKTGRVVFNLFEKDVPKTAKNFRELCKLPQGQGYKGSTFHRVIPQFMLQGGDFTRHNGTGGRSIYGEKFADENFIYKHNKPGLLSMANAGPNTNGSQFFITTVVTSWLDGKHVVFGEVADAESMQVVKEIEALGSSSGSVRSAVKPTIVDCGEL

SEQ ID NO: 854 - DNA, 546 bp, Aspergillus niger CBS 513.88
  CDS (1)..(546)
atgaacagcgcaacttcaacctcgcacatagacagaaaccctgtggttttctttgatatagccttaggaggcgagcctttaggtcgtataaaaatggaactatttgccgatgttacgccccgaacagcagagaatttccgccagttctgtacaggagaatgtaaaaatgcacagggacgaccacaaggatacaaaaacagcaaattccatcgggtaatcaaagatttcatgatccaaggtggcgacttcgttaatggagatgggtcgggatcttgtaccatttacggcaccccaaggttctcagatgaaaatttccttctgaagcatgaccatgctggcctgcttagtatggcaaattctggtccgaacacaaatggatgtcagtttttcataacaacaactgcaaccccatttttgaatggcaagcatgttgtttttggtaaggtggtggaagggatggacgttgtacggatgattgagaacactagaacgacgcgagataagcccaaccaagatgttctgattgtgcaatgtggggagatgtga

SEQ ID NO: 855 - protein, 181 aa, Aspergillus niger CBS 513.88
MNSATSTSHIDRNPVVFFDIALGGEPLGRIKMELFADVTPRTAENFRQFCTGECKNAQGRPQGYKNSKFHRVIKDFMIQGGDFVNGDGSGSCTIYGTPRFSDENFLLKHDHAGLLSMANSGPNTNGCQFFITTTATPFLNGKHVVFGKVVEGMDVVRMIENTRTTRDKPNQDVLIVQCGEM

SEQ ID NO: 856 - DNA, 546 bp, Ostreococcus lucimarinus CCE9901
  CDS (1)..(546)
atgtcgtggcacgatcgcgcgcgcgtcgactcgaatccggtggttttcttcgacgtgacgatcggcggcgcgagcgcggggcgggtgacgttcgagctcttcgccgacgtcgcgccgaagacgtgcgaaaacttcaggcagatgtgcgcgggggagtttcgctcgcgcgagggcgcgccgcgagggtacaaggggtgcgcgtttcatcgcgtgatcaaggatttcatgattcagggcggggacttcgtcaacggcgacggcacggggtgcgcgtcgatatacggatcgaagttcgacgacgaggcgttcgtcggcaggcacacgggtgcggggttgctgtcgagcgcgaacagcgggccggacacgaacgggtgccagttcttcgtgacgtgcgcgaagacggagtggttggacgataagcacgtggtgttcggacgcgtgctgggagacgggatgttggtgattagaaaggtggagaacgtggcgacggggggcgggaataagcccaagctgccgtgcgtgatcgcggagtgcggcgagatgtag

SEQ ID NO: 857 - protein, 181 aa, Ostreococcus lucimarinus CCE9901
MSWHDRARVDSNPVVFFDVTIGGASAGRVTFELFADVAPKTCENFRQMCAGEFRSREGAPRGYKGCAFHRVIKDFMIQGGDFVNGDGTGCASIYGSKFDDEAFVGRHTGAGLLSSANSGPDTNGCQFFVTCAKTEWLDDKHVVFGRVLGDGMLVIRKVENVATGGGNKPKLPCVIAECGEM

SEQ ID NO: 858 - DNA, 489 bp, Pichia guilliermondii ATCC 6260
  CDS (1)..(489): transl_table=12
atgacccaagtatactttgacatttctgctaacggctccaaattaggaagagtcaccttccaattgtacgatgatgtcgttcctaagaccactgaaaacttcagagctttgtgtactggtgaaaaaggtttcggttacgcccaatcttctttccacagagtaatccctcaattcatgttgcaaggaggtgatttcaccagaggtaacggtactggtggtaagtcgatctacggtgagaagtttgccgatgagaacttttccaaaaagcacaccaagccaggtttgttgtcgatggccaatgctggtcctaacaccaacggatcgcaatttttcatcaccactgttccttgcccatggttggacggcaaacacgttgtgtttggtgaggttgttgacggttacgacgttgtcaagaaggttgagtcttacggttctgactctggtgctaccaaggccaaggttgtgattgacgcttctggacaattgtaa

SEQ ID NO: 859 - protein, 162 aa, Pichia guilliermondii ATCC 6260
MTQVYFDISANGSKLGRVTFQLYDDVVPKTTENFRALCTGEKGFGYAQSSFHRVIPQFMLQGGDFTRGNGTGGKSIYGEKFADENFSKKHTKPGLLSMANAGPNTNGSQFFITTVPCPWLDGKHVVFGEVVDGYDVVKKVESYGSDSGATKAKVVIDASGQL

SEQ ID NO: 860 - DNA, 657 bp, Pichia guilliermondii ATCC 6260
  CDS (1)..(657): transl_table=12
atgcgttctgtcactttcattgccgttttaatcagtatcatctgggtcctttttgccaatgttcaggcaaaatcccctccacctgaaaacccacctataacagacaaagtttattttgaaattgtcgaagatgacaagccaattggaacaattaccatcggactttttggaactgttgtccccaaaaccgtcaaaaactttcgtgaattagctgcctcttccgactcttcttttggatatgttgattccattttccaccgtattattcctcagtttatgctccagggtggcgattttgagaccggtcagggatatggcggcaaatcgatttacggaggaaaattccccgatgaaaactttcaattgaagcatgaccgcaagtaccggttatcgatggcaaatgccggccgtgacaccaatgggtcacaattttttatcaccaccgaaaagacttcgtggttggacggaaaacacgttgtttttggtgaggttcttgatggatttgatgtggttgattatatggaaaaagtcaagaccagccgtggcgaccggccagtgaagacgctcaagattgccaagtcgagcgcagaaacggtggaaccagaaactgaaaacgaaaaggaaactgagaaggaaaacgaaaaggatgagttgtaa

SEQ ID NO: 861 - protein, 218 aa, Pichia guilliermondii ATCC 6260
MRSVTFIAVLISIIWVLFANVQAKSPPPENPPITDKVYFEIVEDDKPIGTITIGLFGTVVPKTVKNFRELAASSDSSFGYVDSIFHRIIPQFMLQGGDFETGQGYGGKSIYGGKFPDENFQLKHDRKYRLSMANAGRDTNGSQFFITTEKTSWLDGKHVVFGEVLDGFDVVDYMEKVKTSRGDRPVKTLKIAKSSAETVEPETENEKETEKENEKDEL

SEQ ID NO: 862 - DNA, 489 bp, Lodderomyces elongisporus NRRL YB-4239
  CDS (1)..(489)
atgaccaacacatactttaccgtttccgctaatggccaaccattgggtaccatcaagttcaagttgtacgatgatgttgttccaaagactgctgaaaactttagagctttgtctactggtgaaaagggttttggttacgctggctcaattttccaccgtgtgattcctcaattcatgttgcaaggtggtgatttcaccaaccacaatggtactggtggtaagtccatctatggtgctaagtttgctgatgagaacttcaccaagaagcacgacagaccaggtttgttgtctatggccaatgctggtccaaacaccaatggatcccaattcttcattaccactgtcccatgtccatggttagatggtaagcacgttgttttcggcgaagttactgatggtttcgacattgttaagaagattgagagctacggttcaggttcaggtgctaccaaggccaccatcaagattgaggaagctggtgtcttgtaa

SEQ ID NO: 863 - protein, 162 aa, Lodderomyces elongisporus NRRL YB-4239
MTNTYFTVSANGQPLGTIKFKLYDDVVPKTAENFRALSTGEKGFGYAGSIFHRVIPQFMLQGGDFTNHNGTGGKSIYGAKFADENFTKKHDRPGLLSMANAGPNTNGSQFFITTVPCPWLDGKHVVFGEVTDGFDIVKKIESYGSGSGATKATIKIEEAGVL

SEQ ID NO: 864 - DNA, 624 bp, Ajellomyces capsulatus NAm1
  CDS (1)..(624)
atggcgcctttgaagcgtcttttcttccttgcctctctagtcttcgtgggcatcatcctcttccttggaaagaatgcagaggctaaagggcccaagatcacccacaaggtttacttcgatattgaacatggagacaagccaatgggccggattgtagtcggactttatgggaagacagtccctaagactacggaaaatttccgcgcattggccacaggcgagaagggattcggttatgaaggctctaccttccaccgagttattaaggacttcatgattcaaggaggcgatttcaccaagggtgatggtactggtggaaagtccatctatggcgagaagttcgctgatgagaacttcaagctgcgacacaccaagaaaggcattttgagtatggccaatgcgggaaaggacaccaacggttctcaattcttcatcacaactgcggtcactagctggctcgatgggcgtcacgtcgtcttcggcgaggttctcgagggctacgaggtcgtcgataagatccaaaatatcgagaaagagcccggggatcgacccaaggatgccgtgaagatagccaagtccggggaactagcaatgaccgaggaagtgatatttgtcattctttag

SEQ ID NO: 865 - protein, 207 aa, Ajellomyces capsulatus NAm1
MAPLKRLFFLASLVFVGIILFLGKNAEAKGPKITHKVYFDIEHGDKPMGRIVVGLYGKTVPKTTENFRALATGEKGFGYEGSTFHRVIKDFMIQGGDFTKGDGTGGKSIYGEKFADENFKLRHTKKGILSMANAGKDTNGSQFFITTAVTSWLDGRHVVFGEVLEGYEVVDKIQNIEKEPGDRPKDAVKIAKSGELAMTEEVIFVIL

SEQ ID NO: 866 - DNA, 453 bp, Ajellomyces capsulatus NAm1
  CDS (1)..(453)
atggagctcttcgcagatgtcacacccaagacagcagagaacttccgccaattctgtaccggcgagagcaaaaatccccgcggccgaccgcaggggtacaagggctccaaatttcatcgagtgatcaaagactttatgattcagggtggcgattttataaacggcaatggcactggcagcgcaaccatatatggcactggcaagtttcctgacgaaaacttcaatctcacccatgaccgcccgggtcttctgagcatggctaactccggtccaaacaccaatggctgccaattcttcatcacaacaaccgccacaccatttctgaacagcaagcatgtcgttttcggccaggttcttgatggcatggacattgtgcgcatgattgagaacacacggacgacgagagacaagccaaatcaagatgtagtcattgcgcagtgtggggagatgtaa

SEQ ID NO: 867 - protein, 150 aa, Ajellomyces capsulatus NAm1
MELFADVTPKTAENFRQFCTGESKNPRGRPQGYKGSKFHRVIKDFMIQGGDFINGNGTGSATIYGTGKFPDENFNLTHDRPGLLSMANSGPNTNGCQFFITTTATPFLNSKHVVFGQVLDGMDIVRMIENTRTTRDKPNQDVVIAQCGEM

SEQ ID NO: 868 - DNA, 1116 bp, Botryotinia fuckeliana B05.10
  CDS (1)..(1116)
atgtctgctgaaggacccaaaccccgcagtcgagtcttcttcgacatttccattgggaaagaagctcaagggcgaatcacattcgaattgtacaatgatattactcccaaaactgcagaaaactttcgagctctttgcactggtgagaagggtgttggaaaggccggcaaacctctctcctacaagggctccggtttccatcgtgtgatcaagcaattcatgatccaaggaggtgatttcacagctggcaacggaactggcggagagagtatctacggtgtcaaattcgacgatgagaacttcgtagagaagcatgacagacctttcttactctcaatggccaatgctggtccaggaactaacggaagtcaattcttcattacaactgttccaactcctcatctcgatggcaaacacgtagttttcggtcaagtcctcagtggtaaaaatatcgtccgcaaagtcgagaacatgcccactcaaagtggtgacaagcccaacaaggaagtcgtcatcacagactgtggagagcttactggcgacgaagctgaatctgccgatacaaaggttcccgattctactggcgatacatacgaagacttcccagaagatatgtccactcctccaaccgcagaagaaaccgtcaaaatcgttaccgatcttaagacctacggaaacgccgccttcaaagataacaaactccctctcgccctcgacaagtacgagaaaggtctccgttacctcaacgaagacccagatgttacgtcctctccagccgaaacttcttccaccctctccgctctccgtttcaccctcaacagcaactctgctcttctccacaacaaacttaagaattttgccgatgccgaacgtactgctagtgccgctctcgcagtttctggtaccactgatactgataaagccaaagctctttaccgtcgcgcaatcgcacatgtaggactcaagaatgaagaagaagcactaaaggatctggaggaggccaacaaattggttcctggcgatgcggctgttgtaaaggaattatcaaccgtgaagaagaatgcattagagagagctaagaaggaaaaggctgcttatagcaagttcttcgcttag

SEQ ID NO: 869 - protein, 371 aa, Botryotinia fuckeliana B05.10
MSAEGPKPRSRVFFDISIGKEAQGRITFELYNDITPKTAENFRALCTGEKGVGKAGKPLSYKGSGFHRVIKQFMIQGGDFTAGNGTGGESIYGVKFDDENFVEKHDRPFLLSMANAGPGTNGSQFFITTVPTPHLDGKHVVFGQVLSGKNIVRKVENMPTQSGDKPNKEVVITDCGELTGDEAESADTKVPDSTGDTYEDFPEDMSTPPTAEETVKIVTDLKTYGNAAFKDNKLPLALDKYEKGLRYLNEDPDVTSSPAETSSTLSALRFTLNSNSALLHNKLKNFADAERTASAALAVSGTTDTDKAKALYRRAIAHVGLKNEEEALKDLEEANKLVPGDAAVVKELSTVKKNALERAKKEKAAYSKFFA

SEQ ID NO: 870 - DNA, 879 bp, Botryotinia fuckeliana B05.10
  CDS (1)..(879)
atgctcacacttcaacgttttgtagtctctgcactacttatcttaactgtcacctttctcttcttcgcccaaacggccgaagctgccaaaggacccaagattacccacaaggtctacttcgacatcagccatggcgatgaacccatgggtcgtgtcgttctaggtctttatggaaaaactgtccctgagactgccgagaacttcagagctttggcaactggcgagaagggattcggatatcaaggctctaccttccaccgtgttatcaagggtttcatgatccaaggaggtgatttcacaaagggtgatggaaccggaggcaaatcaatctacggagctaagttcccagatgagaactttaagttgaagcattccaagaaaggtcttctcagcatggccaacgccggaaaggataccaacggttcccaattcttcattactacttctactcctggtcatcttgatggtaaacacgtcgtctttggcgaagttttagagggatatgagatcgtcgaggcaattgaaaacgtaaagaagggaggatcagatagaccagttgaggctgtcaagatcactgagagcggggaattaccagtaccagaagaagatgaatacggtactgctgaatttcaacacggcatggaagaagtcgaaattcctcttacaccaaccgatccttcaactcccgctgctgccactgcagtcattccagttgttggtaccccaccaaaaaccgagacagaggaatttggctatgctgatgaggctggttacactcttttgcaaaaaggattgtttttggctgttattttaggatgtgttgccttctacgtacgaatgaatagaagaaacaagaagtttgagaggtcactcgtctag

SEQ ID NO: 871 - protein, 292 aa, Botryotinia fuckeliana B05.10
MLTLQRFVVSALLILTVTFLFFAQTAEAAKGPKITHKVYFDISHGDEPMGRVVLGLYGKTVPETAENFRALATGEKGFGYQGSTFHRVIKGFMIQGGDFTKGDGTGGKSIYGAKFPDENFKLKHSKKGLLSMANAGKDTNGSQFFITTSTPGHLDGKHVVFGEVLEGYEIVEAIENVKKGGSDRPVEAVKITESGELPVPEEDEYGTAEFQHGMEEVEIPLTPTDPSTPAAATAVIPVVGTPPKTETEEFGYADEAGYTLLQKGLFLAVILGCVAFYVRMNRRNKKFERSLV

SEQ ID NO: 872 - DNA, 747 bp, Botryotinia fuckeliana B05.10
  CDS (1)..(747)
atgttttcaacaacttctgccttccaatggcttcacaatgacacaaaaccaagatatatggcaccaccattttccacgccttctcagaagtatgcatacccatcaccaattctatcgtctgagggagacaactcttcgctctataatctcttaaagccttcattcttctcaatcacctcttcgttcccattcatccaatcctcgacttctaaccctgtagctgctctggccaagaccggagatgaggacaactcaagcaaaaactgcttctttgacataactgttgattctgctcccgcaggtcgcatcacattcaagctttatgataagatcactccccgaactgcacgcaatttccgtgaattgtgtaccggccaacatggatttggatatgctggaagttctttccatcgtattattccacaatttatgttgcaaggtggggatttcactcgaggaaatggaaccggtggaaagtctatctatggtagaacgtttccagacgaaaatttcgagctcaagcacacgaaacctggtcaactaagtatggctaatgcaggtagaaatacaaatggctcacaatttttcattaccacaatagccacaccttggttgaatggcaaacacgtggtgttcggcgaggtgattgagggtatggatcttgtgaagagaatcgaaggacttggtactcgctctggtactccaagagctcgtgttgctattgttaaatcgggtgtcgttgagtaa

SEQ ID NO: 873 - protein, 248 aa, Botryotinia fuckeliana B05.10
MFSTTSAFQWLHNDTKPRYMAPPFSTPSQKYAYPSPILSSEGDNSSLYNLLKPSFFSITSSFPFIQSSTSNPVAALAKTGDEDNSSKNCFFDITVDSAPAGRITFKLYDKITPRTARNFRELCTGQHGFGYAGSSFHRIIPQFMLQGGDFTRGNGTGGKSIYGRTFPDENFELKHTKPGQLSMANAGRNTNGSQFFITTIATPWLNGKHVVFGEVIEGMDLVKRIEGLGTRSGTPRARVAIVKSGVVE

SEQ ID NO: 874 - DNA, 546 bp, Botryotinia fuckeliana B05.10
  CDS (1)..(546)
atggccatcaagacttacttcgatgttacctgggagggtccagtcctcgacgcttccggaaagcctacctctactgtccaagagcaagccggaagaatcactttcaacctttacgatgatgtagtcccaaagaccgccgagaacttccgtgctctctgcactggtgagaagggtttcggatatgctggctcttccttccacagaatcattcctcaattcatgctccaaggaggtgacttcacccgtggcaacggtaccggtggaaagtcaatctacggtgagaagttcgccgatgagaacttcgagcgaaagcacacccgtccaggtctcctctccatggccaacgctggaccaaacaccaacggatcccaattcttcgttaccaccgttgttaccagctggttggatggcaagcacgtcgtcttcggtgaggttgccgatgatgagtccttgatgattgtcaaggctctcgaggctaccggatccggcagtggaaaggttcaatacaacaagaagccaaccattgtcaagtctggcgagctataa

SEQ ID NO: 875 - protein, 181 aa, Botryotinia fuckeliana B05.10
MAIKTYFDVTWEGPVLDASGKPTSTVQEQAGRITFNLYDDVVPKTAENFRALCTGEKGFGYAGSSFHRIIPQFMLQGGDFTRGNGTGGKSIYGEKFADENFERKHTRPGLLSMANAGPNTNGSQFFVTTVVTSWLDGKHVVFGEVADDESLMIVKALEATGSGSGKVQYNKKPTIVKSGEL

SEQ ID NO: 876 - DNA, 885 bp, Sclerotinia sclerotiorum 1980
  CDS (1)..(885)
atgttcactcttcaacgttttgtagtctctgcactacttatcttaaccgttaccttcctcttctttgcccaaacggctgaagctgtcaaaggaccaaagatcacccacaaggtctacttcgatatcagccacggcgatgaacctatgggtcgtgttgttctaggcctctacggcaagactgttcccaaaaccgctgagaacttcagagctttggcaactggcgagaagggtttcggataccaggactctaccttccaccgtgttatcaagggctttatgatccaaggaggtgatttcacaaagggtgatggaactggaggcaaatcaatctacggagctaagttcccagacgagaacttcaagttgaagcactccaagaaaggtcttctcagcatggccaacgccggaaaagacaccaatggctcccaattcttcattaccacctctactccatctcaccttgacggtagacacgttgtctttggcgaagtcttggagggctacgagattgtcgaagccatcgagaacgtaaagaagggagcatcagacagaccagttgacgctgtcaagatcaccgagagcggggaattaccagtaccagaagaagatgaatacggtactgccgagtttcaacacggtatggaggaggtcgaagttccacttactccgatcgatacttctactcctgatgctgccaccgcagtcattccacctatcgcagttgtcggtaccccacaaacagaaacagaggagtttggttatgccgatgaggcaggttacactctcatgcagaagggcttatttttggttgtcatcttaggatgtgtggccttttatgtgcgaatgaacaggagaagcaagaaatttgagaagtcaatcgtctag

SEQ ID NO: 877 - protein, 294 aa, Sclerotinia sclerotiorum 1980
MFTLQRFVVSALLILTVTFLFFAQTAEAVKGPKITHKVYFDISHGDEPMGRVVLGLYGKTVPKTAENFRALATGEKGFGYQDSTFHRVIKGFMIQGGDFTKGDGTGGKSIYGAKFPDENFKLKHSKKGLLSMANAGKDTNGSQFFITTSTPSHLDGRHVVFGEVLEGYEIVEAIENVKKGASDRPVDAVKITESGELPVPEEDEYGTAEFQHGMEEVEVPLTPIDTSTPDAATAVIPPIAVVGTPQTETEEFGYADEAGYTLMQKGLFLVVILGCVAFYVRMNRRSKKFEKSIV

SEQ ID NO: 878 - DNA, 543 bp, Sclerotinia sclerotiorum 1980
  CDS (1)..(543)
atgcctccaactcagttacccgcctcgggcaatcccttggtcttctttgatatcacaattggaggtgagccactcggtcgtatccaattcgagctctttgccgatgtagttcccaagacggccgagaatttccgtcaattctgtactggagaaaccaagaaccatctcggtagaccacaaggatacaaaggcagtaaattccatcgaattattaaggatttcatgtgccagggtggtgactttttgaatggggatggcactggttctacttgtatttacggattgagtaaattcgacgatgagaattttaccataaagcacacagaaccgggactcttgtcaatggctaatgccggtccaaataccaacggctctcaattcttcataactacagtaccaacacccttcctcgacaataaacacgtcgtctttggcaaagtcgtcgatggaatggatgtcgttcgcaagatggaaaatacgcgcactaacccaaaggatgcacctaatttaccagttgtcatttctctctgtggagaaatgtaa

SEQ ID NO: 879 - protein, 180 aa, Sclerotinia sclerotiorum 1980
MPPTQLPASGNPLVFFDITIGGEPLGRIQFELFADVVPKTAENFRQFCTGETKNHLGRPQGYKGSKFHRIIKDFMCQGGDFLNGDGTGSTCIYGLSKFDDENFTIKHTEPGLLSMANAGPNTNGSQFFITTVPTPFLDNKHVVFGKVVDGMDVVRKMENTRTNPKDAPNLPVVISLCGEM

SEQ ID NO: 880 - DNA, 612 bp, Nematostella vectensis
  CDS (1)..(612)
atggcggcctttgcaatcttttccgtgatttcgctgtttttcctagcttctagtgcagcaaaagaccctattgtcaccaagaaagtattttttgacatcacaatcggcggagagaaggctggtcgtattgaaatcgggctttttggtaaggccgtgccaaaaactgcagagaacttcttccagcttgctaccggcgagaaaggatttggctacaagaatagcatctttcatagggtcattcaagattttatgattcaaggtggtgatttcacgaaaggagatggaactggaggcaaaagtatctatggccagaagtttgctgatgagaactttaagcttcagcattatggggccggatggctcagtatggcaaatgccggtaaagacaccaatggctctcagttctttattacgactgtcaaaactccctggcttgatgggcgccatgtagtatttggaaaagttcttaagggaatggatgtggtaagaaagattgagaaaagcaagacagatcatggtgaccggcccgtcaaggaagtcaaggttgctgattctggttctctaactgtggacaaacctttctctgtctctcaggatgaggcaacagaatag

SEQ ID NO: 881 - protein, 203 aa, Nematostella vectensis
MAAFAIFSVISLFFLASSAAKDPIVTKKVFFDITIGGEKAGRIEIGLFGKAVPKTAENFFQLATGEKGFGYKNSIFHRVIQDFMIQGGDFTKGDGTGGKSIYGQKFADENFKLQHYGAGWLSMANAGKDTNGSQFFITTVKTPWLDGRHVVFGKVLKGMDVVRKIEKSKTDHGDRPVKEVKVADSGSLTVDKPFSVSQDEATE

SEQ ID NO: 882 - DNA, 519 bp, Nematostella vectensis
  CDS (1)..(519)
atggacgtcagtatcgggggccagccggctggaagggttattcttggcttgtttggtgacacggcgccgaagacagtggctaactttgtggctctcgccgataaagagcaaggctttggctacaaagattcgatattccatcgcgtcattaaaaacttcatgatccagggaggtgatttcacgaacaaagatggaactgggggatatagcatctatggtaaatatttcgacgacgagaacttcaacctgaagcactatggtcctggctggttgtgcatggcgaacgccggcaagaacacgaacggttcccagttctacattactacgatcaagacttcgtggctcgatggcagtcacacgtgcttcgggaaggttctcgaaggaatggacgtcgtccgaagaatcgagaacaccagagttgacactcatgacaagcctctagacgaagtaaaaattactggtattggcagcattccaatagaatctccttacgaagtcgctaaggatgctgttgtttga

SEQ ID NO: 883 - protein, 172 aa, Nematostella vectensis
MDVSIGGQPAGRVILGLFGDTAPKTVANFVALADKEQGFGYKDSIFHRVIKNFMIQGGDFTNKDGTGGYSIYGKYFDDENFNLKHYGPGWLCMANAGKNTNGSQFYITTIKTSWLDGSHTCFGKVLEGMDVVRRIENTRVDTHDKPLDEVKITGIGSIPIESPYEVAKDAVV

SEQ ID NO: 884 - DNA, 624 bp, Nematostella vectensis
  CDS (1)..(624)
atgaaagctgtagtgattatcggcactatcttcggcgccgtcctttttctcctctggcctcaagaaacagaagcaaagaagacaaataaggggcctttagtcacagacaagatttactttgatgtgagcattggtggtgataagattggccgcattgtctttggaatttttggaaagactgttccaaaaaccgcaaagaacttcaaacttcttgctacgggtgagaaaggttatggctacaaagggagtatttttcacagaattataaaagattttatgatccaaggtggagatttcatcaacaaagatggtactggaggacgtagtatatatggtgacagatttgatgacgagaacttcaaactgaagcactatggcccaggatggcttagcatggcaaatgctggcaaagacaccaatggctctcagttcttcatcacaactgtcaagacctcctggctggatggcaaacatgtggtctttggaaaagttctggaggggatggatgttgttcgtaaacttgagaatgtgaatgtcaaaggaagcacgcctgtcaaaacatgtatgattgatgatagtggcacactacctctagacaagcccttcaatgtggagaagtcctag

SEQ ID NO: 885 - protein, 207 aa, Nematostella vectensis
MKAVVIIGTIFGAVLFLLWPQETEAKKTNKGPLVTDKIYFDVSIGGDKIGRIVFGIFGKTVPKTAKNFKLLATGEKGYGYKGSIFHRIIKDFMIQGGDFINKDGTGGRSIYGDRFDDENFKLKHYGPGWLSMANAGKDTNGSQFFITTVKTSWLDGKHVVFGKVLEGMDVVRKLENVNVKGSTPVKTCMIDDSGTLPLDKPFNVEKS

SEQ ID NO: 886 - DNA, 486 bp, Nematostella vectensis
  CDS (1)..(486)
atggcggtcaacgagaagcagcccccatttgtttttattgaaacttcaatgggaagttttgaagttgaactctactggcggcatgcgccaaagacttgtagaaatttcacagaactggctcaaagaggatactttaacaactgtaagttccacagagtaataagggattttatgattcagactggagatccaacgggaacaggcaggggcggagcttccatttatggaccaacatttgaagatgaagtcacaagagaactcaagcacacaggagcagggatactttctatggccaacagtgggccaaatacaaatggaagtcaattttttgtcaccctggcaccaacacagtggctagacggaaagcacactatatttgggcgaataaataaaggactggaagttgttaaaagaataggacttgttgaaactaatgcagatgacagacccttacatgatgtgtacatcgtaaacagcagagcataa

SEQ ID NO: 887 - protein, 161 aa, Nematostella vectensis
MAVNEKQPPFVFIETSMGSFEVELYWRHAPKTCRNFTELAQRGYFNNCKFHRVIRDFMIQTGDPTGTGRGGASIYGPTFEDEVTRELKHTGAGILSMANSGPNTNGSQFFVTLAPTQWLDGKHTIFGRINKGLEVVKRIGLVETNADDRPLHDVYIVNSRA

SEQ ID NO: 888 - DNA, 525 bp, Nematostella vectensis
  CDS (1)..(525)
atgtcaatcgcatcgaatcctatcgtttttttcgacattacaatcggtggacaggaggtggggcgcatgaagatggagttgtttgccgacgctgtcccgaaaaccgctgaaaactttcgacaattttgtacaggagagtaccgaaaaaatggagttcctgttggttacaaaggctgtgtatttcacagggtcatcaaggacttcatgatccaaggtggtgattttgtgaagggagacgggactggtgtaatgagcatctatggagagtcagctttcgcagatgagagctttaagctgaagcatgatggagctggctatctgtcaatggcaaacagtggaatcaactccaatgggtgtcagtttttcatcacctgtgcaaaatgtgacttcttggatggaaaacatgtggtctttggaaaagtcatagatggtttgcttgttatgcgcaagattgagaacgttccagtggggcccaacaacagaccaaaactgaacgttgtcatatcacaatgtggtgaaatgtag

SEQ ID NO: 889 - protein, 174 aa, Nematostella vectensis
MSIASNPIVFFDITIGGQEVGRMKMELFADAVPKTAENFRQFCTGEYRKNGVPVGYKGCVFHRVIKDFMIQGGDFVKGDGTGVMSIYGESAFADESFKLKHDGAGYLSMANSGINSNGCQFFITCAKCDFLDGKHVVFGKVIDGLLVMRKIENVPVGPNNRPKLNVVISQCGEM

SEQ ID NO: 890 - DNA, 489 bp, Vanderwaltozyma polyspora DSM 70294
  CDS (1)..(489)
atgtccaaggtatttttcgatgttgaagctgatggtcaaccattaggcagagttgtattcaacttgtacaacgacgttactccaaagactgctgaaaacttcagagctctatgtactggtgaaaagggtttcggttacgctggttctccattccacagagtcattccagacttcatgttgcaaggtggtgatttcactgctggtaacggtactggtggtaagtctatctacggtggtaagttcccagatgaaaactttgttaagaagcacgacagaccaggtttgttgtccatggccaatgctggtccaggtaccaacggttctcaattcttcatcaccactgtcccatgtccatggttagacggtaagcacgttgtctttggtgaagttgctgaaggtttcgatgttgtcaagaaggttgaaactttgggttctccatctggtgccaccagagctagaattgtcgttgccaagtccggtcaattataa

SEQ ID NO: 891 - protein, 162 aa, Vanderwaltozyma polyspora DSM 70294
MSKVFFDVEADGQPLGRVVFNLYNDVTPKTAENFRALCTGEKGFGYAGSPFHRVIPDFMLQGGDFTAGNGTGGKSIYGGKFPDENFVKKHDRPGLLSMANAGPGTNGSQFFITTVPCPWLDGKHVVFGEVAEGFDVVKKVETLGSPSGATRARIVVAKSGQL

SEQ ID NO: 892 - DNA, 1119 bp, Vanderwaltozyma polyspora DSM 70294
  CDS (1)..(1119)
atgagtggtccaaagagctattttgatatttcaattggtggtaaacctgttggacgtattgtctttgatttatttgaagagactgctccaaagacagtcaagaattttgttactttatgtgatgaagataacggtttgaaatgtaagtcgaagcctgatgtgtcattgtgttacaaggggtctttgttccacagggtgatcaaggattttatgtgtcaatttggtgatttcaccaattttgatgggactggtggtgagagtatatacggtgaaaagtttgaagatgaaaatttcactttgaagcatgatagacctttcttgttgtcgatggcaaatgctggtccaaacaccaatggttctcagtgtttcatcacaactactgatactcctcacttggacggcaaacatgttgtgttcggtgaggtcattcaaggtaagagaattgtcagattaatggaaaacttgcaatgcgaccaagaaaacaacagaccaatgttagacgtcaagattgactcatgtggtattttgcctaacgactaccaggttccagaagatgctgaggcaactcctaccgatgagttcggtgataactatgaaaattctttgaaagctgaccctaaggtcgatatcaatgacttcaaatccgtcatcgaggctatcgagaaggtcaaagcaatcggtaccgagcagttcaagaaacaaaatttcccagtggcattagaaaaatataccaagtgtgacaaattcttgaaagagtatttcccagaagacctaccagaagacgagatcaaacaagtcaatcaattgaaagtgtcaatcccattgaacatcgctatctgtgggttgaagactaaggattaccaaaaagtccttgttgcaggttcagaagttctttacgccgaagacgcagatgacaagtccaaggctaaggccctttaccgtcgtggtctagcttactaccatctgaacgacacagactcagcaatgatagatttggaaatggcaaccactttccagcaagatgatgcggctatcttgaaagctatccaagataccaaagccaagagaaaggctgaaaatgaaaaacaaaagaaatcgctatccaaaatgttctcataa

SEQ ID NO: 893 - protein, 372 aa, Vanderwaltozyma polyspora DSM 70294
MSGPKSYFDISIGGKPVGRIVFDLFEETAPKTVKNFVTLCDEDNGLKCKSKPDVSLCYKGSLFHRVIKDFMCQFGDFTNFDGTGGESIYGEKFEDENFTLKHDRPFLLSMANAGPNTNGSQCFITTTDTPHLDGKHVVFGEVIQGKRIVRLMENLQCDQENNRPMLDVKIDSCGILPNDYQVPEDAEATPTDEFGDNYENSLKADPKVDINDFKSVIEAIEKVKAIGTEQFKKQNFPVALEKYTKCDKFLKEYFPEDLPEDEIKQVNQLKVSIPLNIAICGLKTKDYQKVLVAGSEVLYAEDADDKSKAKALYRRGLAYYHLNDTDSAMIDLEMATTFQQDDAAILKAIQDTKAKRKAENEKQKKSLSKMFS

SEQ ID NO: 894 - DNA, 621 bp, Aedes aegypti
  CDS (1)..(621)
atggcattagccttcatcactcgtaccggagcgtttgtgggacttgcacgtagtaaaccgtcgttttctggtgtttctggaagttctctgctagtgcagcaagtgtgtaattacgccaaaaaagccatgggtttgccgcgttgctttttcgacctaactgctgataacgccccactgggacgtgtcgttattgagctgcgcacagatgtaactccaaagacttgcgaaaacttccgtgcgctctgcaccggagagaagggattcggctacaagggttccaccttccaccgtgtgattcccaacttcatgtgccagggtggcgatttccagaaccacaacggtactggtggaaagtccatctacggcaacaagttcgaggatgagaacttcatcctgcgacacactggccccggaatcatgtcgatggcaaatgccggacccaacaccaacggatcccagttcttcatcaccaccgtgaagacctcctggctcgatgaccgccacgttgtcttcggcagtgttgtcgagggtatggatgtcatccggaaggtcgaatcctacggaaaccaatcgggaaagacctccaagcagattgtggtttccaactgtggtcaactgtaa

SEQ ID NO: 895 - protein, 206 aa, Aedes aegypti
MALAFITRTGAFVGLARSKPSFSGVSGSSLLVQQVCNYAKKAMGLPRCFFDLTADNAPLGRVVIELRTDVTPKTCENFRALCTGEKGFGYKGSTFHRVIPNFMCQGGDFQNHNGTGGKSIYGNKFEDENFILRHTGPGIMSMANAGPNTNGSQFFITTVKTSWLDDRHVVFGSVVEGMDVIRKVESYGNQSGKTSKQIVVSNCGQL

SEQ ID NO: 896 - DNA, 555 bp, Aedes aegypti
  CDS (1)..(555)
atgcctacctggaaccaaatgcaatcgcagctcaggcacccgaacaatccagtggtgtttatggacattaccgtcggaacttcggaaatcggccgaatggtattcgagttgtttgcggacgtcgttccgaagacttgcgagaattttcgccagttctgcaccggcgagtacaaaaaggacggtgtcccgatcgggtacaaaggttccagcttccatcgggtgattaaggacttcatgatccagggtggtgattttgtgaatggagacggaacaggggtgatgagcatttacggtaacagtacattcccggacgaaggattcctgctgaagcatgaagcacccggtttgctgtcgatggccaatagcgggaaggacaccaacgggtgtcagttcttcatcacctgtgcaaagtgcaactttttggactataagcacgtcgtgttcggaagggtactggatgggctgctgatcatgcgaaaaatagaaaatgtccccaccggacccaacaataagcccaaactaccggtagtgatttcgcagtgcgggcagatgtag

SEQ ID NO: 897 - protein, 184 aa, Aedes aegypti
MPTWNQMQSQLRHPNNPVVFMDITVGTSEIGRMVFELFADVVPKTCENFRQFCTGEYKKDGVPIGYKGSSFHRVIKDFMIQGGDFVNGDGTGVMSIYGNSTFPDEGFLLKHEAPGLLSMANSGKDTNGCQFFITCAKCNFLDYKHVVFGRVLDGLLIMRKIENVPTGPNNKPKLPVVISQCGQM

SEQ ID NO: 898 - DNA, 597 bp, Aedes aegypti
  CDS (1)..(597)
atgaagctatttgttgtgcttagtgtgcttctggtcggggccctcgcccaagatggacccaaagtcactgataaggtcttctttgatatcaccatcggtggaaagccggaaggtcgcattgtgattggtctgttcggtggaaccgttccgaagactgccaagaacttcaaaactctcgccgagaatgcggagggcgaaggctacaagggcagcaagttccaccgcgtcatccaggacttcatgatccagggcggtgacttcacccgtggcgatggaaccggtggccgctcgatctacggtgagcgcttcgccgacgagaacttcaagctgaagcactacggcgctggatggctgtcgatggccaacgccggcaaggacaccaacggatcgcagttcttcatcaccgttaagcagaccagctggctggacggacgccacgttgtgttcggcaagatcctggagggaatggacgtcgttcgcaagatcgagaagaccaaaaccgacggacgtgaccgcccggttaacgatgtggtgatcgccgacagtggttccctgccggtggacgctccgttctccgtggagaaggctgatgcctag

SEQ ID NO: 899 - protein, 198 aa, Aedes aegypti
MKLFVVLSVLLVGALAQDGPKVTDKVFFDITIGGKPEGRIVIGLFGGTVPKTAKNFKTLAENAEGEGYKGSKFHRVIQDFMIQGGDFTRGDGTGGRSIYGERFADENFKLKHYGAGWLSMANAGKDTNGSQFFITVKQTSWLDGRHVVFGKILEGMDVVRKIEKTKTDGRDRPVNDVVIADSGSLPVDAPFSVEKADA

SEQ ID NO: 900 - DNA, 552 bp, Caenorhabditis briggsae AF16
  CDS (1)..(552)
atgaccgagtatgacaaatttgctgaacaactccgtcatcccgataacccaatcgtgtttcttgaagtaacagcaggtggggctccaatcggaacaattgttattgaactgtttgctgatgtgactcctagaacagctgagaacttccgacaattttgcaccggcgagtataaaaaggatggcgtaccgaatggctacaagaattgtacattccatcgtgtcatcaaggattttatgattcaaggaggcgatttctgcaatggcgatggtacaggtttgatgagtatctacggctcgaaatttcgtgacgaaaatttcgaactgaagcatacgggacctggaatgctgtcgatggccaacgctggatcggacaccaatggatgtcagttcttcatcacatgtgcaaaaaccgatttcttggataacaagcacgttgtattcggacgagtactcgatggcatgctgacagtgcgaaagatcgagaatgtcccaactggagctaataacaagccgaagctgccgattgtgattgttcaatgtggtcaactctaa

SEQ ID NO: 901 - protein, 183 aa, Caenorhabditis briggsae AF16
MTEYDKFAEQLRHPDNPIVFLEVTAGGAPIGTIVIELFADVTPRTAENFRQFCTGEYKKDGVPNGYKNCTFHRVIKDFMIQGGDFCNGDGTGLMSIYGSKFRDENFELKHTGPGMLSMANAGSDTNGCQFFITCAKTDFLDNKHVVFGRVLDGMLTVRKIENVPTGANNKPKLPIVIVQCGQL

SEQ ID NO: 902 - DNA, 564 bp, Chlamydomonas reinhardtii
  CDS (1)..(564)
atggccaccgggacaactgaacaatggcacattagaccgcagcgaccggagaacccggtggtctttttcgacgtgaatgttggcgagcagccggctggccgcgtaaaatttgagctcttcgcggatatttgcccaaagacggctgagaactttcggcagctctgcacgggcgagtaccggaagaacgggctaccagtcggatacaagaattgcacattccaccgagttatcaaggacttcatgatccaaggcggcgactttgtaaagggcgatggcacgggctgcgtcagcatctacggcagccgctttccggacgagaactttattgcgaagcacacggggcccggactcctatccatggcaaacagcgggcccaacagcaacggctgccagttcttcatcacgtgcgccaagaccgagtggcttgacaacaagcacgttgtgtttggccgcgtcatcgacgacgggctgctgattgtgcgcaagctggagaacgtgctggtggacaagcagaccaaccggccgcgcctgccctgcatcatcaaggagtgtggggagatgtga

SEQ ID NO: 903 - protein, 187 aa, Chlamydomonas reinhardtii
MATGTTEQWHIRPQRPENPVVFFDVNVGEQPAGRVKFELFADICPKTAENFRQLCTGEYRKNGLPVGYKNCTFHRVIKDFMIQGGDFVKGDGTGCVSIYGSRFPDENFIAKHTGPGLLSMANSGPNSNGCQFFITCAKTEWLDNKHVVFGRVIDDGLLIVRKLENVLVDKQTNRPRLPCIIKECGEM

SEQ ID NO: 904 - DNA, 624 bp, Neurospora crassa OR74A
  CDS (1)..(624)
atgttcagcttgcggcgactcctcctcgccgccacgctgttcctcggcgcgatgctgctctttgcgcagtccgccgaggcagccaagggccccaagatcacccacaaggtctacttcgacattgagcagggcgacaagcccctcggccgcatcgttatgggtctctatggcaagaccgtccccaagaccgctgaaaacttccgcgctcttgccactggcgagaagggcttcggttatgagggctctaccttccaccgtgttatcaagcagttcatgatccagggtggtgacttcaccaagggcgatggcaccggtggcaagtccatctatggtgacaagttccccgatgagaacttcaagctcaagcactccaagaagggtctcctctcaatggccaacgctggcaaggataccaacggctcccagttcttcattaccactgtcatcacctcttggctcgatggcaagcacgtcgtcttcggcgaggtcctcgagggctacgatgtcgtcgagaagattgagaacaccaagaccggtcctcgcgatgctcctgctgagcctatcaagatcgccaagagtggcgagcttgaggttccccctgaaggtatccatgtggagctttaa

SEQ ID NO: 905 - protein, 207 aa, Neurospora crassa OR74A
MFSLRRLLLAATLFLGAMLLFAQSAEAAKGPKITHKVYFDIEQGDKPLGRIVMGLYGKTVPKTAENFRALATGEKGFGYEGSTFHRVIKQFMIQGGDFTKGDGTGGKSIYGDKFPDENFKLKHSKKGLLSMANAGKDTNGSQFFITTVITSWLDGKHVVFGEVLEGYDVVEKIENTKTGPRDAPAEPIKIAKSGELEVPPEGIHVEL

SEQ ID NO: 906 - DNA, 672 bp, Neurospora crassa OR74A
  CDS (1)..(672)
atgtttggaccccgccatttctctgtccttaagacaacaggttctctcgtctcctcgactttctcgtcatctctcaagcccactgcaactttctcctgcgccagagctttttcgcaaacatccagcatcatgtccaaggttttcttcgatctcgagtgggagggtcccgtcctcggccccaacaacaagcccaccagcgaaatcaaggctcagtctggccgcattaacttcaccctctacgacgacgttgtccccaagaccgcccgcaacttcaaggagctctgcactggccagaacggcttcggctacaagggctcttctttccaccgcattatccccgagttcatgctccagggtggtgacttcacccgtggtaacggcactggtggcaagtccatctacggcgagaagttcgccgatgagaacttcgccaagaagcacgtccgccctggtcttctctccatggccaacgccggccccaacaccaacggctcccagttcttcgtcaccactgtccccaccagctggctcgatggccgccacgtcgtcttcggcgaggtcgctgacgatgagtccatgaaggtcgtcaaggcccttgaggctactggctccagcagcggtgctattcgttactccaagaagcccaccattgtcgactgcggcgctctctaa

SEQ ID NO: 907 - protein, 223 aa, Neurospora crassa OR74A
MFGPRHFSVLKTTGSLVSSTFSSSLKPTATFSCARAFSQTSSIMSKVFFDLEWEGPVLGPNNKPTSEIKAQSGRINFTLYDDVVPKTARNFKELCTGQNGFGYKGSSFHRIIPEFMLQGGDFTRGNGTGGKSIYGEKFADENFAKKHVRPGLLSMANAGPNTNGSQFFVTTVPTSWLDGRHVVFGEVADDESMKVVKALEATGSSSGAIRYSKKPTIVDCGAL

SEQ ID NO: 908 - DNA, 540 bp, Malassezia globosa CBS 7966
  CDS (1)..(540)
atggccattgttccttctgctgttcgccaattttcagcttctactcgcaatatgtcgaacgtcttctttgacattaccaagaacggagcccctctcggtacaatcaagttcaagctcttcgatgatgttgtgccaaagacggccgcgaacttccgtgctctttgcacgggcgagaagggctttggctatgctggctcgcacttccaccgtgtgattcccgacttcatgcttcagggcggtgacttcacggctgggaacggcactggtggcaagtcgatctacggccaaaagtttgccgatgagaacttccagctcaagcactcgaagcctggtcttctatcgatggctaacgcgggccccaacaccaacggttcgcagttcttcattacaaccgtcgtaacgagctggctcgacggcaagcacgtcgtcttcggcgaggttgttgatggcatgaacgtcgtcaaggctatcgaggccgagggcacctcgagtggcaagccccgcagccgcattgagatcgccaagtgcggtgtgtgctaa

SEQ ID NO: 909 - protein, 179 aa, Malassezia globosa CBS 7966
MAIVPSAVRQFSASTRNMSNVFFDITKNGAPLGTIKFKLFDDVVPKTAANFRALCTGEKGFGYAGSHFHRVIPDFMLQGGDFTAGNGTGGKSIYGQKFADENFQLKHSKPGLLSMANAGPNTNGSQFFITTVVTSWLDGKHVVFGEVVDGMNVVKAIEAEGTSSGKPRSRIEIAKCGVC

SEQ ID NO: 910 - DNA, 603 bp, Malassezia globosa CBS 7966
  CDS (1)..(603)
atgcaattctcgttggttcgattcctcgtagctttcctcgtcagcgtgtcgcttgtgcttgcgcttaagacatcggaagcgaaggtcacgcacaaggtatattttgacatcgagcatggcgacaagtctgtgggccgtgttgtgatgggcctgtatggtgaagtggtcccaaagacagtcgagaactttgtgggtctcgctgagcgtgaggaaggccgtggattcaagggctcgattttccaccgtgtcattaagggctttatgatccagggcggcgactacactcgtggtgatggtcgtggtggcatgtcgatctggggcaagcgcttcgatgatgagaacttcaagttgaagcacgagggtgctggtatcctgtccatggcgaacgctggttccgacacaaatggatcacagttctttattactgttgccaagaccccgtggctcgatggccgtcatgtcgtgttcggtcgtgtcctggagggcatggacgtggtcaactatgtcgaaaatgtccgcactggtcctggcgaccgccctgtggacgaggtgcgcatctttgatgctggtcttctgcccgatggcccgcacgatgagctttag

SEQ ID NO: 911 - protein, 200 aa, Malassezia globosa CBS 7966
MQFSLVRFLVAFLVSVSLVLALKTSEAKVTHKVYFDIEHGDKSVGRVVMGLYGEVVPKTVENFVGLAEREEGRGFKGSIFHRVIKGFMIQGGDYTRGDGRGGMSIWGKRFDDENFKLKHEGAGILSMANAGSDTNGSQFFITVAKTPWLDGRHVVFGRVLEGMDVVNYVENVRTGPGDRPVDEVRIFDAGLLPDGPHDEL

SEQ ID NO: 912 - DNA, 588 bp, Physcomitrella patens subsp. patens
  CDS (1)..(588)
atggcggcaccagcagcagcagcgggaggaggaggagcagctgcagtggaatggcacttgagaccgcccaatgccaaaaaccctatagtatttttcgatgtgacaattggtagcctgcctgctggtcgcattaagatggagctcttcgctgacattgtgcccaaaaccgcagagaattttaggcaattttgcactggggaattcaggaagggtaataatcccattgggttcaaaacatccactttccatcgtgttattaaggatttcatgatccaaggaggtgacttcgtgaagggagatggaagtggctgcaccagtatctatggaagtaaatttgacgatgagaactttatcgctaagcacaccggtccagggctgctttctatggctaatagcggaccaaatacaaatggatgtcagttcttcatcacatgtgccaagtgcgactggctggacaacaaacacgttgttttcgggcgcgtgcttggggaaggcttgctggtcgtgaggaaattggagaatgtgcaaacagggcaaaacaaccggcccaagcttgcttgcactatcgccgaatgtggtgaaatgtaa

SEQ ID NO: 913 - protein, 195 aa, Physcomitrella patens subsp. patens
MAAPAAAAGGGGAAAVEWHLRPPNAKNPIVFFDVTIGSLPAGRIKMELFADIVPKTAENFRQFCTGEFRKGNNPIGFKTSTFHRVIKDFMIQGGDFVKGDGSGCTSIYGSKFDDENFIAKHTGPGLLSMANSGPNTNGCQFFITCAKCDWLDNKHVVFGRVLGEGLLVVRKLENVQTGQNNRPKLACTIAECGEM

SEQ ID NO: 914 - DNA, 516 bp, Physcomitrella patens subsp. patens
  CDS (1)..(516)
atggttaaccccagggtattctttgacgtcaccatcggcggtaaccccgctgggcgcatcgagatggagctgttcgcggataccaccccgaagactgctgagaacttccgcgctttgtgcactggtgagaaggggaagaacaggctagggaagccccttcactacaagggttccaagtttcatcgtgtcattccccagttcatgtgccagggtggtgacttcaccaggggcaatggtaccggaggggagtcgatctggggtgagaagtttgatgacgagaacttcatcaagaagcacactggccccggagtgttgtctatggccaacgctgggaaaaataccaatggatcgcagttcttcttgtgtaccgttgccaccccttggctggatggaaagcacgttgtgttcggccaagtaacgaaaggaatgaatgtggtgtcggaaatcgagaagcagggttcttccaatggtacacccaagaatgttgtcgagatagctgactgcggacagttgtag

SEQ ID NO: 915 - protein, 171 aa, Physcomitrella patens subsp. patens
MVNPRVFFDVTIGGNPAGRIEMELFADTTPKTAENFRALCTGEKGKNRLGKPLHYKGSKFHRVIPQFMCQGGDFTRGNGTGGESIWGEKFDDENFIKKHTGPGVLSMANAGKNTNGSQFFLCTVATPWLDGKHVVFGQVTKGMNVVSEIEKQGSSNGTPKNVVEIADCGQL

SEQ ID NO: 916 - DNA, 495 bp, Phaeosphaeria nodorum SN15
  CDS (1)..(495)
atggccgaggctacggaggagaacccaatagtcttctttgacgttactttaggaggggagaagttaggcagaatcaagatcgagctgtacaagaacgtagtacccaagactgctgagaactttcgacagttctgcactggcgagaccaagaacagtcggggccagccgcagggctacaagggctgcaagttccatcgggtcatcaaaggtttcatgatccagggaggcgacttcatcaatggaaacggcaccggctcaagaaccatatacggcgtcgataagtttgcggacgagaacttcacgctgaagcacgacaagccaggtcttctgtcaatggcaagcggcacacctcacctgaatggtaaacacgtcgtcttcggcaatgtcatcgaaggcatggacgtggtcaccaagatcgagaacactaggacagtggccaatcctgaaggcaagccggcgcaggacgttgtcattgcacaatgcggtgagatgtga

SEQ ID NO: 917 - protein, 164 aa, Phaeosphaeria nodorum SN15
MAEATEENPIVFFDVTLGGEKLGRIKIELYKNVVPKTAENFRQFCTGETKNSRGQPQGYKGCKFHRVIKGFMIQGGDFINGNGTGSRTIYGVDKFADENFTLKHDKPGLLSMASGTPHLNGKHVVFGNVIEGMDVVTKIENTRTVANPEGKPAQDVVIAQCGEM

SEQ ID NO: 918 - DNA, 516 bp, Phaeosphaeria nodorum SN15
  CDS (1)..(516)
atgtccaaccctaaggtcttcttcgatgtctccatcggcggtgctcccgctggaagaataatcatggaattgttccaggatcaagtaccgaagaccgctgagaacttccgcgctctctgcaccggcgagaagggcaccggccgctctggcaagcccctccactaccagggctcttccttccaccgtgtcatcccccagttcatgctccagggtggtgacttcacccgcggcaacggcaccggtggtgagtccatctacggcgagaagttcgaggacgagaacttcaacctgaagcacactggccccggtatcctctccatggccaacgctggacccggaaccaacggctcgcagttcttcatctgcaccgtcaagacctcttggctcgacggcaagcacgttgtcttcggccaggtcgtcgagggccttgacgtcgtccaggccgtcgagcgcgtcggctcctccagcggcaagaccgctaagaccgtcaccatcgagaagtccggccagttgtaa

SEQ ID NO: 919 - protein, 171 aa, Phaeosphaeria nodorum SN15
MSNPKVFFDVSIGGAPAGRIIMELFQDQVPKTAENFRALCTGEKGTGRSGKPLHYQGSSFHRVIPQFMLQGGDFTRGNGTGGESIYGEKFEDENFNLKHTGPGILSMANAGPGTNGSQFFICTVKTSWLDGKHVVFGQVVEGLDVVQAVERVGSSSGKTAKTVTIEKSGQL

SEQ ID NO: 920 - DNA, 579 bp, Aspergillus oryzae RIB40
  CDS (1)..(579)
atgactgacctccggagcgcggaagaaatcacgtcgcaacaatattcctccggtttagctacggtgtacttcgacattgagcacggcaataagcctctgggcagagtggtgctcggattgtatggcaagaccgttcccaagaccgccgagaacttccgggctctcgctaccggcgagaagggctttggttatgagggctctaccttccaccgtgtcattaaggagttcatgatccagggtggtgacttcacccgcggtgatggcactggcggaaagtctatctatggcgaaaagttcaaggatgagaacttcaagattaggcacaccaagaagggactcctgagcatggccaacgccggcaaggataccaacggctctcagttcttcatcactactgtggctactccatggctcgatggccgccacgttgttttcggcgaggtccttgagggttatgaggtggttgaagccatcgaaaacgttcccaaggttcctggtgacaagccccaacaggtggtcaagatcgtcaagagtggagagctggagtctgaggacaaaggtagccacgaggagctgtag

SEQ ID NO: 921 - protein, 192 aa, Aspergillus oryzae RIB40
MTDLRSAEEITSQQYSSGLATVYFDIEHGNKPLGRVVLGLYGKTVPKTAENFRALATGEKGFGYEGSTFHRVIKEFMIQGGDFTRGDGTGGKSIYGEKFKDENFKIRHTKKGLLSMANAGKDTNGSQFFITTVATPWLDGRHVVFGEVLEGYEVVEAIENVPKVPGDKPQQVVKIVKSGELESEDKGSHEEL

SEQ ID NO: 922 - DNA, 1116 bp, Aspergillus oryzae RIB40
  CDS (1)..(1116)
atggctgactctcagcgtcgtccccgtgtcttctttgacattcaaattggcaacgaaaaaactggccgtattgccctggaattggtactcgtaccaaagactgcagagaacttccgtgctctctgtaccggagagaagggcatgggaaagcagggcaagccattgcattttaagggttcgatcttccaccgtgtgatcaagcaattcatgatccagggtggtgacttcactgcattcaacggcactggcggcgaatcgatttacggcgagaaattccccgacgagaattttgagctcaagcatgacaaacctttcctcctctctatggccaactctggccccggcaccaacggaagtcagttcttcatcactaccgtccccacccctcacctggatggcaagcacgttgtttttggagaagtaatcaacggaaagagtgtcgtccgcaaggtcgagaacatgaacacccaggcagacaagcccgtcaaggacgtcactattgtcgagtgtggtgagctcacgggccaggactacgatgatgctgataagcaaacccctgatgctaccggcgacccctacgaggatttccccgatgatcaccaaggcgaggagcttaatgcccaagtctgcttcaagattgcgtcggaactgaagaactttggaaacgctgctttcaagagcggcaaccttgcgcttggtctggagaagtaccagaaaggcctgcgctacttgcacgagttccccgagcctgatgagaatgaccccaaagagcttgatggtcagatcaaggcccttcggtttgccctgcactccaactcttcccttctggccaacaaactggcacagtacggaaacggtcggtcctgggctacctacgccttggacaccgccaacgccgccaatgcgaaggatgccgacaaggccaaggcctactaccgccgtgccgtggcctccagcggtctgaaggaagaggacgaggccctgaaggacctccaggaagccgagaagctggcccccggcgacgccggcatcaccaacgaaattgccaaggtcaagaaggccatcaaggaccgtcaggccaaggaacgcgccactgcgcagaagttcttctcataa

SEQ ID NO: 923 - protein, 371 aa, Aspergillus oryzae RIB40
MADSQRRPRVFFDIQIGNEKTGRIALELVLVPKTAENFRALCTGEKGMGKQGKPLHFKGSIFHRVIKQFMIQGGDFTAFNGTGGESIYGEKFPDENFELKHDKPFLLSMANSGPGTNGSQFFITTVPTPHLDGKHVVFGEVINGKSVVRKVENMNTQADKPVKDVTIVECGELTGQDYDDADKQTPDATGDPYEDFPDDHQGEELNAQVCFKIASELKNFGNAAFKSGNLALGLEKYQKGLRYLHEFPEPDENDPKELDGQIKALRFALHSNSSLLANKLAQYGNGRSWATYALDTANAANAKDADKAKAYYRRAVASSGLKEEDEALKDLQEAEKLAPGDAGITNEIAKVKKAIKDRQAKERATAQKFFS

SEQ ID NO: 924 - DNA, 546 bp, Aspergillus oryzae RIB40
  CDS (1)..(546)
atggatagccaagttacgagctcagctaagacacccaaccctgttgtcttttttgacatcactctaggtggggagtcactgggacgtatcaagatggaactcttcaccagtataacgccacgaacagcagaaaattttcgccagttctgcacaggagaaagcaaaagtccccaaggacggccacaaggatataagaatagcaaatttcatagagttatcaaggatttcatgatacagggtggtgacttcgtcaatggcgatggcacaggttctcgtaccatctatggcactccacgatttcaagatgaaaatttcattttgaagcatgatcaaccagggctactaagcatggcaaattctggacccaacacaaacggttgccaattcttcattacaacgactgcgacaccgttcctaaataataaacacgtggtgtttggacaagtagtggaaggaatggacgttgtgcgaatgattgaaaacactcgtacaactagggataaacctaatcaagacgtgaccatcattcagtgcggggagatgtga

SEQ ID NO: 925 - protein, 181 aa, Aspergillus oryzae RIB40
MDSQVTSSAKTPNPVVFFDITLGGESLGRIKMELFTSITPRTAENFRQFCTGESKSPQGRPQGYKNSKFHRVIKDFMIQGGDFVNGDGTGSRTIYGTPRFQDENFILKHDQPGLLSMANSGPNTNGCQFFITTTATPFLNNKHVVFGQVVEGMDVVRMIENTRTTRDKPNQDVTIIQCGEM

SEQ ID NO: 926 - DNA, 1125 bp, Coprinopsis cinerea okayama7#130
  CDS (1)..(1125)
atggcctcagaacgcccaattgtctacttcgatatcagcatcggcggccaggcagctggtcgggtcgtcttctcgttgtataacgaccttgtgcccaagaccgcagagaacttccgcgcactttgtactggcgaacatggtgtcggaaagctgggaaagccccttacttacaagggatctaaattccatcgtgtaatcaaagggttcatgtgccaaggaggcgatttcaccgcaggaaatggtaccggcggcgaatcgatctacggcgagaaatttgaagacgaagctttccccgtcaatcactctaaaccattcctgctgtcgatggctaacgctggtcctaacaccaacggatcgcaattcttcatcacggtagcccctacaccccatcttgacggaaagcacgtcgttttcggtgaagtgatcaagggcaaatccattgtccgagcaatcgagaacaaccccaccgcatcaggcgacgtcccaatcgaacctgttgtgatcgaagactgcggcgtcctttctcccgacgatccttccctcgccgaatcaacagcagaagcacaagacggtgatccttatgaggactacccagaagacgaggatcgggatctgaatgacgccaaagccgttttggacattgccaagctcatccgggaggtcggaaacaggttgttcaaggagggtaaagtcgatcaggcgtcaaacaagtatcagaaggcactccgctatctggatctccactggcctctaccagaggatgcttcggaagagctccaggcaggatacaaagagctcttcacccctgtcctcctcaactcggccctcgctgccatccgcgtagaacccagatctaccgtaaactccaccatcgccatcaccaacaccacccgcgcaatcaactactttgacctcaaacccgccgacaaagccaaggcttactaccgtcgcgcgctcgccaggttacaactcaaggacgaggacaaagccgaggctgatcttgttgaggctagcaaactcgcacccgaggatgctgcaatcgcaggcgaacttaacaagatcaagcaagcccaaaaggcgctcagggagaaagagaagaaggcatataagaaattgttcggataa

SEQ ID NO: 927 - protein, 374 aa, Coprinopsis cinerea okayama7#130
MASERPIVYFDISIGGQAAGRVVFSLYNDLVPKTAENFRALCTGEHGVGKLGKPLTYKGSKFHRVIKGFMCQGGDFTAGNGTGGESIYGEKFEDEAFPVNHSKPFLLSMANAGPNTNGSQFFITVAPTPHLDGKHVVFGEVIKGKSIVRAIENNPTASGDVPIEPVVIEDCGVLSPDDPSLAESTAEAQDGDPYEDYPEDEDRDLNDAKAVLDIAKLIREVGNRLFKEGKVDQASNKYQKALRYLDLHWPLPEDASEELQAGYKELFTPVLLNSALAAIRVEPRSTVNSTIAITNTTRAINYFDLKPADKAKAYYRRALARLQLKDEDKAEADLVEASKLAPEDAAIAGELNKIKQAQKALREKEKKAYKKLFG

SEQ ID NO: 928 - DNA, 555 bp, Culex quinquefasciatus
  CDS (1)..(555)
atgcccacctggaaccagattcagtcacagcttcggcaccccaacaatccggttgtgtttatggacataaccgtcggaacgtcggaaattggccggatggtgtttgagttgttcgccgatgtagtgccgaagacgtgcgagaacttccggcagctttgcaccggcgagcacaagaaagacggagttcccgtgggttataaggggtcctccttccatcgggtgatcaaggacttcatgattcagggtggtgattttgtgaatggtgacggaacgggcgtgatgagcatttacggtaacaacacattcccggacgagggcttcctgctgaagcatgaagctcccggtctgctttcgatggccaacagtgggaaggacaccaacggttgtcagtttttcataacttgcgccaaatgcaacttcctcgattacaagcacgttgttttcggtcgcgtcctcgatggcctgcttatcatgcgcaagatcgaaaatgtcccgacgggaccgaacaacaagcccaaacttccggtcgtgatttcgcagtgcggacagatgtag

SEQ ID NO: 929 - protein, 184 aa, Culex quinquefasciatus
MPTWNQIQSQLRHPNNPVVFMDITVGTSEIGRMVFELFADVVPKTCENFRQLCTGEHKKDGVPVGYKGSSFHRVIKDFMIQGGDFVNGDGTGVMSIYGNNTFPDEGFLLKHEAPGLLSMANSGKDTNGCQFFITCAKCNFLDYKHVVFGRVLDGLLIMRKIENVPTGPNNKPKLPVVISQCGQM

SEQ ID NO: 930 - DNA, 519 bp, Laccaria bicolor S238N-H82
  CDS (1)..(519)
atgtcgtccgcaaaccgcccaatagtcttcatggacatcaacatcggtgaaaccccagctggtcgtttgaagatggagcttttcagtgatatcgtcccaaaaaccgcagagaacttcaggcagctgtgcactggggaatacagagtgaattcgcgtccacaagggtataaaaatgcaacgtttcatagtgttacaaatttcatgtgtcaaggtggtgacttcttgaagggagatgggacaggttcattttcaatatatggcgataaatttccggacgagaactttcaagaaaagcatactggcccaggtcttttgtcgatggccaattccggaccgaataccaatggatgccaattcttcatcacgaccgccaagtgtgatttccttgacgggaaacatgtggtctttggtaaagttatcgatggaatgctcacattgagaaagatcgaaaatgtagctacgggtccaaacaaccgaccaaaactggttgtcaaaataaccgaatgtggggaaatgtag

SEQ ID NO: 931 - protein, 172 aa, Laccaria bicolor S238N-H82
MSSANRPIVFMDINIGETPAGRLKMELFSDIVPKTAENFRQLCTGEYRVNSRPQGYKNATFHSVTNFMCQGGDFLKGDGTGSFSIYGDKFPDENFQEKHTGPGLLSMANSGPNTNGCQFFITTAKCDFLDGKHVVFGKVIDGMLTLRKIENVATGPNNRPKLVVKITECGEM

SEQ ID NO: 932 - DNA, 612 bp, Brugia malayi
  CDS (1)..(612)
atgaacttcattctgacgacagttactatatttgtcactttttacacctctaataatgctaaggaaatggcaacagttactaagaaagtttatttcgatattgcaatcggtgataagaagatcggaagaatagaaataggtctgtttggtaatgatgtgccgaaaacagtagaaaactttcgagcattggctactggtgagaagggttttggctacaaaggatctaaatttcatcgtgtaatcaaagattttatgatacagggtggtgattttacgagaggagatggaactggaggtaaaagtatttatggtgatcgttttgaggatgaaaatttcaaattgaagcattatggtgctggttggttgagtatggctaatgcaggaaaagataccaacggatcacaattcttcataacaacggtgcaaacaacatggctagatggtcgtcatgttgtattcggaaaagttctaagtggtatggatgttgttagaaaaattgagcaaacatcaacacatccaggtgatcgaccaaaacaaagtgttgaaattgtagattgtggcgaattgtctttagatgctccgtttgatacaccaaaagaagctgtagcataa

SEQ ID NO: 933 - protein, 203 aa, Brugia malayi
MNFILTTVTIFVTFYTSNNAKEMATVTKKVYFDIAIGDKKIGRIEIGLFGNDVPKTVENFRALATGEKGFGYKGSKFHRVIKDFMIQGGDFTRGDGTGGKSIYGDRFEDENFKLKHYGAGWLSMANAGKDTNGSQFFITTVQTTWLDGRHVVFGKVLSGMDVVRKIEQTSTHPGDRPKQSVEIVDCGELSLDAPFDTPKEAVA

SEQ ID NO: 934 - DNA, 552 bp, Brugia malayi
  CDS (1)..(552)
atgagtgattacgaccatttagcggagcagttaaggcatcctgataatcccgtagtattcatggaaatgactgctggtggtgcacccataggaacaatcaaaatggaattatttgcagatgtctgccctaaaacagccgaaaatttcagacaattttgcactggcgaatatcgcagagatggtgttccggttggttataaaaatgcccaatttcatagagtgatcaaagattttatgattcagggaggtgactttgtcaatggtgatggtactggcatgacaagtatatatggatcgaaattcagggacgaaaattttgatttggagcattcaggaccgggaattttgtcaatggcgaatgccggaccagacacaaatggttgtcagtttttcataacttgtgcgaagtgtgattttcttgataagaagcatgtcgtttttggaagagtattggatggtttattaacagtgaggaaaatcgaaaacgttccaacaggtcaaaataacaaaccgaaaattcctattgttattacgcagtgtggacagttgtag

SEQ ID NO: 935 - protein, 183 aa, Brugia malayi
MSDYDHLAEQLRHPDNPVVFMEMTAGGAPIGTIKMELFADVCPKTAENFRQFCTGEYRRDGVPVGYKNAQFHRVIKDFMIQGGDFVNGDGTGMTSIYGSKFRDENFDLEHSGPGILSMANAGPDTNGCQFFITCAKCDFLDKKHVVFGRVLDGLLTVRKIENVPTGQNNKPKIPIVITQCGQL

SEQ ID NO: 936 - DNA, 1128 bp, Podospora anserina DSM 980
  CDS (1)..(1128)
atgagcagcaccgaggagacaaagaaggctcgcagccgcgtcttcttcgacgttaccatcggaggaaagcccgccggccgcatcacattcgagctttacgatgacattgtgcccaagacggccgagaacttccgcgctctctgcacgggcgagaagggtatcggcaaggccggcaaacctttgcactacaaggggtcgctattccaccgcatcatcaagcagttcatgatccagggtggtgacttcacggccggcaatggcacaggcggcgagtccatctatggtgccaagtttgaggatgagaactttgagctgaagcacgaccgtcctttcctgctgtccatggctaatgctggtcccggtacaaacggttcccaattcttcattactactgtgcaaacaccacatctcgatggaaagcatgtcgtttttggagaggtcctcagcggcaagtccgtcgtccgtcaactcgaaaacctcaccactcaagccgacaagcccacgaaagatgccgtcatcgccgactgcggcgagctctccggctccgaagccatcaccgccgacaccaagacagccgacgcctatggtgatgagtacgaagatttccccgaagaccaagttagtggcaacgaaactctttccgccactcaaatcctcaaaatcgccagcgactgcaaggagtttggcaacaaggctttcaagggtggcgacttgagcgtggctctggacaaataccaaaagggcttgcgctacctgaacgaggaccccgatctggacaacgaatccgatgagaccaagtccaagctcagcactttgcgcatctcgctcaacaccaacgcggcgctcatgaatttcaagctggaggcgtgggatgacacggttcgttctgcaaacggtgctcttgccgtggctggcatctcaggcaaggagaaggcaaaggctctctaccaccgcggacgtgctcagctgcgtctcaaggatgaggatgctgctctggagagtttgggagaggctcaaatggttgacccggagaacgcggctgtcgcgaaggagctggccgaggtcaagaaggcggctgctgcgagacgcgccaaggagaaggcggcgtacaagaagttctttagctga

SEQ ID NO: 937 - protein, 375 aa, Podospora anserina DSM 980
MSSTEETKKARSRVFFDVTIGGKPAGRITFELYDDIVPKTAENFRALCTGEKGIGKAGKPLHYKGSLFHRIIKQFMIQGGDFTAGNGTGGESIYGAKFEDENFELKHDRPFLLSMANAGPGTNGSQFFITTVQTPHLDGKHVVFGEVLSGKSVVRQLENLTTQADKPTKDAVIADCGELSGSEAITADTKTADAYGDEYEDFPEDQVSGNETLSATQILKIASDCKEFGNKAFKGGDLSVALDKYQKGLRYLNEDPDLDNESDETKSKLSTLRISLNTNAALMNFKLEAWDDTVRSANGALAVAGISGKEKAKALYHRGRAQLRLKDEDAALESLGEAQMVDPENAAVAKELAEVKKAAAARRAKEKAAYKKFFS

SEQ ID NO: 938 - DNA, 627 bp, Podospora anserina DSM 980
  CDS (1)..(627)
atgttcagcctcaagcgggtcgtcctgaccgccaccgccctcctgggtgtgtcgatggttgctttctcccaggttgctgaggctgccaagggccccaagatcacccacaaggtctacttcgacatcacccacggtgatgagcccctcggccgcatcgtcatgggtctctacggcaagaccgtccccaagaccgctgagaacttccgcgctcttgccactggcgagaagggcttcggttatgaggggtctaccttccaccgtgttatcaagcagtttatgatccaaggtggtgacttcaccaagggtgatggcactggcggcaagtccatctacggcgaaaagtttgccgatgagaacttcaagctcaagcacaccaagaagggcattctctccatggccaacgccggaaaggacaccaacggctcccagttcttcatcaccactgttgttacttcctggctcgatggccgccacgtcgtcttcggcgaggtcctcgagggctacgatatcgtcgagaagatcgagaacgtcaagacccagcctggtgacaagcccgagaagacggtcaagatcgccaagtctggcgagctggaggtccccgaagaaggtatccacgtggaactctaa

SEQ ID NO: 939 - protein, 208 aa, Podospora anserina DSM 980
MFSLKRVVLTATALLGVSMVAFSQVAEAAKGPKITHKVYFDITHGDEPLGRIVMGLYGKTVPKTAENFRALATGEKGFGYEGSTFHRVIKQFMIQGGDFTKGDGTGGKSIYGEKFADENFKLKHTKKGILSMANAGKDTNGSQFFITTVVTSWLDGRHVVFGEVLEGYDIVEKIENVKTQPGDKPEKTVKIAKSGELEVPEEGIHVEL

SEQ ID NO: 940 - DNA, 549 bp, Podospora anserina DSM 980
  CDS (1)..(549)
atgccgccgactgtactcccagcgtcggggaatcccctcgtcttcttcgacatcactcttggcggtgaacccctcggccgcatcaccttcgaactctttgccaatgtggtccccaggacagccgagaacttccgccagttctgcaccggcgagcacaagaacaaccaaaaccggccccagggctacaagggctccaagttccacagaatcatccccaatttcatgtgccagggcggtgacttcctcaatggggatggcaccgggtcgacgtgtatctacgggaccaagtcctttgcggatgagaattttacgctgaagcatgataaggctgggttgttgagtatggctaacgcagggccaaatacaaacggcagccagttcttcatcacgacggtgccaacgccatttttggacaacaagcatgtggtgtttgggcaggtggtggatgggatggatgtggtcaagaaaatggagaatacgaaaacgggatacaaggggaaggatgtgccgaacctggacgtggttatcgctcagtgtggagagatgtag

SEQ ID NO: 941 - protein, 182 aa, Podospora anserina DSM 980
MPPTVLPASGNPLVFFDITLGGEPLGRITFELFANVVPRTAENFRQFCTGEHKNNQNRPQGYKGSKFHRIIPNFMCQGGDFLNGDGTGSTCIYGTKSFADENFTLKHDKAGLLSMANAGPNTNGSQFFITTVPTPFLDNKHVVFGQVVDGMDVVKKMENTKTGYKGKDVPNLDVVIAQCGEM

SEQ ID NO: 942 - DNA, 546 bp, Pyrenophora tritici-repentis Pt-1C-BFP
  CDS (1)..(546)
atggccgacactaccgagcccaacccaatcgtcttcttcgacatcactctaggaggagaaaaactgggaagaatcaagatggaactcttcaaggatgtcgtcccaaagactgccgaaaactttcgtcagttttgcacgggcgaaaccaagaatagtcgggggcagccgcagggttacaagggctgcaagttccatcgtgtcatcaaaggcttcatgatccaaggtggcgatttcataaacggcaacgggagcggctcaagaacgatttggggcgtggagaagtttgccgatgagaactttaccctaaagcacgacaagcctggtctgctgtccatggcaaatgctggcccaaacacgaacggatgtcaattcttcataatcacagccaagaatggaacacctcatctcaatggaaagcacgttgtctttggtaatgtcattgaaggtatggacgtcgtgaccaagattgagaacacgcgaacagtagccaacccggaaggaaagcctgttcaagacattgccattgcacagtgtggcgagatgtaa

SEQ ID NO: 943 - protein, 181 aa, Pyrenophora tritici-repentis Pt-1C-BFP
MADTTEPNPIVFFDITLGGEKLGRIKMELFKDVVPKTAENFRQFCTGETKNSRGQPQGYKGCKFHRVIKGFMIQGGDFINGNGSGSRTIWGVEKFADENFTLKHDKPGLLSMANAGPNTNGCQFFIITAKNGTPHLNGKHVVFGNVIEGMDVVTKIENTRTVANPEGKPVQDIAIAQCGEM

SEQ ID NO: 944 - DNA, 618 bp, Drosophila ananassae
  CDS (1)..(618)
atgaagttgattttatccgcgctgctggtagcccttgtggccggcattgtctgtgccgacgacgccaaagggcccaaagtgaccgacaaggtcttctttgacatcaccattggcggtgagcccgctggacgtgttgtgattggactgtttggcaagactgttgagaagaccgtgaggaacttcaaggagctggcggagaagccccagggcgaaggctacaagggtagcaagttccaccgcatcatcaaggacttcatgatccagggtggcgacttcaccaagggcgatggcaccggcggacgttccatctatggcgagcgcttcgaggacgagaacttcaagctgaagcactatggcgccggctggctgagcatggccaacgctggcaaggacaccaacggctcccagttcttcatcaccaccaagcagaccagctggttggatggccgccacgtcgtcttcggcaaggtcctgtccggcatgaatgttgtgcgccaaatcgagaacagcgccaccgatgcccgcgaccgtcccgtcaaggatgttgtcatcgccaacagtggcactctggatgtcccagagccgttctccgttgccaaggctgatgccaccgattaa

SEQ ID NO: 945 - protein, 205 aa, Drosophila ananassae
MKLILSALLVALVAGIVCADDAKGPKVTDKVFFDITIGGEPAGRVVIGLFGKTVEKTVRNFKELAEKPQGEGYKGSKFHRIIKDFMIQGGDFTKGDGTGGRSIYGERFEDENFKLKHYGAGWLSMANAGKDTNGSQFFITTKQTSWLDGRHVVFGKVLSGMNVVRQIENSATDARDRPVKDVVIANSGTLDVPEPFSVAKADATD

SEQ ID NO: 946 - DNA, 552 bp, Drosophila ananassae
  CDS (1)..(552)
atgcccaactggaaccaaatacaatcgcagctgcgtagctcaaataatccggtagtctttttcgatattgccgtgggcacaacagaaatcggccgaatgatatttgagttgtttgcagacacagtgccgcgcacggcggagaactttcgccagttctgcaccggagagtaccgaccagatggcgtgcccatcggatacaaaggtgccagcttccaccgcgtaattaaggatttcatgatccaaggcggtgatttcgtacagggcgatggcacgggcgtaaccagcatttacggcaacacgtattccgacgagaacttcaccctcaaacacgactctccagggctcttgtccatggccaacagcgggaaggacaccaacggctgtcagtttttcatcacctgcgcaaagtgtaactttttggacggcaagcacgttgtgttcggccgagttctcgacggacttttaatcatgaggaagattgagaacgttcccaccggacccaataacaagccaaagttgccggtaacgatatcccaatgtggacaaatgtag

SEQ ID NO: 947 - protein, 183 aa, Drosophila ananassae
MPNWNQIQSQLRSSNNPVVFFDIAVGTTEIGRMIFELFADTVPRTAENFRQFCTGEYRPDGVPIGYKGASFHRVIKDFMIQGGDFVQGDGTGVTSIYGNTYSDENFTLKHDSPGLLSMANSGKDTNGCQFFITCAKCNFLDGKHVVFGRVLDGLLIMRKIENVPTGPNNKPKLPVTISQCGQM

SEQ ID NO: 948 - DNA, 552 bp, Drosophila erecta
  CDS (1)..(552)
atgcctaactggaatcaaatacagtcccaactgagacactccaacaatccggtcgtttttttcgacattgccgtaggcacaacggaaatcggtcgaatgatattcgaactctttgcggacacagtgccccgcacggcggaaaacttccgacagttctgcaccggcgagtaccgaccggatggcgttcccattggctacaaaggcgccagtttccatcgagtgatcaaggacttcatgatccaaggcggcgattttgtgcagggcgacggcaccggcgtaaccagcatatacggcaacacattcggcgacgagaatttcaccctgaagcacgactcgcccggactcctttccatggcaaacagtggcaaggagaccaacggctgccagttctttatcacctgcgccaagtgcaactttttagacggcaaacacgtggtattcggtcgcgtccttgatggtctgctcattatgcgtaagatcgagaacgtgcccacgggccccaataacaagccgaaactcccagtgaccatttcgcagtgcgggcaaatgtag

SEQ ID NO: 949 - protein, 183 aa, Drosophila erecta
MPNWNQIQSQLRHSNNPVVFFDIAVGTTEIGRMIFELFADTVPRTAENFRQFCTGEYRPDGVPIGYKGASFHRVIKDFMIQGGDFVQGDGTGVTSIYGNTFGDENFTLKHDSPGLLSMANSGKETNGCQFFITCAKCNFLDGKHVVFGRVLDGLLIMRKIENVPTGPNNKPKLPVTISQCGQM

SEQ ID NO: 950 - DNA, 552 bp, Drosophila grimshawi
  CDS (1)..(552)
atgccgaattggaatcaaattcaatcgcaattgcgcagctcaaacaatcccgttgtcttcttcgacatagccgtgggcacaaccgaaattggacgcatgatttttgagttatttgctgacactgtgccacgaacggcggaaaactttcgacaattctgcacgggagaatatagaccggatggcgtgccaattggctacaagggtgccagttttcatcgagtcatcaaggatttcatgatacaaggcggcgactttgtgcagggcgatggcaccggcgtcaccagcatttatggcaacacattctccgacgagaactttacgctcaagcacgactcacccggcctgctggccatggccaacagtgggcgggacacgaacggctgccagttcttcatcacgtgtgcgaggtgtaactttctagatgggaaacatgttgtctttggtcgcgttctggatggacttctaatcatgcgcaaaattgagaacgtgccaacgggaccgaataataaacccaaactgcccgttacaatatcacaatgtggccaaatgtag

SEQ ID NO: 951 - protein, 183 aa, Drosophila grimshawi
MPNWNQIQSQLRSSNNPVVFFDIAVGTTEIGRMIFELFADTVPRTAENFRQFCTGEYRPDGVPIGYKGASFHRVIKDFMIQGGDFVQGDGTGVTSIYGNTFSDENFTLKHDSPGLLAMANSGRDTNGCQFFITCARCNFLDGKHVVFGRVLDGLLIMRKIENVPTGPNNKPKLPVTISQCGQM

SEQ ID NO: 952 - DNA, 552 bp, Drosophila willistoni
  CDS (1)..(552)
atgcctaactggaatcaaatccaaactcaactgcggagcagcgtcaaccctgttgtgttctttgacatagctgtaggaaccacagagattggacgcattattttcgagttgttcgccgacgctgtaccccgtactgcagaaaattttcgacaattttgtacaggagaataccgtccagatggagtgcctataggatataagggggcaagtttccaccgagtaattaaagactttatgatccagggcggcgattttgtgcaaggcgacggaactggggtaacaagcatttatggtattaaattttcagacgagaactttatattgaaacacgattcccccgggctactggctatggccaacagcggcaaagataccaatggctgtcagtttttcatcacatgcgccaagtgcaactttctcgatggtaagcatgttgtcttcggaagagtattggatggattacttataatgcgaaaaattgaaaatgttccgactgggccaaataataaaccaaaactgccgattactatctcacaatgtgggcagatgtag

SEQ ID NO: 953 - protein, 183 aa, Drosophila willistoni
MPNWNQIQTQLRSSVNPVVFFDIAVGTTEIGRIIFELFADAVPRTAENFRQFCTGEYRPDGVPIGYKGASFHRVIKDFMIQGGDFVQGDGTGVTSIYGIKFSDENFILKHDSPGLLAMANSGKDTNGCQFFITCAKCNFLDGKHVVFGRVLDGLLIMRKIENVPTGPNNKPKLPITISQCGQM

SEQ ID NO: 954 - DNA, 552 bp, Drosophila yakuba
  CDS (1)..(552)
atgcctaattggaatcaaatacagtcccaactgagaaactccaacaatccggtcgtgtttttcgacattgccgtaggcacaacggaaatcggccgaatgatatttgaactctttgcggacacagtgccccgcacagcggaaaactttcggcagttctgcaccggcgagtaccgaccggatggcgtacccattggctacaaaggcgccagtttccatcgggtgatcaaggacttcatgatccagggcggcgactttgtgcagggcgacggcaccggcgtaaccagcatatacgggaacacattcggcgacgagaattttaccctgaagcacgactcgcccggactcctttccatggcgaacagtggcaaagagacaaacggctgccagttctttatcacctgcgccaagtgcaattttctagacgggaaacacgtagtattcggtcgggtcctggatggtctgctcattatgcgcaagatcgagaacgtgcccacgggccccaataacaagccgaagctcccagtgaccatttcgcagtgcgggcaaatgtag

SEQ ID NO: 955 - protein, 183 aa, Drosophila yakuba
MPNWNQIQSQLRNSNNPVVFFDIAVGTTEIGRMIFELFADTVPRTAENFRQFCTGEYRPDGVPIGYKGASFHRVIKDFMIQGGDFVQGDGTGVTSIYGNTFGDENFTLKHDSPGLLSMANSGKETNGCQFFITCAKCNFLDGKHVVFGRVLDGLLIMRKIENVPTGPNNKPKLPVTISQCGQM

SEQ ID NO: 956 - DNA, 618 bp, Drosophila yakuba
  CDS (1)..(618)
atgaagctgttcttatccgttttcgtggtggccctggtggccggcatcgttgttgccgacgatagcaagggacccaaagtgaccgataaggttttctttgacatcaccattggcggtgagcccgctggccgcgtcgagatcggtctcttcggcaagacggttccaaagactgtggagaacttcaaggagctggcgctgaagccccagggcgaaggctacaagggcagcaagttccaccgcatcatcaaggacttcatgatccagggcggtgacttcaccaagggcgacggcaccggcggacgctccatctatggcgagcgcttcgaggatgagaactttaagctgaagcactacggcgccggctggttgagcatggccaatgctggcaaggacaccaacggatcgcagttcttcatcaccaccaagcagaccagctggctggatggacgccacgtcgtcttcggcaagatcctgtcgggcatgaatgtggtgcgccagatcgagaactcagccaccgatgcccgcgatcgtcccgttaaggatgtggtcatcgccaacagcggcaccctgcccgtttcggaggccttctccgtggccaaggccgatgccaccgactaa

SEQ ID NO: 957 - protein, 205 aa, Drosophila yakuba
MKLFLSVFVVALVAGIVVADDSKGPKVTDKVFFDITIGGEPAGRVEIGLFGKTVPKTVENFKELALKPQGEGYKGSKFHRIIKDFMIQGGDFTKGDGTGGRSIYGERFEDENFKLKHYGAGWLSMANAGKDTNGSQFFITTKQTSWLDGRHVVFGKILSGMNVVRQIENSATDARDRPVKDVVIANSGTLPVSEAFSVAKADATD

SEQ ID NO: 958 - DNA, 507 bp, Trichoplax adhaerens
  CDS (1)..(507)
atgagcaatccgagatgctttatggatattagcatcgataatgtccctaaggggaaaattctatttgaactgcgtgccgatgtaacacctaaaacagctgaaaattttcgtgctttatgtactggagagaaaggattcggttataaaggctcattctttcatagaattattcctcaattcatgtgccaaggtggcgattttaccaatcatgatggaactggtggtacatccatttatggtagaacgtttgatgatgaagatttcactattgcacatgatagacctggactcctttctatggctaacgctggacccaataccaacggatcgcagttctttattacaacggttcctacaccatggctagatggaaaacatgttgtctttggtcatgtcgtggatggtgttgatgtgcttaaagagatggaatctgttggtagtaatactggcaagccaaaagctaaaattgccatcactgcgtgtggccaggttgagcaagaagaataa

SEQ ID NO: 959 - protein, 168 aa, Trichoplax adhaerens
MSNPRCFMDISIDNVPKGKILFELRADVTPKTAENFRALCTGEKGFGYKGSFFHRIIPQFMCQGGDFTNHDGTGGTSIYGRTFDDEDFTIAHDRPGLLSMANAGPNTNGSQFFITTVPTPWLDGKHVVFGHVVDGVDVLKEMESVGSNTGKPKAKIAITACGQVEQEE

SEQ ID NO: 960 - DNA, 543 bp, Trichoplax adhaerens
  CDS (1)..(543)
atggctttagcaccgagtaatccttcaaatcctattgttttcttcgatatttctattggtggtcaggaagtaggtagaatgaagatggaactatttgctgatgctgtaccgaaaacagcagaaaattttaggcaattttgtacaggagaatacaggactgcaggtgtccctgttggttataaagaatgccaatttcacagagttattaaagattttatggttcaaggtggcgactttgtcaagggagatggaactggcgtcttcagcatctacaacgaaactaactttaaagatgaaaactttgagcataagcatgtctccgcaggcatactttccatggcaaacgctaacagtggtcccggtactaatggctgtcagttctttataacttgtacgaaatgtgaattcttggatggaaagcacgttgttttcggacgtgttctagatggtatgctaatactaagaaaaattgagaatgttccaacgggtccgaataacagaccaaagttaccggtagttattacccaatgcggcgaaatgtaa

SEQ ID NO: 961 - protein, 180 aa, Trichoplax adhaerens
MALAPSNPSNPIVFFDISIGGQEVGRMKMELFADAVPKTAENFRQFCTGEYRTAGVPVGYKECQFHRVIKDFMVQGGDFVKGDGTGVFSIYNETNFKDENFEHKHVSAGILSMANANSGPGTNGCQFFITCTKCEFLDGKHVVFGRVLDGMLILRKIENVPTGPNNRPKLPVVITQCGEM

SEQ ID NO: 962 - DNA, 681 bp, Drosophila pseudoobscura pseudoobscura
  CDS (1)..(681)
atggtctttttcggtgcaactctggtacgacacattcggaaccacaagtcggcggcatttcagattgcagagtccgccattttagctaagaaaataaccctagcttcgtcagcgagcaccggtaacagaggtcagttgcagtttggaattcagtttgttcgcgaatattcgagagcgtcgaaaatgagtactttgcctagagtatttttcgatatgaccgccgatggggagcccctcggtaggattatcatggagctgcgctccgatgtggtacccaagactgccgaaaatttccgtgccctgtgcactggcgagaagggtttcggctacaagggctccattttccatcgcgttattcccaacttcatgtgccaaggaggcgacttcaccaaccacaacggcactggcggcaagtccatctacggcaacaagttccccgatgagaacttcctgctgaagcacaccggcactggcattctgtcgatggccaatgcgggcgccaacaccaatggatcccagttcttcatttgcaccgtgaagaccgcttggttggacaacaagcatgttgtcttcggcgaggttgttgagggcttggacattgtcaagaagattgaatcttttggctctcagtccggcaagacctccaagaagatcatggtggctaacagtggttctctttaa

SEQ ID NO: 963 - protein, 226 aa, Drosophila pseudoobscura pseudoobscura
MVFFGATLVRHIRNHKSAAFQIAESAILAKKITLASSASTGNRGQLQFGIQFVREYSRASKMSTLPRVFFDMTADGEPLGRIIMELRSDVVPKTAENFRALCTGEKGFGYKGSIFHRVIPNFMCQGGDFTNHNGTGGKSIYGNKFPDENFLLKHTGTGILSMANAGANTNGSQFFICTVKTAWLDNKHVVFGEVVEGLDIVKKIESFGSQSGKTSKKIMVANSGSL

SEQ ID NO: 964 - DNA, 537 bp, Hydra magnipapillata
  CDS (1)..(537)
atggtgcaaatactaaattctgttgtttttttcgacatagaagttggtggcaagaaacttggtagaattgtaataggattatttggaaaaactgtccctaaaactgttacgaattttgttgagttatcaaaaaaaccaaaaggagaaggttataaaggcagcaagtttcatagagttattaaagaatttatgattcaaggaggagatttcactaatggtgatggaacaggaggaaagagtatctatggtatgaaatttaaagatgaaaactttaaattgaaacacgctggtcctggttatttgtcaatggcaaacgctggtaaagatactaatggttctcaatttttcatttgcaccgtcaagacatcttggctcgatggaaaacacgttgtatttggaaaagttttagagggaatggatgttgtcactgctattgaaaacactcctgtgaatggaagcacgcctaaaagtgatgttattattgccgatagtggtgaacttgaattaaaggaaccttttaatctagacaaagaatga

SEQ ID NO: 965 - protein, 178 aa, Hydra magnipapillata
MVQILNSVVFFDIEVGGKKLGRIVIGLFGKTVPKTVTNFVELSKKPKGEGYKGSKFHRVIKEFMIQGGDFTNGDGTGGKSIYGMKFKDENFKLKHAGPGYLSMANAGKDTNGSQFFICTVKTSWLDGKHVVFGKVLEGMDVVTAIENTPVNGSTPKSDVIIADSGELELKEPFNLDKE

SEQ ID NO: 966 - DNA, 537 bp, Hydra magnipapillata
  CDS (1)..(537)
atggcttctagtgttgggaacagcgacaatccaattgtatttttggatattagtattggtggtcaggatgttgggcgaatgaaaattgagttatttgctgatgttgttcctaaaacagctgaaaactttcgtcagttttgtactggagagtacttaaaagacaaagttcctattggttataaaggtgctactttccacagagtaataaaagattttatgattcaaggtggagattttgttaagggtgatggaagtggtgttagtagcatatatggtggaatatcatttccggatgaaaattttaaactaaaacatgatgcccctggtttgttgtctatggcaaacagtggtccaaatacaaatggttgtcagttcttcattacctgtgcaaagtgtgactttttagatggcaaacatgttgtatttggaaaagttattgatggtttacttgtaatgcggaaaatagagaatgttgcaactggtgcgaataatcgacctaaattatctgttgtcatcacacagtgcggagaaatgtag

SEQ ID NO: 967 - protein, 178 aa, Hydra magnipapillata
MASSVGNSDNPIVFLDISIGGQDVGRMKIELFADVVPKTAENFRQFCTGEYLKDKVPIGYKGATFHRVIKDFMIQGGDFVKGDGSGVSSIYGGISFPDENFKLKHDAPGLLSMANSGPNTNGCQFFITCAKCDFLDGKHVVFGKVIDGLLVMRKIENVATGANNRPKLSVVITQCGEM

SEQ ID NO: 968 - DNA, 606 bp, Hydra magnipapillata
  CDS (1)..(606)
atggctgtatttagttgcctagtttttatttgtgcagtagtgttgtgctctgctgaagatcttttagtcacgaaaaaggtttatttcgatttggcggaagatggagtttcgattggaagaatagaaataggactttttggagatgttgtcccaaaaactacaagaaatttttatgaactagtaacacacaataaaggattcggatataaaggtagtaaattccacagagtaattgataatttcatgatgcagggtggtgattttacaaatggtgacggaacaggtggcaaaagtatatatggagaaaggtttcctgatgaaaactttaaattaaatcattatggagctggttggttatccatggcaaatgctggtccagacacaaacggttcacaattttttattacatttaccaaaacaccttggttagatggacgtcatactgtttttggaaaagtaaccaaaggaatggatgttgttaagcgagtaggaaagtcaaaaacaaacaatcgagaccaacctctaaaagatattacaatagcagattgtggtgcattagaagttgaaaaaccgtttccagttgaaaagaaggatgctgatcaataa

SEQ ID NO: 969 - protein, 201 aa, Hydra magnipapillata
MAVFSCLVFICAVVLCSAEDLLVTKKVYFDLAEDGVSIGRIEIGLFGDVVPKTTRNFYELVTHNKGFGYKGSKFHRVIDNFMMQGGDFTNGDGTGGKSIYGERFPDENFKLNHYGAGWLSMANAGPDTNGSQFFITFTKTPWLDGRHTVFGKVTKGMDVVKRVGKSKTNNRDQPLKDITIADCGALEVEKPFPVEKKDADQ

SEQ ID NO: 970 - DNA, 495 bp, Schizosaccharomyces japonicus yFS275
  CDS (1)..(495)
atgtccaaggtgtttttccagtgtgtcgctaacggcaagcctctgggcaaaatcgttttcaagttgtttgatgagtcggtgccaaagaccaccaagaacttccgcgccctgtgcacgggggaaaaaggctttggctatgcaggctccacgttccatcgtatcatccccgacttcatgatccaaggcggtgacttcaccaaccacaatggaaccggtggaaagtccatttacggaaagtacttccccgacgagaacttcaagcacaagcacgaccgtgttggcttgttgtccatggctaacgccggccgaaacaccaatggctcccaatttttcattacaaccaccatttgcgactggctcgatggcaagcacgtcgtcttcggcgaggttgaagagggcatggacgtcgtccgcgccatcgagtccctgggctcccctagtggtcagcctcagtgcaaggtcgagatcgaaaagtgcggtgaagtgaagcagtaa

SEQ ID NO: 971 - protein, 164 aa, Schizosaccharomyces japonicus yFS275
MSKVFFQCVANGKPLGKIVFKLFDESVPKTTKNFRALCTGEKGFGYAGSTFHRIIPDFMIQGGDFTNHNGTGGKSIYGKYFPDENFKHKHDRVGLLSMANAGRNTNGSQFFITTTICDWLDGKHVVFGEVEEGMDVVRAIESLGSPSGQPQCKVEIEKCGEVKQ

SEQ ID NO: 972 - DNA, 483 bp, Schizosaccharomyces japonicus yFS275
  CDS (1)..(483)
atgtctaacttgtttttagctaacggccaaccccttggtcgcatcgttttcaagctctttgacgacgttgtccccaagactgccgccaacttccgtgctctctgcactggcgaaaagggtttcggctacgccaactctaccttccaccgtgtcatcccccaattcatgctccaaggtggtgacttcacccgcggtgacggtaccggtggaaagtccatctacggccacaagttccccgatgagaacttcgtcttgaagcacaacaagcccggtttgttgtccatggccaacgctggtcccaacaccaacggttcccaattcttcatcaccaccgtcgtcacctcctggttggacggcaagcacgttgtcttcggtgaggtcgttcaaggtatggacgtcgtcaagaaggttgagtctttgggttccaactccggtgctacccgtgcccgcattgtcattgacaacagcggtgttgttgcttaa

SEQ ID NO: 973 - protein, 160 aa, Schizosaccharomyces japonicus yFS275
MSNLFLANGQPLGRIVFKLFDDVVPKTAANFRALCTGEKGFGYANSTFHRVIPQFMLQGGDFTRGDGTGGKSIYGHKFPDENFVLKHNKPGLLSMANAGPNTNGSQFFITTVVTSWLDGKHVVFGEVVQGMDVVKKVESLGSNSGATRARIVIDNSGVVA

SEQ ID NO: 974 - DNA, 585 bp, Schizosaccharomyces japonicus yFS275
  CDS (1)..(585)
atgaagtggtttcgtttgactttccttttaacgcttctggttgcgtttgcatccgcttacaagggacctaagatcaccgacaaggtgtactttgacgttgaacaagatggtaactcccttggtcgtattgctgaaaacttccgtgctctttctactggtgaacaaggctttggctatgagaacactattttccatcgcgttatccccaagtttatgatccaaggtggagacttcactaactttgacggcactggtggcaagtctatctacggtactcgcttccccgatgagaacttcaagatcaagcacagtcgtaagggtcttctcagcatggccaacgccggtcccgactctaatggttcccaatttttcattacgaccacccccactccttggttggatggtcgtcatgttgtgttcggcgaggttctcgagggttacgatattgtcgaggccatctcccgtgttcagcgtgatgctcgtgacaagcctatcaaggacgtcaagattgtcaagtctggtgttctcgctgaggaggaagaaaagagtgacaaggaggctcaagaagagggttccgagttgtaa

SEQ ID NO: 975 - protein, 194 aa, Schizosaccharomyces japonicus yFS275
MKWFRLTFLLTLLVAFASAYKGPKITDKVYFDVEQDGNSLGRIAENFRALSTGEQGFGYENTIFHRVIPKFMIQGGDFTNFDGTGGKSIYGTRFPDENFKIKHSRKGLLSMANAGPDSNGSQFFITTTPTPWLDGRHVVFGEVLEGYDIVEAISRVQRDARDKPIKDVKIVKSGVLAEEEEKSDKEAQEEGSEL

SEQ ID NO: 976 - DNA, 525 bp, Schizosaccharomyces japonicus yFS275
  CDS (1)..(525)
atgtcatcggaactcccagtagtattttttgacattgctattggcaatcaaccaattggccgtatcttaatgaagctttttgcggacgtggtaccaaaaacggcagagaactttcgacaattctgtacaggtgaagcaaaagggccagacaagaaacctattggctacaagaactgcaccattcatcgagtaatccaagacttcatgatacaaggaggggactttgtcagtggtgatggaacaggcagcaaatgtatctacggatccagaacgtttgacgatgagaactttgacctgaagcatgaccgccctggtctgctgagcatggccaatgctggtccaaataccaatggatgtcagttcttcattaccaccgttccatgcagcttccttgatggaaagcatgttgtattcggcgaggtaattgaaggcttcgatgtcgtcaagaaaatagaatcgacaccggtaaactctgactcgcgacctaaaacgcccgttcggattattgagtgcggtgaaatgtaa

SEQ ID NO: 977 - protein, 174 aa, Schizosaccharomyces japonicus yFS275
MSSELPVVFFDIAIGNQPIGRILMKLFADVVPKTAENFRQFCTGEAKGPDKKPIGYKNCTIHRVIQDFMIQGGDFVSGDGTGSKCIYGSRTFDDENFDLKHDRPGLLSMANAGPNTNGCQFFITTVPCSFLDGKHVVFGEVIEGFDVVKKIESTPVNSDSRPKTPVRIIECGEM

SEQ ID NO: 978 - DNA, 537 bp, Branchiostoma floridae
  CDS (1)..(537)
atggcggacgtgaaaccctccaactcgaataatcccattgttttcttcgatatttctgtcggcggacaggaaattggcaggataaagatggagctgtttgcagacatcgttccaaaaactgctgagaatttcagagtactctgtacaggagaatacagaaaggatggagtgcctattgggttcaaggggtcatcattccacagagtcattaaggacttcatgatccaaggaggagattttgtcaatcatgatggcacaggactgaccagtatctacggcggtgcatttcctgatgagaacttcaaactaaaacacacaggaccaggcatgctgtccatggccaacagcggtcccaacacgaacggctgtcagttcttcatcacctgtgccaagtgtgacttcctggatggcaaacacgtggtgttcggtaaggtggtggatggaatgttggtagtccggaaggtggagaatgtgccaactgggcccaacaataaacccaagatccctgtcactgtggcacagtgtggggagatgtga

SEQ ID NO: 979 - protein, 178 aa, Branchiostoma floridae
MADVKPSNSNNPIVFFDISVGGQEIGRIKMELFADIVPKTAENFRVLCTGEYRKDGVPIGFKGSSFHRVIKDFMIQGGDFVNHDGTGLTSIYGGAFPDENFKLKHTGPGMLSMANSGPNTNGCQFFITCAKCDFLDGKHVVFGKVVDGMLVVRKVENVPTGPNNKPKIPVTVAQCGEM

SEQ ID NO: 980 - DNA, 627 bp, Branchiostoma floridae
  CDS (1)..(627)
atggcagcggtactgcgtcagttttccaccgtcttctcccccacaagactggcctgccagactggcgtggccttctttacactgcaggctgcagggacagagcggctagttaccaagaaagtctacttcgacatcgagatcggcggagagaaggcaggccgtgtcgtcatggggctgtttggcgacatcacaccaaagacggcggcgaacttcgagcagcttacaactcacgagaagggctttggttacaagggcagcgccttccatagagtcatcaaaaagttcatgatccaaggtggtgacttcaccagaggtgacgggacaggtgggaagtccatatatggtaacaagttcccagatgagaacttcatgctgtcccacacagaacctggcctactcagtatggctaatgcaggtcccaacactaatggttcacagttcttcattacaaccgtccccacgccgtggctcaacggtcgccatgtcgtgttcgggaaggttctggagggaatggacgtagtgaccagggtcgagaacagtgccgtggacaggcgcgaccgtcccaagaaagcgtgcgtgatcgcggactgcggcacactagagctggagaaaccgttccctgtgtga

SEQ ID NO: 981 - protein, 208 aa, Branchiostoma floridae
MAAVLRQFSTVFSPTRLACQTGVAFFTLQAAGTERLVTKKVYFDIEIGGEKAGRVVMGLFGDITPKTAANFEQLTTHEKGFGYKGSAFHRVIKKFMIQGGDFTRGDGTGGKSIYGNKFPDENFMLSHTEPGLLSMANAGPNTNGSQFFITTVPTPWLNGRHVVFGKVLEGMDVVTRVENSAVDRRDRPKKACVIADCGTLELEKPFPV

SEQ ID NO: 982 - DNA, 495 bp, Branchiostoma floridae
  CDS (1)..(495)
atgaatcgtccaaaggtctattttgacatcactgccgatggtgcaccagtgggccgaatcgtcatggagctccgagccgatgttgtccccaagacagcagagaacttccgagccctgtgtaccggggagaagggttttgggtacaagggctctaccttccaccgggtcatcattgatttcatgtgccaggggggagacttcaccaaccataacggaaccggaggcaagagcatctacggcaacaagttcccagatgagaacttccaactcaagcacacaggcccgggtatcctgtccatggccaacgcaggcccgaacaccaacggttcacagttctttctgtgcactgtaaagacttcttggctggacggcaagcacgtggtgttcgggagcgtcgtggagggcatggacgtggtgaagaaggtcgagtcgtacggcagcgaggcaggcaagacttccaagaagatcgtcatcgccgattgcgggcagctgtga

SEQ ID NO: 983 - protein, 164 aa, Branchiostoma floridae
MNRPKVYFDITADGAPVGRIVMELRADVVPKTAENFRALCTGEKGFGYKGSTFHRVIIDFMCQGGDFTNHNGTGGKSIYGNKFPDENFQLKHTGPGILSMANAGPNTNGSQFFLCTVKTSWLDGKHVVFGSVVEGMDVVKKVESYGSEAGKTSKKIVIADCGQL

SEQ ID NO: 984 - DNA, 495 bp, Branchiostoma floridae
  CDS (1)..(495)
atggcaaagccaagggtcttcttcgacattaccgccgatggtgcaccactggggcgtattgttatggagctccgagctgatgttgtccccaagacggcagagaacttccgcgccctatgcactggagagaagggttttgggtacaagggttcgtccttccaccgtgtcattactgacttcatgtgccagggaggtgacttcacccggggaaacggcaccggaggaaagagcatctacggcgagaagtttgcagatgagaacttccagctgaagcacactggtgcgggtgtcctgtccatggctaatgctggccccaacaccaatggttcacaattctttctgtgtactgtaaagacagcatggctggatggcaagcatgttgtgtttgggagtgtcgtggaaggaatggatgtggtgaagaaggtagagggctatggaagcagcagtggaaagacctccaagaagattgtcatcgctgattgtggtcagctgtaa

SEQ ID NO: 985 - protein, 164 aa, Branchiostoma floridae
MAKPRVFFDITADGAPLGRIVMELRADVVPKTAENFRALCTGEKGFGYKGSSFHRVITDFMCQGGDFTRGNGTGGKSIYGEKFADENFQLKHTGAGVLSMANAGPNTNGSQFFLCTVKTAWLDGKHVVFGSVVEGMDVVKKVEGYGSSSGKTSKKIVIADCGQL

SEQ ID NO: 986 - DNA, 669 bp, Branchiostoma floridae
  CDS (1)..(669)
atgttattcgggcagcgttttgtacggaggtacctgtgggcggtagtgatagttgctatcctggcggcctgtgtcatctttctgctgctaccaaacgacagagatccacagggaccaaaggtgacagagaaggtgtggtttgacatcaccatcggaggtgagccggcgggccgagtcgagatcggactcttcggcaagatcgtcccgaaaacagtccggaatttcgcgacgctggcgaagagagagaaaccagaaggctacaagggatgtattttccaccgagtcatgaagggtttcatgatccagggaggagacttcacacacggggacggcacaggcggatacagcatctatggcggccatttcgaggacgagaacttcgagctgcagcattacggagcgggctggctgagcatggcgaacgctggtcaggacacaaacggctcccagttctttatcaccaccgtcaaaacctcctggctggacggcaaacacgtcgtcttcggaaaggtccttaaaggcatggatgtcatcaggaaaatagaagaccaggaaacatccgacaagaacagaccattgaaggaggtcaaaatctctgacgtaggacatgaagatgtgtggagtccattcgttgtgctgcaggaaggagccatggaatctaccatgtag

SEQ ID NO: 987 - protein, 222 aa, Branchiostoma floridae
MLFGQRFVRRYLWAVVIVAILAACVIFLLLPNDRDPQGPKVTEKVWFDITIGGEPAGRVEIGLFGKIVPKTVRNFATLAKREKPEGYKGCIFHRVMKGFMIQGGDFTHGDGTGGYSIYGGHFEDENFELQHYGAGWLSMANAGQDTNGSQFFITTVKTSWLDGKHVVFGKVLKGMDVIRKIEDQETSDKNRPLKEVKISDVGHEDVWSPFVVLQEGAMESTM

SEQ ID NO: 988 - DNA, 663 bp, Branchiostoma floridae
  CDS (1)..(663)
atgcttcattttgtgcggagaaacatgagggtgcttctaggagtcagtgccatcgtggcctgtgtcgtcttcttactgctgccaaaccatgaaactgaagcggctaagggtcccaaagtgacggacaaggtttggtttgatatcaccatcggagatgaggctatcgggcggatcgagatcggattgtttggcaagactgtgcccaaaacagtcaagaacttcattgacttggccaaggaagaaaaaccaaatggctacaagggcagtattttccaccgtgtcatcaaagacttcatgatccagggtggtgacttcactcgtggggatggcaccggaggcaagagcatctatggtgaccgttttgaggatgagaacttcaaactgcagcactacggcccaggctggctgagcatggcaaatgctggcaagaacacaaacggctcccagttcttcattaccacaacaaagacagaatggttgaacggcaagcatgttgtctttgggaaagtggtgaaaggcatgaatgttgtgaggaagatcgaggataccaagaaagatggcagagataggccaaacaaagaggtgaaaattgctgatgctggacacgagaaagtcaaagaaccgtttgctgttgaaaaagagggtgtagggaatgatgtttag

SEQ ID NO: 989 - protein, 220 aa, Branchiostoma floridae
MLHFVRRNMRVLLGVSAIVACVVFLLLPNHETEAAKGPKVTDKVWFDITIGDEAIGRIEIGLFGKTVPKTVKNFIDLAKEEKPNGYKGSIFHRVIKDFMIQGGDFTRGDGTGGKSIYGDRFEDENFKLQHYGPGWLSMANAGKNTNGSQFFITTTKTEWLNGKHVVFGKVVKGMNVVRKIEDTKKDGRDRPNKEVKIADAGHEKVKEPFAVEKEGVGNDV

SEQ ID NO: 990 - DNA, 495 bp, Branchiostoma floridae
  CDS (1)..(495)
atgtctaacccaaaagtctttttcgacatcaccgccgacggttattcgctgggccgaatcgtcatggagctccgtgccgatgttgtccccaagacagcagagaacttccgcgccctgtgtaccggggaaaagggtttcgggtacaagggctctaccttccaccgggtcatccctggcttcatgtgccaggggggcgacatcaccaagggcaacggaaccgggggcaagagcatctacggagagaagttcgcggatgagaacttcacgctcaagcacacaggcccgggtgtcctgtccatggccaacgtaggcccgaacaccaacggttcacagttctttctgtgcactgcaaagactgtttggctggacgataagcacgtggtgttcgggagcgtcgtggaaggcatggacgtgctgaagaagatcgagtcgtacggcagcgagacaggcggtactaagaataagatcgccatcgccgattgcgggcagctgtga

SEQ ID NO: 991 - protein, 164 aa, Branchiostoma floridae
MSNPKVFFDITADGYSLGRIVMELRADVVPKTAENFRALCTGEKGFGYKGSTFHRVIPGFMCQGGDITKGNGTGGKSIYGEKFADENFTLKHTGPGVLSMANVGPNTNGSQFFLCTAKTVWLDDKHVVFGSVVEGMDVLKKIESYGSETGGTKNKIAIADCGQL

SEQ ID NO: 992 - DNA, 570 bp, Vitis vinifera
  CDS (1)..(570)
atggcgtcgggagcaggcaatgccggggtggagtggcaccagaggcctccaaaccccaaaaaccccatcgtcttcttcgacatcaccatcggcaccatccccgccggtcgcatcaagatggagctcttctccgacatcgcccccaaaaccgctgaaaatttcaggcagttctgcactggcgagtacagaaaagctggattacctgttggttacaagggatgccagttccacagggtcatcaaagatttcatgattcaggctggtgattttgtcaagggtgatggtagtggatgcgtttccatctatggaagcaagttcgaggatgaaaattttattgctaaacacactggtcctggtctcttgtcaatggcaaatagtgggccaggtaccaatggttgtcagttctttatcacatgctcgaaatgtgactggcttgacaacaagcatgtggtattcgggagagttcttggagaaggccttttggttgtgagaaagatcgagaacgtagccactggaccaaacaaccggcctaaactggcatgtgtgattgctgaatgtggagaaatgtag

SEQ ID NO: 993 - protein, 189 aa, Vitis vinifera
MASGAGNAGVEWHQRPPNPKNPIVFFDITIGTIPAGRIKMELFSDIAPKTAENFRQFCTGEYRKAGLPVGYKGCQFHRVIKDFMIQAGDFVKGDGSGCVSIYGSKFEDENFIAKHTGPGLLSMANSGPGTNGCQFFITCSKCDWLDNKHVVFGRVLGEGLLVVRKIENVATGPNNRPKLACVIAECGEM

SEQ ID NO: 994 - DNA, 519 bp, Vitis vinifera
  CDS (1)..(519)
atggcaaaccctaaggtcttctttgacatgtccgtcggcggtgtgcctgccggtcggatcgtgatggagcttttcgccgacaccactccccgcactgctgaaaacttccgagcactctgcaccggcgagaagggaaccggccgcagcggaaagcctctgcactacaagggatctaagttccaccgggtcatccccgggttcatgtgccagggaggcgatttcaccgccggaaacggtactggtggcgaatcgatctatggatctaagttcgccgacgagaacttcatccacaagcacactggcccgggaatactatccatggcaaacgctggtcccggaaccaatggatcacagtttttcatctgtacagccaagacctcgtggcttgatggtaagcacgtggtgtttgggaaggtgattgaagggctggatgtggtgaaagccattgagaaggtcggatcttcgtctggatccaccgccaaggctgttgtggtcagtgactgcgggcagcttagttga

SEQ ID NO: 995 - protein, 172 aa, Vitis vinifera
MANPKVFFDMSVGGVPAGRIVMELFADTTPRTAENFRALCTGEKGTGRSGKPLHYKGSKFHRVIPGFMCQGGDFTAGNGTGGESIYGSKFADENFIHKHTGPGILSMANAGPGTNGSQFFICTAKTSWLDGKHVVFGKVIEGLDVVKAIEKVGSSSGSTAKAVVVSDCGQLS

SEQ ID NO: 996 - DNA, 519 bp, Vitis vinifera
  CDS (1)..(519)
atgacgaaccctagggtcttcttcgatgtctccatcggcggtgctcccgccggtaggattgtgatggagttgtacgctgacacaactccacgaaccgccgagaacttccgcgccctctgcaccggcgagaaaggcgtcggccggagcggcaagcctctgcacttcaaaggctcaatcttccacagagtgatcccaagtttcatgtgccagggcggcgacttcaccaggggcgacggcaccggcggcgagtccatctacggtgccaagttcgaggacgagaacttcatcaagaagcacaccggtcccggcatactgtcgatggcgaacgccggtcctggaacaaacggatcgcagttcttcatatgtacggataagacggagtggctggatgggaagcacgtggtgttcggccaggtggtagaggggatggatgtggtgaaggccgttgagaaggtaggctcaggctccggaaggaccgccaagaccgtgaagatcgaggactgtggtcagctctcttga

SEQ ID NO: 997 - protein, 172 aa, Vitis vinifera
MTNPRVFFDVSIGGAPAGRIVMELYADTTPRTAENFRALCTGEKGVGRSGKPLHFKGSIFHRVIPSFMCQGGDFTRGDGTGGESIYGAKFEDENFIKKHTGPGILSMANAGPGTNGSQFFICTDKTEWLDGKHVVFGQVVEGMDVVKAVEKVGSGSGRTAKTVKIEDCGQLS

SEQ ID NO: 998 - DNA, 519 bp, Populus trichocarpa
  CDS (1)..(519)
atggcaaaccctagagtctacttcgacatgacaatcggcggccaaccagccggccggatcgtgatggaactgttcgccgacacaactccacgaaccgcagagaacttcagggctctttgcactggagagaaaggaaaaggccgaagcggcaagcctttacactacaaaggctcgactttccatcgagtcatccctggattcatgtgccaaggaggagatttcactgcagggaatggaaccggaggggaatcgatctacggatcgaaatttgctgacgagaattttataaagaaacatactgggccagggattttgtccatggccaatgctgggcctgggactaacgggtcgcagttctttgtctgtacagccaagactgaatggctcgatggaaaacacgtggtgtttggaagagtagtggagggtctggatgttgtgaaggctatagagaagtttgggtcgtctaatggaaggacctctaagcctgttgttgttgctgactgtggacagctttcttga

SEQ ID NO: 999 - protein, 172 aa, Populus trichocarpa
MANPRVYFDMTIGGQPAGRIVMELFADTTPRTAENFRALCTGEKGKGRSGKPLHYKGSTFHRVIPGFMCQGGDFTAGNGTGGESIYGSKFADENFIKKHTGPGILSMANAGPGTNGSQFFVCTAKTEWLDGKHVVFGRVVEGLDVVKAIEKFGSSNGRTSKPVVVADCGQLS

SEQ ID NO: 1000 - DNA, 570 bp, Populus trichocarpa
  CDS (1)..(570)
atggcgtcaggaggaggaggagggagtgtagagtggcacttgagaccaccaaaccctaaaaacccaatcgtcttcttcgatgttacaatcggtaccatccctgctggtcgtatcaaaatggagctcttcgctgatattgcccctaaaaccgccgaaaatttcaggcagttttgcacaggcgagtacagaaaagctggattacctgttggttacaaagtatgtcaatttcatagagtgattaaggattttatgattcaagctggtgattttctcaagggtgatggtagtggttgtgtttctatttatgggcttaagtttgaggatgaaaattttgttgccaaacataccggccctggtctactttcaatggcaaatagtgggccaaataccaatggttgtcagtttttcatcacttgtgcaaaatgcgactggcttgacaataagcatgttgtatttgggagggtgcttggagatggtcttttggttattcgaaagatagagaatgtggcaacaggacccaacaaccgaccaaaactgccatgtgttattgcagaatgcggagaaatgtag

SEQ ID NO: 1001 - protein, 189 aa, Populus trichocarpa
MASGGGGGSVEWHLRPPNPKNPIVFFDVTIGTIPAGRIKMELFADIAPKTAENFRQFCTGEYRKAGLPVGYKVCQFHRVIKDFMIQAGDFLKGDGSGCVSIYGLKFEDENFVAKHTGPGLLSMANSGPNTNGCQFFITCAKCDWLDNKHVVFGRVLGDGLLVIRKIENVATGPNNRPKLPCVIAECGEM

SEQ ID NO: 1002 - DNA, 519 bp, Populus trichocarpa
  CDS (1)..(519)
atgtcaaatcctaaggtattctttgacatgaccgtcggcggccaatctgttggtcggatcgttatggagctgttcgccgatattgttccaaggacagccgagaatttccgtgctctttgcaccggtgagaaaggtgttggcaagtccggcaagccacttcacttcaaaggttcaagctttcaccgtgtgatccctaacttcatgtgccaaggtggtgacttcaccgccggaaacggcaccggcggtgaatcaatctatggggctaagtttgccgatgagaacttcgtgaagaagcacactggacctggtgtgctttccatggctaatgccggtcctgggactaatggatctcagttctttgtctgcactgttaagaccgaatggcttgacgggaaacatgtcgttttcggccaggttgttgaagggatggacgtggtgaaggcaattgagaaggttggatctggaaatggcaggacttcgaagcctgttgttgttgctgactgtggtcaactctcttag

SEQ ID NO: 1003 - protein, 172 aa, Populus trichocarpa
MSNPKVFFDMTVGGQSVGRIVMELFADIVPRTAENFRALCTGEKGVGKSGKPLHFKGSSFHRVIPNFMCQGGDFTAGNGTGGESIYGAKFADENFVKKHTGPGVLSMANAGPGTNGSQFFVCTVKTEWLDGKHVVFGQVVEGMDVVKAIEKVGSGNGRTSKPVVVADCGQLS

SEQ ID NO: 1004 - DNA, 621 bp, Populus trichocarpa
  CDS (1)..(621)
atgagcaagaagaagaatcctctcgtattcttagatgtgtccatcgacggagatcctgccgaaaggatttttatcgagcttttcgcagatgttgtccccaggactgccgagaattttcgggcactctgtacaggtgaaaagggtactggaaaaaccactgggaaacctctgcactacaagggctcttctttccatcgaataatcaaagaattcatggcccaaggtggtgacttttcgaagggaaatggcactggtggagaaagcatctatggagggaagtttgcagatgagaattttatactgaggcatgaaggagcaggtcatctctctatggcaaatagcggtccaaacacaaatggttcccaattcttcataacattaaagcctcaggcccatcttgatgggaaacatgttgtctttggaaaggtggttaagggaatggacattgtgaagaaaattgaacaggtgggaagtgcccgtggccaacctgccagacctgtaaaaattgtggattgtggtgaaacttctgaaagtaaaattgaggatgctgttgggaaagatacaggtaaaacttgggtagttgcacttttgtttctggagcatgcttgccaaacttcttaa

SEQ ID NO: 1005 - protein, 206 aa, Populus trichocarpa
MSKKKNPLVFLDVSIDGDPAERIFIELFADVVPRTAENFRALCTGEKGTGKTTGKPLHYKGSSFHRIIKEFMAQGGDFSKGNGTGGESIYGGKFADENFILRHEGAGHLSMANSGPNTNGSQFFITLKPQAHLDGKHVVFGKVVKGMDIVKKIEQVGSARGQPARPVKIVDCGETSESKIEDAVGKDTGKTWVVALLFLEHACQTS

SEQ ID NO: 1006 - DNA, 519 bp, Populus trichocarpa
  CDS (1)..(519)
atggcaaaccctaaggtctacttcgacatgacaataggcggcgtcccagccggccggatcgtgattgagctgttcgcggacacaactccacgaaccgcagagaacttcagggctctttgcactggagagaaaggcaaaggccgaagcggcaagcctttacactacaaaggctcgacttttcatcgagtgatccctggattcatgtgtcaaggaggggattttactgcggggaatggaaccggaggagaatcaatctatggagcgaaatttgctgatgagaatttcataaagaaacatactgggcctggaattctatctatggcaaattctgggcctggcactaatgggtctcagtttttcatatgtacagataagactgaatggcttgatgggaaacatgtggtgttcggaaaagttgtggagggtatgaatgttgtcaaggctatagagaaggttggatctagtggtggaaggacctccaggcctgttgttgttgctgattgcggccagctttcttga

SEQ ID NO: 1007 - protein, 172 aa, Populus trichocarpa
MANPKVYFDMTIGGVPAGRIVIELFADTTPRTAENFRALCTGEKGKGRSGKPLHYKGSTFHRVIPGFMCQGGDFTAGNGTGGESIYGAKFADENFIKKHTGPGILSMANSGPGTNGSQFFICTDKTEWLDGKHVVFGKVVEGMNVVKAIEKVGSSGGRTSRPVVVADCGQLS

SEQ ID NO: 1008 - DNA, 519 bp, Populus trichocarpa
  CDS (1)..(519)
atggcaaaccccagggttttctttgatatgtccgtcggcggccagcctgctggtcggatcgtcatggaactcttcgccgatattgttccaaagaccgccgagaacttccgcgcgctttgcactggcgagaaaggtgttggcaagtccggcaagccacttcactacaagggttcaagctttcaccgtgtgatccctaacttcatgtgccaaggtggtgactttactgccggaaatggtaccggcggtgagtcgatctatggagctaaatttgctgacgagaatttcgtgaagaagcacactggacctggtgtgctatctatggctaatgccggtccaggaaccaatggatctcagttctttgtctgcactgtcaagacggagtggcttgatgggaaacatgtcgtttttggtcaagttgttgagggcttggatgtggtgaaggctatcgagaaggttggatctggaagcggcaagacttccaagcctgttgctattgcggactgtggtcaactctcttag

SEQ ID NO: 1009 - protein, 172 aa, Populus trichocarpa
MANPRVFFDMSVGGQPAGRIVMELFADIVPKTAENFRALCTGEKGVGKSGKPLHYKGSSFHRVIPNFMCQGGDFTAGNGTGGESIYGAKFADENFVKKHTGPGVLSMANAGPGTNGSQFFVCTVKTEWLDGKHVVFGQVVEGLDVVKAIEKVGSGSGKTSKPVAIADCGQLS

SEQ ID NO: 1010 - DNA, 525 bp, Populus trichocarpa
  CDS (1)..(525)
atgtcgaatccgaaggttttctttgacattctaattggcaagatgaaagcaggtaggattgtgatggaactatttgctgatgctactccgaaaactgctgaaaatttccgtgctctatgcaccggggagaaagggattggaaatgctgggaaaccattacactataagggttcgactttccatcgcataatcccaaacttcatgtgtcaaggtggggattttactaggggtaatggaactggaggagaatcaatctatggcgcaaagtttgcagatgagaactttaagctgaagcatacagggcctggtgttttatcaatggcaaattctggaccgaacactaatggttcccaattcttcatttgcactgagaatacctcatggcttgatgggaaacatgttgtttttgggaaagttgtagatggctatggcgttgttcaggaaatggagaaggtagggtccaatagtgggacgacaaaggaaactgttattgttgaagattgtggtcaaataatagagaactga

SEQ ID NO: 1011 - protein, 174 aa, Populus trichocarpa
MSNPKVFFDILIGKMKAGRIVMELFADATPKTAENFRALCTGEKGIGNAGKPLHYKGSTFHRIIPNFMCQGGDFTRGNGTGGESIYGAKFADENFKLKHTGPGVLSMANSGPNTNGSQFFICTENTSWLDGKHVVFGKVVDGYGVVQEMEKVGSNSGTTKETVIVEDCGQIIEN

SEQ ID NO: 1012 - DNA, 555 bp, Anopheles gambiae str. PEST
  CDS (1)..(555)
atgcctacctggacgcagatgcaaggacagctacgcaatcccaacaatccggtagtgtttatggatattacggtcggaacagcggaaattggccgcatggtgtttgaactgtacgcggacgtggtgcccaaaacgtgcgaaaacttccggcagttctgtaccggggagtacaaaaaggatggcgtcccgatcgggtacaagggttcgagcttccaccgagtcatcaaagactttatgatacagggaggagatttcgtgaatggcgatggaacgggcgttatgagcatttacggcactcccaccttcccggacgaacattttctgctgaagcacgacgcacccgggctgctttcgatggccaacagtgggaaggacacgaacggatgccagtttttcatcacctgctcaaagtgtaacttcctggactacaagcacgtcgtgtttgggcgcgtgctggatggactgctgattatgcggaagattgagaacgttccgacgggaccgaacaataagccgaagttgccggtagtcatatcacagtgcggacagctgtaa

SEQ ID NO: 1013 - protein, 184 aa, Anopheles gambiae str. PEST
MPTWTQMQGQLRNPNNPVVFMDITVGTAEIGRMVFELYADVVPKTCENFRQFCTGEYKKDGVPIGYKGSSFHRVIKDFMIQGGDFVNGDGTGVMSIYGTPTFPDEHFLLKHDAPGLLSMANSGKDTNGCQFFITCSKCNFLDYKHVVFGRVLDGLLIMRKIENVPTGPNNKPKLPVVISQCGQL

SEQ ID NO: 1014 - DNA, 609 bp, Anopheles gambiae str. PEST
  CDS (1)..(609)
atgaaactgttcgttgtgttgagtgtgctgattgccggtgcgctggcatccggagaagggccgaaagtgacggataaggtctacttcgatatcacgatcggtggcaagccggagggacgcatcgtgattggtctgttcggtggcaccgtaccgaagactgcccgcaacttcaaggagctggccgagaagaccaccaaaggagaaggctacaagggcagcaagttccaccgggtgatccgcgacttcatgatccagggcggtgacttcaccaagggagacggcaccggcggacgatcgatctacggcgagcgcttcgccgacgagaacttcaagctgaagcactacggtgccggctggctgtcgatggcgaacgccggcaaggacacgaacggttcgcagttcttcatcacggtcaagcagacgagctggctggacgggcgtcacgtcgtgttcggcaaggtgctggagggcatgaacgtggtgcgcaagatcgaaagcaccgccaccgatgggcgcgatcgtccgacgaacgatgtcgagattgccgattccggttcgctgccggtcagcgagccgttcgcggttgataaggccgatgccaccgagtaa

SEQ ID NO: 1015 - protein, 202 aa, Anopheles gambiae str. PEST
MKLFVVLSVLIAGALASGEGPKVTDKVYFDITIGGKPEGRIVIGLFGGTVPKTARNFKELAEKTTKGEGYKGSKFHRVIRDFMIQGGDFTKGDGTGGRSIYGERFADENFKLKHYGAGWLSMANAGKDTNGSQFFITVKQTSWLDGRHVVFGKVLEGMNVVRKIESTATDGRDRPTNDVEIADSGSLPVSEPFAVDKADATE

SEQ ID NO: 1016 - DNA, 1131 bp, Magnaporthe grisea 70-15
  CDS (1)..(1131)
atgtcggccgacgaaacaaacaagccagcgcgcccccgcgtcttctttgacatctcaatcgacgacaagcccgccgggcgcatcgtctttgagctcttcagcgatgtggtcccaaagacggccgagaacttccgcgccctgtgtacgggcgagaaggggattggaaagagcggcaagccccttcactacaagggctccagctttcaccgtgtgatcaagcagttcatgatccagggtggtgactttacggcgggcaacggtaccggcggcgagtccatctacggcgagaagtttgacgacgagaactttgagttgatccatgaccgccccttcctcctcagcatggcaaatgctggtcctggcaccaacggttcccagttcttcgtgactacggttccaaccccacatctcgacaagaagcacgtcgtattcggccaggtcctgtccggcaagtcggttgtgcgccaggtcgagaatctcaccacgcacgccggtgacaagcccgtcaagtctgcgacgatcgctgactgcggtgagctgcccgccgacgccgtcgtaggagacgcggccaaggaggcggacaagtacggcgacaagtacgaagacttccctgaggacgatgagggtggccccctggacgttgcccgtgtcaccaccattgcctcggactgcaagacgtacggcaacagcgccttcaaggttggcgaccacgccaccgcgctgaccaagtatcaaaagggcctccggtacctcaacgaggagcccgagcgcgaccaggagaacatccccgccgacgtcaaggagaagctggccgctttgcgattcaccctgaacaacaacgccgcactcatgaacctcaaactcgagtcgtgggaggacgccaagaacgcagcctcgtccgcgctggccgtcaagtcggcgtccgacgccgatcgcgccaaggccctgtaccgacgtggtctcgcctacatcaggctgaaggacgaggacgccgccatcaaggacctggaggaggccaagaagcttgctccggcagatgctgcggtcgccaaggagcttgagcaggtcaagaaggccgccgcggctcgtgccgccaaggagaaggctgcttacaagaagttcttctcgtag

SEQ ID NO: 1017 - protein, 376 aa, Magnaporthe grisea 70-15
MSADETNKPARPRVFFDISIDDKPAGRIVFELFSDVVPKTAENFRALCTGEKGIGKSGKPLHYKGSSFHRVIKQFMIQGGDFTAGNGTGGESIYGEKFDDENFELIHDRPFLLSMANAGPGTNGSQFFVTTVPTPHLDKKHVVFGQVLSGKSVVRQVENLTTHAGDKPVKSATIADCGELPADAVVGDAAKEADKYGDKYEDFPEDDEGGPLDVARVTTIASDCKTYGNSAFKVGDHATALTKYQKGLRYLNEEPERDQENIPADVKEKLAALRFTLNNNAALMNLKLESWEDAKNAASSALAVKSASDADRAKALYRRGLAYIRLKDEDAAIKDLEEAKKLAPADAAVAKELEQVKKAAAARAAKEKAAYKKFFS

SEQ ID NO: 1018 - DNA, 579 bp, Kluyveromyces lactis NRRL Y-1140
  CDS (1)..(579)
atgtttgctactactttgaagtccgctagaattgccaacttggctccagttcaacgtctattctcttcttctgcttatcttttgcgtaccaaggtattctttgatacctcgatcaacggtaacaagatggacagaattgaatttgaattgtacgatgacattgtcccaaagaccgctgaaaacttcagggctctatgtactggtgaaaagggcttcggttacaagggtgttccattccacagaatcattcctaacttcatgttgcaaggtggtgacactgatttaactaacggctacggtggtaaatccatctacggtaacaaattcgccgacgaaaacttccaagagaagcacactaagccaggtttgttgtctatggccaacgctggtccaaacaccaatggctcccaatttttcatcaccacagtcccatgcccatggttggatggtaaacacgttgtcttcggtgaagttactgacggcttaagcactgtcaagaccattgaatccttcggtaccgtttccggtagaccaagagctaagattgtcatcgaagaatgtggtgaattgaaggattaa

SEQ ID NO: 1019 - protein, 192 aa, Kluyveromyces lactis NRRL Y-1140
MFATTLKSARIANLAPVQRLFSSSAYLLRTKVFFDTSINGNKMDRIEFELYDDIVPKTAENFRALCTGEKGFGYKGVPFHRIIPNFMLQGGDTDLTNGYGGKSIYGNKFADENFQEKHTKPGLLSMANAGPNTNGSQFFITTVPCPWLDGKHVVFGEVTDGLSTVKTIESFGTVSGRPRAKIVIEECGELKD

SEQ ID NO: 1020 - DNA, 1119 bp, Kluyveromyces lactis NRRL Y-1140
  CDS (1)..(1119)
atgagtgaaacaagacctaagacatttttcgatatttcgattgggggcaaacctgctggtcggattgttttcgagttgtattctgatgttgttccaaagacggcggagaatttcttaaaactctgtgaaggtaactcgggatttgccaaatccaaaccggatataccattgagctacaagggctcgatcttccacagagttatcaagtctttcatgtgtcaatttggagatttcactaacttcaacggcactggtggtgaatcgatttacggagagaaatttgaagatgagaattttactttgaagcatgataagccattcttgttgtctatggcaaacgctggtgcgaataccaatggatctcaatgtttcataacatgcgttccaactccacacttagatggtaagcatgttgttttcggtgaagtgatccagggcaaaaggttagtcagaactatagaaaataatgctacagatgaagctgataagccggccaaagaggttaaaattgaggattgtggtgtgttaccatccgattatactgttcctgcagatgcagaagcgactccgactgatgcgtatggtgacaattatgaagaaaatataacagacgattcgaaggttgatcccaacgacgtcaatagtgtcttgaacgctgtagaagcagtaaaagagatcggtactaaacaattcaaggagaaaaattttgaagtagcccttgtgaaatatgaaaaaagtagtcaaatgcttaagcagtacttccctcaagatttaccagaggaggatgttaaaaaaattgacgcattaagggtatccttattcttgaacatcgctttggtgtctctcaagagtaaaaattacagtagaacacttagcgccgccactgaagcccttcatgctgacaacacagacgataaatccaaggccaaggcattgtatcgccgtggtttagcttattactacacaaaaaacgcagaaatggccgtgacagacctcgaattggctactacataccaaccacatgatactgcaattataaaggctttacaagacgccaagaaagccaaaaaggagttgattgctaaacagaagaagtcattatccaaaatgttttcctaa

SEQ ID NO: 1021 - protein, 372 aa, Kluyveromyces lactis NRRL Y-1140
MSETRPKTFFDISIGGKPAGRIVFELYSDVVPKTAENFLKLCEGNSGFAKSKPDIPLSYKGSIFHRVIKSFMCQFGDFTNFNGTGGESIYGEKFEDENFTLKHDKPFLLSMANAGANTNGSQCFITCVPTPHLDGKHVVFGEVIQGKRLVRTIENNATDEADKPAKEVKIEDCGVLPSDYTVPADAEATPTDAYGDNYEENITDDSKVDPNDVNSVLNAVEAVKEIGTKQFKEKNFEVALVKYEKSSQMLKQYFPQDLPEEDVKKIDALRVSLFLNIALVSLKSKNYSRTLSAATEALHADNTDDKSKAKALYRRGLAYYYTKNAEMAVTDLELATTYQPHDTAIIKALQDAKKAKKELIAKQKKSLSKMFS

SEQ ID NO: 1022 - DNA, 510 bp, Debaryomyces hansenii CBS767
  CDS (1)..(510): transl_table=12
atgaacccagtggtattcctagatgtgaataaaggagatgttccgttgggacggataaagctcaaactatttgcaagtgaattaccgaagacttgtgaaaatttcaggcaattctgcaccggtgaatacagagagaacaatcgcccaaaaggctacaaaggctgtacatttcatagggtagtcaaaggtttcatgattcaaggcggtgattttgtccgagggaatggcttgggaagcatttccatatatggaggtaatacattcgacgatgaaggatttccctatgaccacaagaaatatagtgtttctatggccaattctgggcccaattccaatggatgtcaatttttcatatgctgcaaagaggtcccacatctagatggtaagcatgttgtgtttggagaagtagttgaagggtttgatattgtagatcaaatagaaaagaccaaagtaggggttcttgataaaccataccccgatataacgataaccaattgtggtgagatgtag

SEQ ID NO: 1023 - protein, 169 aa, Debaryomyces hansenii CBS767
MNPVVFLDVNKGDVPLGRIKLKLFASELPKTCENFRQFCTGEYRENNRPKGYKGCTFHRVVKGFMIQGGDFVRGNGLGSISIYGGNTFDDEGFPYDHKKYSVSMANSGPNSNGCQFFICCKEVPHLDGKHVVFGEVVEGFDIVDQIEKTKVGVLDKPYPDITITNCGEM

SEQ ID NO: 1024 - DNA, 561 bp, Debaryomyces hansenii CBS767
  CDS (1)..(561): transl_table=12
atgttcaaacctgttaactttactagacaaaccagattattttcttcatccgcaagaaattggggtactaaggttttcataactccttcaattggaggtgttaagcaatctccaatcaagtttgaattgtatgatgaagtcgtcccaaagactactgaaaactttagagctttatgtaccggagaaaaaggatttggttacgccaattctatcttccatagagtgattccaaactttatgttgcaaggtggtgattttgaaactggtaaaggttacggtggtagatcaatttacggtcaaaaattctcagacgaaaactttcaaaagaagcacgaaaaggcaggtttattgagtatggctaatgctggaccaaataccaatggttctcaattcttcatcacaactgttccttgtccatggttggatggtgctcacgttgtttttggtgaggttattgaaggtatggatattgtcaagaagattgaagctcaaggttctggtagtggtgctccacaatcttctatcgttatcgaagaatgtggtgaacttaaggacaattaa

SEQ ID NO: 1025 - protein, 186 aa, Debaryomyces hansenii CBS767
MFKPVNFTRQTRLFSSSARNWGTKVFITPSIGGVKQSPIKFELYDEVVPKTTENFRALCTGEKGFGYANSIFHRVIPNFMLQGGDFETGKGYGGRSIYGQKFSDENFQKKHEKAGLLSMANAGPNTNGSQFFITTVPCPWLDGAHVVFGEVIEGMDIVKKIEAQGSGSGAPQSSIVIEECGELKDN

SEQ ID NO: 1026 - DNA, 489 bp, Debaryomyces hansenii CBS767
  CDS (1)..(489): transl_table=12
atgtctcaagtctattttgatatttccgccgatggcaacaagttaggtagagttaccttcaagttatacgacgatgttgtcccaaagactgctgaaaacttcagagctttatgtaccggtgaaaagggatttggatacgctagctccactttccacagagttatcccacaattcatgttgcaaggtggtgacttcaccagaggtaacggtaccggtggtaagtctatctacggtgaaaagttccgtgatgaaaacttcgtcaagaagcacgagaaaccaggtttattgtccatggctaacgcaggaccaaacaccaacggttcccaattcttcattaccactgttacatgcccatggttagatggtaagcacgtcgttttcggtgaagttgtcgatggtttcgacattgtcaagaaggtcgaatcctacggttctggttctggtgctaccaagtctagaattactatcgatgcttccggtgaattgtaa

SEQ ID NO: 1027 - protein, 162 aa, Debaryomyces hansenii CBS767
MSQVYFDISADGNKLGRVTFKLYDDVVPKTAENFRALCTGEKGFGYASSTFHRVIPQFMLQGGDFTRGNGTGGKSIYGEKFRDENFVKKHEKPGLLSMANAGPNTNGSQFFITTVTCPWLDGKHVVFGEVVDGFDIVKKVESYGSGSGATKSRITIDASGEL

SEQ ID NO: 1028 - DNA, 516 bp, Yarrowia lipolytica CLIB122
  CDS (1)..(516)
atgaccatcacgtttctggacgtgacctacgatggccagcgcatcggccgcatcaagttcaagctgtactcggaagatctgcccaaaacatgcgagaactttcgccagttttgcaccggagaatacagaatcgacaatgttccccaaggatacaaggagagcacattccaccgagtggtcaagggattcatgatccagggaggcgactttgtgcgtggcaacggactcggaacagtgtccatctttggaagtgccagcttccccgacgaacgaaccatctctggcaaaacattcccgcatattgaaggcgctctatcgatggcaaattcaggcaaagataccaacggttgccagtttttcatcacaacgcgcaaatgtcccgaactggacggctcgcacgtggtgtttggacatgtgattgagggcatggacgtggtcaagtttgtggagaacgtgcctgtagtggaagagaagcccaagcgagacgttgtcgttagtgagtgtggagagtactag

SEQ ID NO: 1029 - protein, 171 aa, Yarrowia lipolytica CLIB122
MTITFLDVTYDGQRIGRIKFKLYSEDLPKTCENFRQFCTGEYRIDNVPQGYKESTFHRVVKGFMIQGGDFVRGNGLGTVSIFGSASFPDERTISGKTFPHIEGALSMANSGKDTNGCQFFITTRKCPELDGSHVVFGHVIEGMDVVKFVENVPVVEEKPKRDVVVSECGEY

SEQ ID NO: 1030 - DNA, 531 bp, Yarrowia lipolytica CLIB122
  CDS (1)..(531)
atgttccgacagatccgacacttttccacctcccccctggtccgaaacaacgtgtactttaacgtgtctgccaatggcaaccccctcggcaagatctcgttcaagctgtacaaggaccaggtgcccaagacggcggagaacttccgagctctgtgcactggcgagaaggggttcggttacgccggatcctccttccaccgagtcatccccaactttatgctccagggtggtgacttcaccaaccacaacggtaccggcggcaagtctatctacggccaaaagttccccgacgagaacttcaacgtgaagcacacccgacccggtctgctgtccatggccaacgccggccccaacaccaacggctcccagtttttcatcaccaccgtcgacactccctggctcgatggtgcccacgttgtctttggcgaggtcaccgacggcatggatgtcgtcaaggccattgagaagctcggatccaactctggacgaacctctcagaagattgtcattgacgattgcggtcaggagtag

SEQ ID NO: 1031 - protein, 176 aa, Yarrowia lipolytica CLIB122
MFRQIRHFSTSPLVRNNVYFNVSANGNPLGKISFKLYKDQVPKTAENFRALCTGEKGFGYAGSSFHRVIPNFMLQGGDFTNHNGTGGKSIYGQKFPDENFNVKHTRPGLLSMANAGPNTNGSQFFITTVDTPWLDGAHVVFGEVTDGMDVVKAIEKLGSNSGRTSQKIVIDDCGQE

SEQ ID NO: 1032 - DNA, 1104 bp, Yarrowia lipolytica CLIB122
  CDS (1)..(1104)
atgaccaacccccgagtgtttttcgaggtcgcaattggcggcaagaccatcggcaagatctactttgagctgtttgccgacaaggtgcccaagaccgccgagaacttccgagctctgtgcactggcgagaagggcaacacccaggccggaatccctctgcatttcaagggctcgtctttccaccgagtcatcaaggactttatggtgcagggaggagacttcaccgctggcaacggtaccggaggagagtccatctacggggagaagttccctgacgaggcgttcccttacccccatgatcagcccttcttgctgtcaatggccaacgccgggcccaacaccaacggctcgcagttcttcatcaccaccaccgaaaccccccatctcgacaacaagcatgtggtatttggcaagttgctcagcggcaagggtattgtgcgacagatcgagcgaactgagacaggcgagcaggaccgacccaagcagcccgtcaccattgtggactgcggagagctgcccgcagacttccaggtgcctgttggaaacgtcgacgacggcactggagacgactacgaggacttcctcaaggataacgacaatgtggacgtgaacgaccctgcctctgtgctgggagccattgagaagctcaagtcgatcggaaccaagctgttcaaggagggaaacgccgagggagcgctcaagaagtacctcaaggccaccacctacctggaggactatcttcccgatgatttgtccgaggagaacattgccaaggtgcatgctctgcgaatctcgtgctacctcaacgtggctctcatggctcttaaggtcaaccagcccaaggttgccatcaaggccgcgacttctgctcttgatgacgagactgtggccaacaaggagaaggccaaggctttgttccgacggggatctggatacgccgctctcaagaacgagaccgacgctctcaaggatctgaatgctgctctggagctcgagcccgctgatggggccatcaagaacaagattgaggaggtcaaacaggctgcgcagagacgacgggaggcggagaagaagaagtatgctggtttctttggaggcaaataa

SEQ ID NO: 1033 - protein, 367 aa, Yarrowia lipolytica CLIB122
MTNPRVFFEVAIGGKTIGKIYFELFADKVPKTAENFRALCTGEKGNTQAGIPLHFKGSSFHRVIKDFMVQGGDFTAGNGTGGESIYGEKFPDEAFPYPHDQPFLLSMANAGPNTNGSQFFITTTETPHLDNKHVVFGKLLSGKGIVRQIERTETGEQDRPKQPVTIVDCGELPADFQVPVGNVDDGTGDDYEDFLKDNDNVDVNDPASVLGAIEKLKSIGTKLFKEGNAEGALKKYLKATTYLEDYLPDDLSEENIAKVHALRISCYLNVALMALKVNQPKVAIKAATSALDDETVANKEKAKALFRRGSGYAALKNETDALKDLNAALELEPADGAIKNKIEEVKQAAQRRREAEKKKYAGFFGGK

SEQ ID NO: 1034 - DNA, 687 bp, Yarrowia lipolytica CLIB122
  CDS (1)..(687)
atgaaactgtttgccaccattggagttctgctcgtggctcttctggccttctttgtccagcctgcacaggccgagcccgacgccgaaatcacccacaaggtctactttgacatcaagcagggcgaggaatcgctcggaaagatcgtcatgggtctgtacggagacgtggtccccaagaccgtggagaacttccgagctctgtgcaccggcgagaccggcaagggctacaagggctccaagttccaccgagtcatcaagaacttcatgatccagggcggagacttcacccgaggagacggcactggaggcgagtccatctacggccgaaagttccccgacgagaacttccagctcaagcacaccaagccttacaagctgtccatggccaacgccggccgagacaccaacggctcccagttcttcatcaccaccgtggttaccagctggctcgacggcaagcacgttgtctttggcgaggttctcgagggccaggacattgtcgacgccattgagaacgcccccaccggcgctcgatccaaccccaaggtcgacatcaccattgctgacgccggagagatccccgtggagaagtccgagaccaaggaggctgagcctgccaaggaggacgccaaggagcccaaggaggacgtcaagaagaagggaaagtccgacaaggatgagctctga

SEQ ID NO: 1035 - protein, 228 aa, Yarrowia lipolytica CLIB122
MKLFATIGVLLVALLAFFVQPAQAEPDAEITHKVYFDIKQGEESLGKIVMGLYGDVVPKTVENFRALCTGETGKGYKGSKFHRVIKNFMIQGGDFTRGDGTGGESIYGRKFPDENFQLKHTKPYKLSMANAGRDTNGSQFFITTVVTSWLDGKHVVFGEVLEGQDIVDAIENAPTGARSNPKVDITIADAGEIPVEKSETKEAEPAKEDAKEPKEDVKKKGKSDKDEL

SEQ ID NO: 1036 - DNA, 540 bp, Cryptococcus neoformans var. neoformans JEC21
  CDS (1)..(540)
atgtcctcaatcgatcctccagcaggccatacgaggcctatcgtcttcttcgacatctccatcggagacactcccgccggccggatcaagatggagttgtttgatgacattacccccaagacagcagaaaactttaggcaattatgtacaggcgagcaccgaatcaactctgtgcctcaaggctataagaaggctactttccacagagtaatcccacaattcatggttcaaggcggagactttgtcagaggggatggtactggatcattctcaatctatggcgcacagtttgaagatgagaacttcaaggtgaagcatacaggacctgggttgttgagtatggcgaattcgggaccgaacaccaatggatgccagttcttcatcactaccgcccctgccgaattccttgacggcaagcactgcgtctttggccgagtcattgatggtttattgaccgtcaggaagattgagaacgtccccactggcgctaacaacagaccgaaattgcaagtcaggatagcagagtgcggggagatgtaa

SEQ ID NO: 1037 - protein, 179 aa, Cryptococcus neoformans var. neoformans JEC21
MSSIDPPAGHTRPIVFFDISIGDTPAGRIKMELFDDITPKTAENFRQLCTGEHRINSVPQGYKKATFHRVIPQFMVQGGDFVRGDGTGSFSIYGAQFEDENFKVKHTGPGLLSMANSGPNTNGCQFFITTAPAEFLDGKHCVFGRVIDGLLTVRKIENVPTGANNRPKLQVRIAECGEM

SEQ ID NO: 1038 - DNA, 540 bp, Cryptococcus neoformans var. neoformans JEC21
  CDS (1)..(540)
atgtcgtccatgctgttgagtcatctctgcaatgttgaactaatcgtattcaatagccaagtttactttgacattgccattaacaacgcccccgccggccgaatcactttcaagctcttcgacgatgtcgtccccaagactgcccgaaacttccgtgaactctgtaccggccagaacggcttcggttacgccggctctggtttccaccgagtgatcccccagttcatgctccagggtggtgacttcaccaaccacaacggcactggcggcaagtccatctacggcaacaagttcgccgacgagaacttcaagctccgtcacgaccgacctttcctcctctccatggctaacgctggtcccaacaccaatggctctcagttcttcatcaccaccgtcgttacctcttggctcgacggcaagcactgtgtcttcggtgaggtttcctctggtcaggacctcgtcaggaagatcgagtcttacggctccgactctggcaagcccaaggccaagatcaccatcactgcctccggcactgtctaa

SEQ ID NO: 1039 - protein, 179 aa, Cryptococcus neoformans var. neoformans JEC21
MSSMLLSHLCNVELIVFNSQVYFDIAINNAPAGRITFKLFDDVVPKTARNFRELCTGQNGFGYAGSGFHRVIPQFMLQGGDFTNHNGTGGKSIYGNKFADENFKLRHDRPFLLSMANAGPNTNGSQFFITTVVTSWLDGKHCVFGEVSSGQDLVRKIESYGSDSGKPKAKITITASGTV

SEQ ID NO: 1040 - DNA, 591 bp, Cryptococcus neoformans var. neoformans JEC21
  CDS (1)..(591)
atgcagtgtcctggggatccaccatctccccctcaccctctttctttcacctcttctttccccaaaacatccaaattcacatccacaaaacatccaccatgtccgacgtttactttgacattgccatcaacagtgcgccagcctgccggccgaatcaccttcaagctcttcgacgatgtcgtccccaagactgtccagaacttccgtgaactctgtaccggccagaacggcttcggctacgccggctctggtttccaccgagtgatcccccagttcatgctccagggtggtgacttcaccaaccacaacggcactggcggcaagtccatctacggcaacaagttcgccgacgagaacttcaagctccgtcacgaccgacctttcctcctctccatggctaacgctggtcccaacaccaatggctctcagttcttcatcaccaccgtcgttacctcttggctcgacggcaagcacgtcgtcttcggtgaggtttcctctggtcaggacctcgtcaggaagatcgagtcttacggctctggctccggtgctaccaaggccaagatcaccattgccgcttctggtaccgtttaa

SEQ ID NO: 1041 - protein, 196 aa, Cryptococcus neoformans var. neoformans JEC21
MQCPGDPPSPPHPLSFTSSFPKTSKFTSTKHPPCPTFTLTLPSTVRQPAGRITFKLFDDVVPKTVQNFRELCTGQNGFGYAGSGFHRVIPQFMLQGGDFTNHNGTGGKSIYGNKFADENFKLRHDRPFLLSMANAGPNTNGSQFFITTVVTSWLDGKHVVFGEVSSGQDLVRKIESYGSGSGATKAKITIAASGTV

SEQ ID NO: 1042 - DNA, 696 bp, Cryptococcus neoformans var. neoformans JEC21
  CDS (1)..(696)
atgaacacctctcaccccatcccaaccaccatggcctccaaatcattcctctccctccttgtcgccctcttcgtggccatatgcttcgtcctctccccgggcgttgacgccgccaagggccctgtcatcaccaacaaggtctactttgacattgaacatggtggtaagcccctcggtcgaatcgtcatgggtctttacggcaagactgtgcccaagactgccgagaacttccgtgcgcttgctactggtaagaactctgatggggaggaccttggttacggctatgagggctcttctttccaccgaattatcaagaactttatgatccagggtggtgactttaccaagggcgatggtactggcggcaagtccatttacggtagcaagttccctgacgagaacttcaagttgaagcacaccggtcccggtgttctctccatggccaacgctggccgtgacaccaacggaagccagttcttcatttgcactgtcaagacagcttggctcgataaccgacacgttgtctttggtcatgttcttgagggtatggacgttgtttatgctatggaaaacgtcaagacctctcgaggtgacaagcccgttgaacctattaccattgccgcttctggagagcttcctattgagcatgaggtggacgagcaaggcaaccaggtacctttccgcatcgagctttaa

SEQ ID NO: 1043 - protein, 231 aa, Cryptococcus neoformans var. neoformans JEC21
MNTSHPIPTTMASKSFLSLLVALFVAICFVLSPGVDAAKGPVITNKVYFDIEHGGKPLGRIVMGLYGKTVPKTAENFRALATGKNSDGEDLGYGYEGSSFHRIIKNFMIQGGDFTKGDGTGGKSIYGSKFPDENFKLKHTGPGVLSMANAGRDTNGSQFFICTVKTAWLDNRHVVFGHVLEGMDVVYAMENVKTSRGDKPVEPITIAASGELPIEHEVDEQGNQVPFRIEL

SEQ ID NO: 1044 - DNA, 645 bp, Aspergillus nidulans FGSC A4
  CDS (1)..(645)
atgacgagccttaagagccttttcttatctttcttcctagtcgtggctcttggcctggctcttgttaatgcctctgagccccgcggaccgaaaatcaccaacaaggtgtacttcgatattcagcatggagatgagagtctaggacgaattgtgttgggactctatgggaagactgtgcccgagactgctgagaacttccgtgctctcgctaccggcgaaaagggctttggatatgaagggtccaacttccaccgtgtgatcaaggatttcatgattcagggtggtgacttcaccaggggcgatggtaccggaggaaagtcgatttacggtgcgaagttcaaagatgagaatttcaagctgaggcatactaagaccggtctcctgagcatggccaatgccgggaaagacaccaacggttctcagttctttatcaccactgctgtcaccccttggctcgatggcaagcacgtcgttttcggtgaggttctcgagggctacgatattgtcgacaagatccagaacgttcctaagggccgcaacgacaggcccctcaaggacgtcaagatcgtcaagagcggcgaattggagatggaggccgacgtcgcgaacgaaggtgacaagaaaggtagccacaacgagctttaa

SEQ ID NO: 1045 - protein, 214 aa, Aspergillus nidulans FGSC A4
MTSLKSLFLSFFLVVALGLALVNASEPRGPKITNKVYFDIQHGDESLGRIVLGLYGKTVPETAENFRALATGEKGFGYEGSNFHRVIKDFMIQGGDFTRGDGTGGKSIYGAKFKDENFKLRHTKTGLLSMANAGKDTNGSQFFITTAVTPWLDGKHVVFGEVLEGYDIVDKIQNVPKGRNDRPLKDVKIVKSGELEMEADVANEGDKKGSHNEL

SEQ ID NO: 1046 - DNA, 1119 bp, Aspergillus nidulans FGSC A4
  CDS (1)..(1119)
atggccgaatctaagcgtcctcgcgtcttctttgacattcagattggccagcagcagactggtcgcattgcctttgaattgttcaacgatgtcgtccccaagactgccgagaacttccgggcgctctgcacgggagagaagggaatgggaaagcagggcaagccattgcacttcaagggttcgatcttccaccgtgtcattaaacaattcatgatccagggtggtgacttcaccgcgttcaacggtaccggcggcgagtcgatttacggcgaaaagtttccagacgagaatttcgagctgaagcatgaccgtcccttcctcctttccatggccaactccggtcccggcacaaacggcagccagttcttcattaccaccgttcccactcctcacctagacggcaagcacgtggtcttcggcgaagttatcaacggcaagagcgtggtccggaagatcgagaatatgccaactcaggcagataagcctaccactgacgtgaccatcgcggagtgtggtgaactcaccggcgaggactacgacaacgcagacaagcagactcccgacgctaccggcgacccatacgaggatttccctgacgaccaccagggcgaggagctcagtgctcctgtgtgcttcaagatcgcttcggagctgaaaaatttcggaaacacggccttcaagaatggtaacatcgccttgggtctcgagaagtaccagaagggtctacgctatctgaacgaatttccggaacccgaagagaacgaccctaaggacctggagcctcaaatgaaatcactgcgtttcacccttcactcgaattcttctctcctagcaaacaagctgggacaattcaagaacggcaaaacctgggctacatacgctctggatgtggctgacgcagccagtgcaaaagatgccgaccgggctaaggtctactaccgccgcgcagtcgccgaaagcggactcaaggaggaagatgaagcgctgaaggatttggagcaagcttccaccttggctcctagtgacgctgcgattgcggcggagactgctagagttaagaaagctatcaaggcccgggaagctcaggaaaaggctactgctcggaagttcttctcatag

SEQ ID NO: 1047 - protein, 372 aa, Aspergillus nidulans FGSC A4
MAESKRPRVFFDIQIGQQQTGRIAFELFNDVVPKTAENFRALCTGEKGMGKQGKPLHFKGSIFHRVIKQFMIQGGDFTAFNGTGGESIYGEKFPDENFELKHDRPFLLSMANSGPGTNGSQFFITTVPTPHLDGKHVVFGEVINGKSVVRKIENMPTQADKPTTDVTIAECGELTGEDYDNADKQTPDATGDPYEDFPDDHQGEELSAPVCFKIASELKNFGNTAFKNGNIALGLEKYQKGLRYLNEFPEPEENDPKDLEPQMKSLRFTLHSNSSLLANKLGQFKNGKTWATYALDVADAASAKDADRAKVYYRRAVAESGLKEEDEALKDLEQASTLAPSDAAIAAETARVKKAIKAREAQEKATARKFFS

SEQ ID NO: 1048 - DNA, 741 bp, Candida albicans SC5314
  CDS (52)..(741): transl_table=12
caagaagggcgattgctaagtagaaaatgtaaagagaaaaaaagtttacacatgtcgagatcttttacacagttccacagtccaacaaaaccgcaattatcaatgaagtcgttgacatcaatcgcattgattgcttcaatcatagtagcattctatactcaacttgttttgggtggttcctcgaacttaccaaagaacccacctgtgacaaacaaggtatatttcgacgtcgaggaggatggcaaatcgattggccgtatcaccattggtctctttggcacggttgttccaaaaactgttgagaacttcagagtcttgtgtaccggcgagcttggacctagctacgaaaataccgttttccacagagtgatcaaggatttcatgattcaatccggagattttgaatatggccaagggtatggtggttattctcctacccacaacaatgggaagttcgacgacgaaaactttgaattgaaacatgacagaaagtaccgtttgagcatggccaatgctggaaagaacaccaacgggagtcagtttttcatcaccactgccttaacaaagtggttggacggggcacatgttgtgtttggcgaggtcttagatggcaaggatgttgttgattacattgaaaatgtcaaaactggtagaggtgaccgtccagtcaaagaaatcaaaattgttgcttctggggagttgaaggatagtgaaaccaatccatccaaagatgagctttaa

SEQ ID NO: 1049 - protein, 229 aa, Candida albicans SC5314
MSRSFTQFHSPTKPQLSMKSLTSIALIASIIVAFYTQLVLGGSSNLPKNPPVTNKVYFDVEEDGKSIGRITIGLFGTVVPKTVENFRVLCTGELGPSYENTVFHRVIKDFMIQSGDFEYGQGYGGYSPTHNNGKFDDENFELKHDRKYRLSMANAGKNTNGSQFFITTALTKWLDGAHVVFGEVLDGKDVVDYIENVKTGRGDRPVKEIKIVASGELKDSETNPSKDEL

SEQ ID NO: 1050 - DNA, 489 bp, Candida albicans SC5314
  CDS (1)..(489): transl_table=12
atgtctaccgtttactttgatgtctccgctgatggtcaaaaattaggaaagatcaccttcaaattgtacgatgatgtcgttccaaagactgctgaaaatttcagagctttatgtactggtgaaaaaggttttggttacaaaggttctattttccacagagtcatcccacaattcatgcttcaaggtggtgacttcaccaactttaacggtactggtggtaaaagtatttacggtaccaaatttgctgatgaaaactttgtcaagagacatgacagaccaggtttgttgtctatggccaatgctggtccaaacaccaatggttcccaattcttcattaccaccgttccatgcccatggttggatggtaaacacgttgttttcggtgaagtcactgatggtttagacattgttaaaaagattgaatcttttggttctggcagcggtgctacttctaagaagattgtcattgaagaatctggtcaattgtaa

SEQ ID NO: 1051 - protein, 162 aa, Candida albicans SC5314
MSTVYFDVSADGQKLGKITFKLYDDVVPKTAENFRALCTGEKGFGYKGSIFHRVIPQFMLQGGDFTNFNGTGGKSIYGTKFADENFVKRHDRPGLLSMANAGPNTNGSQFFITTVPCPWLDGKHVVFGEVTDGLDIVKKIESFGSGSGATSKKIVIEESGQL

SEQ ID NO: 1052 - DNA, 675 bp, Candida albicans SC5314
  CDS (100)..(675): transl_table=12
gagagtgagaatgcgggcaaagacaaagagttatttttttcaaacaaattttccaattctttattctccaaccatattatccataatcgatcaaaaaccatgtttaagactactttaacaaaaccattgaccttcaaatctgctagatttttttccaccacaccaagagcttggggaactaaagtttttttcaacacttctatcaatggtgaaaaacaaccaccaatcacttttgaattatatgatgatgttactccaatcactgctgaaaacttccgtgttttgtgtactggtgaaaaaggtgtaggatacaaaggatctattttccatcgtatcattccacaattcatgcttcaaggtggtgattttgaaactggtaaagggtatggtggttattctccaactcataataacgataagttcaatgatgaaaacttcatcaagaaacacgatagaccaggtttgttgtctatggccaatgctggtccaaacactaatggatcccaattcttcattactactgttccatgtccttggttagatggtaaacacgttgtctttggtgaagttgttgatgggtttgatgttgttaaaaagattgaaagttgtggtacttctagtggtactcctagtgctagtgtcgtcattgaagaaagtggtgaagctgaaaaataa

SEQ ID NO: 1053 - protein, 191 aa, Candida albicans SC5314
MFKTTLTKPLTFKSARFFSTTPRAWGTKVFFNTSINGEKQPPITFELYDDVTPITAENFRVLCTGEKGVGYKGSIFHRIIPQFMLQGGDFETGKGYGGYSPTHNNDKFNDENFIKKHDRPGLLSMANAGPNTNGSQFFITTVPCPWLDGKHVVFGEVVDGFDVVKKIESCGTSSGTPSASVVIEESGEAEK

SEQ ID NO: 1054 - DNA, 453 bp, Aspergillus fumigatus Af293
  CDS (1)..(453)
atggagttatttgcagatgtcactcctcggacagccgaaaattttcgcagattctgcacaggtgaaagcaaaaactcccaaggaaagccacaaggatacaagaatagcaagtttcaccgagtaatcaaagattttatgatacaaggaggcgattttgtcaacggggatggaacaggttcttgtaccatatatggcactcccaaatttgcagatgagaactttgtcttgaagcacgaccgcgcaggtgtcttaagcatggccaactctgggccaaatacaaatggctgccagttcttcataacaactacagcgacccccttcttgaatgggaagcatgtcgtgtttgggcaggtagtggatggcatggatatcgtgcggatgatcgaaaatacacgcacgattagggacaagccaagccaagatgtgatcattacacaatgcggagagatgtga

SEQ ID NO: 1055 - protein, 150 aa, Aspergillus fumigatus Af293
MELFADVTPRTAENFRRFCTGESKNSQGKPQGYKNSKFHRVIKDFMIQGGDFVNGDGTGSCTIYGTPKFADENFVLKHDRAGVLSMANSGPNTNGCQFFITTTATPFLNGKHVVFGQVVDGMDIVRMIENTRTIRDKPSQDVIITQCGEM

SEQ ID NO: 1056 - DNA, 630 bp, Aspergillus fumigatus Af293
  CDS (1)..(630)
atgaattttaaaagtctgttcttgtccttcttcctggtcttcgcggttggactcgctctggtccacgccgaggagactaaggagccacgaggcccaaagatcacaagcaaggttttctttgacattgagcatggagacaaacctctaggaagaatcgtgcttggattgtacggcaagactgtccctaagacagctgagaacttccgcgctctcgctaccggtgagaagggcttcggttatgagggctctaccttccaccgtgtcatcaagagcttcatgatccagggcggtgacttcacccgtggtgacggtaccggtggaaagtcgatctacggcgagaaattcgcggatgagaacttcaagcttaggcacacccgcaaaggacttctgagcatggcaaacgctggcaaggataccaacggctctcagttcttcattaccaccgttcctactccttggctcgatggtcgccatgttgtttttggtgaggttcttgagggctacgaggtcgtcgaacagatcgaaaatgttcccaagggtcctggcgacaagcctgcggagacagtcaagatcgtcaaaagtggacagatcaaagacgaatccaccaaaggtagccacgaggagctgtag

SEQ ID NO: 1057 - protein, 209 aa, Aspergillus fumigatus Af293
MNFKSLFLSFFLVFAVGLALVHAEETKEPRGPKITSKVFFDIEHGDKPLGRIVLGLYGKTVPKTAENFRALATGEKGFGYEGSTFHRVIKSFMIQGGDFTRGDGTGGKSIYGEKFADENFKLRHTRKGLLSMANAGKDTNGSQFFITTVPTPWLDGRHVVFGEVLEGYEVVEQIENVPKGPGDKPAETVKIVKSGQIKDESTKGSHEEL

SEQ ID NO: 1058 - DNA, 1128 bp, Neurospora crassa OR74A
  CDS (1)..(1128)
atgtcttctaccgacgacgtcaagcaggctcgcagccgcgtctttttcgacatcaccatcggcgggaaggcagccggccgtattgttttcgagctttacaatgacattgtccctaagacggccgagaacttccgcgctttgtgcaccggcgagaagggtgttggcaagttgggcaagccgctacactacaagggttccacgttccaccgtgtcatcaagcagttcatgatccagggtggtgacttcaccgctggaaacggcactggtggcgagtccatctacggcgcaaagttcgaggacgaaaatttccagttgaagcacgaccgtccattcctcctgtccatggccaacgctggacccggtaccaacggctctcagttcttcgtcaccaccgttcctaccccacatctcgatggcaaacacgtcgtctttggcgaggtgctgagcggcaagtcagtcgtcagacaaattgagaacctgaaaactcagggcgacaagccgaccaaggacgccgtcattgccgactgcggcgagcttagtggcgacgctgctgtgagcgctgacacaaagactgccgacgcctacggcgacgaatacgaggacttccccgaagacgaagccactgacggccagcctctctctgcctccaagatcctcaagattgcgacagactgcaaggactttggtaacaaggctttcaaggccggcgacctccctgtggccctcgacaaataccagaagggtctgcgctatctgaacgaggatcccgagcttgacaatgagccggctgacacaaagcaaaagctggacgccctgcgcgtctcgctgaacagcaacgcggctctcatgaacatgaagctgagcgcttgggacgagtgcattcgcagcgccgacggcgcacttgctgttgccactatctcagacaaggacagggccaaggctctataccgtaggggttacgcccaggtgcgcatcaaggacgaggacagcgccctgacgagtctggaggaggccaagaagctagcgcctgaagatggcgccattgttaacgagctggccgctgtcaagaaggctgccgcggctagaatggcgaaggaaaaggctgcctacaaaaagttcttctcctga

SEQ ID NO: 1059 - protein, 375 aa, Neurospora crassa OR74A
MSSTDDVKQARSRVFFDITIGGKAAGRIVFELYNDIVPKTAENFRALCTGEKGVGKLGKPLHYKGSTFHRVIKQFMIQGGDFTAGNGTGGESIYGAKFEDENFQLKHDRPFLLSMANAGPGTNGSQFFVTTVPTPHLDGKHVVFGEVLSGKSVVRQIENLKTQGDKPTKDAVIADCGELSGDAAVSADTKTADAYGDEYEDFPEDEATDGQPLSASKILKIATDCKDFGNKAFKAGDLPVALDKYQKGLRYLNEDPELDNEPADTKQKLDALRVSLNSNAALMNMKLSAWDECIRSADGALAVATISDKDRAKALYRRGYAQVRIKDEDSALTSLEEAKKLAPEDGAIVNELAAVKKAAAARMAKEKAAYKKFFS

SEQ ID NO: 1060 - DNA, 549 bp, Neurospora crassa OR74A
  CDS (1)..(549)
atggcacccaccgttctccctgcctctggcaacccgctagtcttcttcgacatcaccctcgggggtgagcccctcggccgcatcaccttcgagctcttcaaggacgtagtccccaggacggccgagaacttccggcagttctgcacgggcgagagcaagaacaacctcggtcggccgcaggggtataaggggagcaagttccatcggattatccccaacttcatgtgccaaggcggtgactttctcaacggcgatggcaccggctcaacttgcatctacggcaccaagagctttgcggacgagaatttcttgctgaagcatgatacgcctgggttgctttctatggctaacgccggcccaaacacgaacggctcgcaattcttcatcactacggtcccaacccccttcctggacggcaagcacgtcgtttttggtaaagttgtcgatggaatggatgtcgtcaagaagatggagaacaccaagactggatatcgcggtaaggacgtgccgaacctggatgtggtgattgctcagtgtggtgagatgtaa

SEQ ID NO: 1061 - protein, 182 aa, Neurospora crassa OR74A
MAPTVLPASGNPLVFFDITLGGEPLGRITFELFKDVVPRTAENFRQFCTGESKNNLGRPQGYKGSKFHRIIPNFMCQGGDFLNGDGTGSTCIYGTKSFADENFLLKHDTPGLLSMANAGPNTNGSQFFITTVPTPFLDGKHVVFGKVVDGMDVVKKMENTKTGYRGKDVPNLDVVIAQCGEM

SEQ ID NO: 1062 - DNA, 627 bp, Dehalococcoides sp. BAV1
  CDS (1)..(627): transl_table=11
atgaaatccactaaagcccttattttggctacactgttccccgtaactctgtttgccggcagctgcggcggcgatgcagtacctgaagtaacacccatgtcctggactaccgccccggccatgcagatagaccccgccaagcaatactatgctaccattgaaactacactggggagtttcaagattgagctctttgcttctgaatcccccaaaacagtaaataattttgtttttctggctaagcaaaactactacaacggggttattttccaccgcataataaaagagtttatgatccagaccggtgaccagaccggcaccggcagaggtggtccgggttaccgctttgcggatgaactgccggtaaaacactcgtatgaccccggcatagttgccatggcaaacgccggccccaataccaacggcagccagttctttgtctgtaccggagcacaggctaaaaatctgaactaccaacccaactacacccagtttggcagggtgattgagggtatggacgtgattaccaagctggcttcagtatcagtggtgggtaacagttatggcgaggtcagcaccccatccaatccccccaagattataaaaataatcataactgaaggctaa

SEQ ID NO: 1063 - protein, 208 aa, Dehalococcoides sp. BAV1
MKSTKALILATLFPVTLFAGSCGGDAVPEVTPMSWTTAPAMQIDPAKQYYATIETTLGSFKIELFASESPKTVNNFVFLAKQNYYNGVIFHRIIKEFMIQTGDQTGTGRGGPGYRFADELPVKHSYDPGIVAMANAGPNTNGSQFFVCTGAQAKNLNYQPNYTQFGRVIEGMDVITKLASVSVVGNSYGEVSTPSNPPKIIKIIITEG

SEQ ID NO: 1064 - DNA, 594 bp, Lactobacillus reuteri DSM 20016
  CDS (1)..(594): transl_table=11
atgaaatatccccaattatcattggatgaagttgaaggaccaaaagcagtaattgaaactacaatgggaacaattacggcccaactttttccaaagtacgcacctaaaacagttgaaaactttgttaaattagcagagaaaaattattatgatgatgtaatttttcaccgggttattccggattttatgattcaaggtggcgacccaactggaaccggccgtggtggcgaaagtatttatggtcacccgtttgaagacgagttttctgaagaactatttaacttcactggtgctctttcaatggctaatgctggtccgaacacaaatggcagtcaattctttattgtcactaatgaacatgttccagaaaatatgattgatcaaatgaaggccgttgggtacccacaagagattattgattattacgaaaaacatggtggtacaccgtggcttgactttcatcacaccgtatttggccaagtgttatccgggatggatgttgtcgaaaaggtcagcaaggttaagcgggatgcgatggataagcctaagaaagacgttattattaaaacaattaagattgaaaaagagaagtaa

SEQ ID NO: 1065 - protein, 197 aa, Lactobacillus reuteri DSM 20016
MKYPQLSLDEVEGPKAVIETTMGTITAQLFPKYAPKTVENFVKLAEKNYYDDVIFHRVIPDFMIQGGDPTGTGRGGESIYGHPFEDEFSEELFNFTGALSMANAGPNTNGSQFFIVTNEHVPENMIDQMKAVGYPQEIIDYYEKHGGTPWLDFHHTVFGQVLSGMDVVEKVSKVKRDAMDKPKKDVIIKTIKIEKEK

SEQ ID NO: 1066 - DNA, 528 bp, Frankia sp. EAN1pec
  CDS (1)..(528): transl_table=11
atggccgaggagctgtacgcgacggtgcgcacgactcagggcgacatcgagatcaggttgttcccggatcacgcgccgaagacggtcaagaacttcgtcgggctcgcgaccgggtcccgggagtggaccgaccccgcgaccggcgagaagaagaccggtgtcccgctgtacagcgggacgatctttcaccgggtgatcccgaacttcatgatccagggcggcgacccgctcggcagcggtcggggtggccccggctaccagttcgtcgacgagttccaccccgacctgcggttcgaccgtccgtacctgctcgcgatggcgaacgcgggcccgggcacgaacggctcccagttcttcatcaccacggcggccaccgactggctgaaccgcaagcacacgatcttcggcgaggtcacccgggggacggacgtcgtcgacaagatcggtaagacgccgaccggcgctcaggaccgccccaagaccgacgtggtggttcaggagatcgtcgtcgaacgccgcccggcctga

SEQ ID NO: 1067 - protein, 175 aa, Frankia sp. EAN1pec
MAEELYATVRTTQGDIEIRLFPDHAPKTVKNFVGLATGSREWTDPATGEKKTGVPLYSGTIFHRVIPNFMIQGGDPLGSGRGGPGYQFVDEFHPDLRFDRPYLLAMANAGPGTNGSQFFITTAATDWLNRKHTIFGEVTRGTDVVDKIGKTPTGAQDRPKTDVVVQEIVVERRPA

SEQ ID NO: 1068 - DNA, 585 bp, Lactobacillus helveticus DPC 4571
  CDS (1)..(585): transl_table=11
atgtcatacccacagttagatttagaaaacgtcaaaggtcctcgtgcagttcttaaaaccaatcatggtaacatcacaattcaattatttccagatcaagcaccaatgactgtcgaaaactttgttcgattagcaaaaaaaggttactacaatgttactatttttcaccgagtaatcagtgattttatgattcaaggtggtgatcccgaaggaaacggtacaggtggtactagtatttggggacatccttttgaagatgaattttcacgtgatttatttaatcttcgtggtgctttatcaatggctaattcaggtcctaatactaatggtagtcaattctttattgtgcaaaataaaaatatgcctaaacgttatatcaaacaaatggagccagctggttatcctaaagaaattattcatgcctataagcaggggggaactccttggttagatggtcgtcatactgttttcggtcaagtgatcgatggcatggatgtggttgatgaaattgctaaagtaaagaaaaataaaatggataagccattagaagacgtaactattgatgaagtagagattcaagactaa

SEQ ID NO: 1069 - protein, 194 aa, Lactobacillus helveticus DPC 4571
MSYPQLDLENVKGPRAVLKTNHGNITIQLFPDQAPMTVENFVRLAKKGYYNVTIFHRVISDFMIQGGDPEGNGTGGTSIWGHPFEDEFSRDLFNLRGALSMANSGPNTNGSQFFIVQNKNMPKRYIKQMEPAGYPKEIIHAYKQGGTPWLDGRHTVFGQVIDGMDVVDEIAKVKKNKMDKPLEDVTIDEVEIQD

SEQ ID NO: 1070 - DNA, 510 bp, Leuconostoc citreum KM20
  CDS (1)..(510): transl_table=11
atgacagaatacccacaacaagatgcacaaaattatgccggtccagttgcaacgtttaaaacaacgttaggtgatattcaagttaagctatttgctgatcttgcacctaaaactgtagaaaattttgtaacgcacgctaaaaacggttactatgacaacggtatttttcatcgtgtgatcaaagatttcatggtgcaaggtggtgaccctaatggtacaggtatgggtggtgaaagtatctggggcggtagttttgaagacgagttttcgcacaagttgcgcaatgtacgcggggcgctctcaatggcgaatgccggcccaaacaccaatggttcacagttctttattgttcaaactgaagaaacgccatggctaaatggtaagcatactgtttttggacaagtgatttctgatatggcagttgtcgataaaattgcaggcgttgctgttgacatgtacgataagccaaaagagaatgttaccatcaatacgatagaaattgcagactaa

SEQ ID NO: 1071 - protein, 169 aa, Leuconostoc citreum KM20
MTEYPQQDAQNYAGPVATFKTTLGDIQVKLFADLAPKTVENFVTHAKNGYYDNGIFHRVIKDFMVQGGDPNGTGMGGESIWGGSFEDEFSHKLRNVRGALSMANAGPNTNGSQFFIVQTEETPWLNGKHTVFGQVISDMAVVDKIAGVAVDMYDKPKENVTINTIEIAD

SEQ ID NO: 1072 - DNA, 525 bp, Synechococcus sp. PCC 7002
  CDS (1)..(525): transl_table=11
gtgagcgaacagcccaaccccaaagttttttttgacatcaccatcggcggcgaaagtgccggacgcattgtttttgaactacgggccgacgttgcccccaaaaccgctgaaaatttccgcgccctctgcactggtgaaaaaggcatcggcaaacggggcaaacccctccatttcaaaggctctaaattccaccgggtgatccctgaattcatgtgccaagggggagactttaccaacggtaacggcaccggcggtgaatccatttatggagatacttttgaagacgaaagctttgaactgcgccacaatgtcccaggtttgctgagtatggcgaaccgtggccccaataccaatggctcccaattcttcatcaccacgaccttaaccccttggctcaacggtaagcacgtggtcttcggtaaggttatcgaagggatggatgtagtcaaagctatggaagcccaaggttctggtagtggtgccccgaaacaggaaattgcgatcgccgattgtggtgagctctaa

SEQ ID NO: 1073 - protein, 174 aa, Synechococcus sp. PCC 7002
MSEQPNPKVFFDITIGGESAGRIVFELRADVAPKTAENFRALCTGEKGIGKRGKPLHFKGSKFHRVIPEFMCQGGDFTNGNGTGGESIYGDTFEDESFELRHNVPGLLSMANRGPNTNGSQFFITTTLTPWLNGKHVVFGKVIEGMDVVKAMEAQGSGSGAPKQEIAIADCGEL

SEQ ID NO: 1074 - DNA, 498 bp, Streptomyces griseus subsp. griseus NBRC 13350
  CDS (1)..(498): transl_table=11
atgacaaccaaggtctacttcgacatcaccatcgacgacgcgcccgcagggcgtatcacgttcaacctgttcgacgacgtcgtccccaagacgacggagaacttccgcgcgctcgccaccggcgagaagggcttcggctacgccggctcgtccttccaccgtgtcatcaccgacttcatgcttcagggcggcgacttcacccgcggtgacggcaccggcggcaagagcatctacggcgagaagttcgccgacgagaacttcaagctcaagcacgaccgcgtgggcctgctctcgatggccaacgccggaccgaacaccaacggttcgcagttcttcgtcaccacggtgctcaccccgtggctcgacggcaagcacgtggtcttcggcgaggtcgccgacgaggacagcatgaagctcgtccgcaagatcgaggcgctcggctcccccagcggcaagacccgcgccaaggtcaccatcgccgcgtccggcgttctctga

SEQ ID NO: 1075 - protein, 165 aa, Streptomyces griseus subsp. griseus NBRC 13350
MTTKVYFDITIDDAPAGRITFNLFDDVVPKTTENFRALATGEKGFGYAGSSFHRVITDFMLQGGDFTRGDGTGGKSIYGEKFADENFKLKHDRVGLLSMANAGPNTNGSQFFVTTVLTPWLDGKHVVFGEVADEDSMKLVRKIEALGSPSGKTRAKVTIAASGVL

SEQ ID NO: 1076 - DNA, 588 bp, Lactobacillus fermentum IFO 3956
  CDS (1)..(588): transl_table=11
atgagccaatatccgcaactgaacttggccgacgtcaaggccgttcaagcaaccattaagactaaccaaggggacatcaagctacaactgttccccgaccaagcacccaagacggtgaagaacttcgttgagttggccaagcagggctactacaaaggcgtaattttccaccgggtgattccggacttcatgatccaagggggcgacccgaccgggactggggccggtggtgaatcaatctacggccaagcctttgaagacgaattctccgaggaactctttaacttcaagggggccctttcgatggccaacgctggtcctaacaccaacgggagccaattcttcatcgtgaccaacgaaaacgtgccggctgacatggtgggccaaatgaaggccgccggctacccggacgaagtaatcgcccgctaccaagagggggggacgccgtggttggacttccaccacaccgtctttggccaggtgatcgagggcatggacgtggcccaaaagatttcccaggttaagcgcgacttccgcgaccgcccagaagaagacgtcgtgattgaagacgttgaaatcgctgaataa

SEQ ID NO: 1077 - protein, 195 aa, Lactobacillus fermentum IFO 3956
MSQYPQLNLADVKAVQATIKTNQGDIKLQLFPDQAPKTVKNFVELAKQGYYKGVIFHRVIPDFMIQGGDPTGTGAGGESIYGQAFEDEFSEELFNFKGALSMANAGPNTNGSQFFIVTNENVPADMVGQMKAAGYPDEVIARYQEGGTPWLDFHHTVFGQVIEGMDVAQKISQVKRDFRDRPEEDVVIEDVEIAE

SEQ ID NO: 1078 - DNA, 585 bp, Lactobacillus casei BL23
  CDS (1)..(585): transl_table=11
atggattacccacaattagaactcaaagactttaagggaccaaaagcgatttttgaaacaagcgaaggttgctttgaaatcgcacttttccctgaacaggcgccaaagacagttgaaaactttgtaggccttgccaaaaaacattattacgacggtttgatctttcaccggattattgatgatttcatgattcaaggcggcgaccccaccggtaccggcatgggcggtgaaagtctctgggggaagccctttaatgatgagttttcaaatcagctattcaatttgaaaggtgcactttcaatggctaatgctggtccaaatacgaatggcagccaattcttcattgtgactaatgcgcatttagacccgagcatgcaggcgcaactaagtgaggctggattcccagaacccatcattgaagcgtataaacaaggcggtacaccgtggctcgatcatcgccacacagtctttggccaagtcctaagtggcctgtccgtggttgagaagattagtaaagtcaaaacaggtgctaatgataagccggttgaaccggtcacgattgatcaggttacgattgaagactaa

SEQ ID NO: 1079 - protein, 194 aa, Lactobacillus casei BL23
MDYPQLELKDFKGPKAIFETSEGCFEIALFPEQAPKTVENFVGLAKKHYYDGLIFHRIIDDFMIQGGDPTGTGMGGESLWGKPFNDEFSNQLFNLKGALSMANAGPNTNGSQFFIVTNAHLDPSMQAQLSEAGFPEPIIEAYKQGGTPWLDHRHTVFGQVLSGLSVVEKISKVKTGANDKPVEPVTIDQVTIED

SEQ ID NO: 1080 - DNA, 498 bp, Streptomyces pristinaespiralis ATCC 25486
  CDS (1)..(498): transl_table=11
atggccaacaacgtattcttcgacatcaccatcaacgacgagcccgcgggccggatcgtcttcgagctcttcgacgacgtggtcccccggaccgccaagaacttccgcgagctcgccacgggcgagcacggctacggctacgagggttcctccttccaccgcgtcatccccgacttcatgctccagggcggcgacttcaccgccggcaacggcacgggtggccgcagcatctacggtgagaagttcgccgacgagaacttccagctcaagcacaccaagcccggccagctctccatggccaacgcggggccgaacaccaacggctcgcagttcttcatcacgaccatcgtcaccgactggctcgacaacaagcacgtcgtcttcggcgaggtcgtcgagggcatggacctggtgaagaagatcgagggcctgggttcgcgctccggcgccaccaaggcgaagatcaccatcgccaagtcgggtgtcgtcgagggctga

SEQ ID NO: 1081 - protein, 165 aa, Streptomyces pristinaespiralis ATCC 25486
MANNVFFDITINDEPAGRIVFELFDDVVPRTAKNFRELATGEHGYGYEGSSFHRVIPDFMLQGGDFTAGNGTGGRSIYGEKFADENFQLKHTKPGQLSMANAGPNTNGSQFFITTIVTDWLDNKHVVFGEVVEGMDLVKKIEGLGSRSGATKAKITIAKSGVVEG

SEQ ID NO: 1082 - DNA, 606 bp, Halorubrum lacusprofundi ATCC 49239
  CDS (1)..(606): transl_table=11
atgggcagggttttcagacgggcgctcctccgcagagacatggcacgagaggtttccaatcccgacaacccgcaggtgacgcttcacacgaaccacggcgacgtcgtcgtcgagctgttcgccgaccgcgcgccgaagacggtcgagaacttcctcggactggcgcgtcacgaccccgccgccgacgcggatcccgcccgtgacacgaacacgtgggaggaccccgaaagcggcgaggtccgaggcgactcgctgtacgaggggaacgtcttccaccgcgtcatcgaggacttcatgattcagggcggcgacccgcaagagagcggccgcggcggccccggctaccagttcgacgacgagttccacgacgatctgactcacgacggtccgggaatcctctccatggcgaactccggcccgaacacgaacggctcgcagttcttcatcacgctggacgccacgccgcacctcgacggcaaacacgccgtcttcgggcaggtcatcgacgggatggacgtggtcgaggagatcggtgccgttcccaccgaccgccgcgacgagccccgcgacaccgtcgagatcgagcagatcacggtcgaggagtaa

SEQ ID NO: 1083 - protein, 201 aa, Halorubrum lacusprofundi ATCC 49239
MGRVFRRALLRRDMAREVSNPDNPQVTLHTNHGDVVVELFADRAPKTVENFLGLARHDPAADADPARDTNTWEDPESGEVRGDSLYEGNVFHRVIEDFMIQGGDPQESGRGGPGYQFDDEFHDDLTHDGPGILSMANSGPNTNGSQFFITLDATPHLDGKHAVFGQVIDGMDVVEEIGAVPTDRRDEPRDTVEIEQITVEE

SEQ ID NO: 1084 - DNA, 594 bp, Nocardia farcinica IFM 10152
  CDS (1)..(594): transl_table=11
atgcccatgacgaagctcacacgcgccgcggcggtgctcgcgctggcgctgctcaccttcctcgcgcccgggccgctgaccgccccgcaggcgcatgccgacgcgctgccgcgggtgtatctggatctgaccatcggcggcgcgcccgcgggccgggtggtgatcgagctgcgctcggacgtggtgccgcgcaccgccgagaacttccgcgcactggccaccggcgagcagggcttcggctaccgcgggtcgaccctgcaccgggtgattcccggattcatggcccagggcggcgatttcacccacggtgacggcaccggcgggcacagcatctacgggcccgtcttcgccgacgagaacttccagctgccgcacgcggggccgggcgtggtcagcatggccaaccgggggccgggcaccaacggctcgcagttcttcatcaccctggacgcgacgccgtggctggacggcaagcacgtcgtgttcggcacggtggtcgagggcatggacgtggtgcaggccgtggcggccacgggcagcgacaccggcgcgaccacgcagccggtggtcgtcgccgacagcgggcagctctga

SEQ ID NO: 1085 - protein, 197 aa, Nocardia farcinica IFM 10152
MPMTKLTRAAAVLALALLTFLAPGPLTAPQAHADALPRVYLDLTIGGAPAGRVVIELRSDVVPRTAENFRALATGEQGFGYRGSTLHRVIPGFMAQGGDFTHGDGTGGHSIYGPVFADENFQLPHAGPGVVSMANRGPGTNGSQFFITLDATPWLDGKHVVFGTVVEGMDVVQAVAATGSDTGATTQPVVVADSGQL

SEQ ID NO: 1086 - DNA, 630 bp, Dehalococcoides ethenogenes 195
  CDS (1)..(630): transl_table=11
atgaaatccactaaagcccttattttggctacacttttccccgtaaccctgtttgccagcggctgcaacggcggagatgccgcccctgaagtaacccccatgtcctgggatgctgccccggccatgcagatagaccctgccaagcaatatttcgccacggtggaaaccactttgggcagcttcaagattgagctttttgcctccgaatcccccgtgacggttaataattttgtatttctggctaaagaaaactactacaacggggtaatcttccaccgcataatgaaagcttttatgattcagaccggtgaccagaccggcaccggcagaggcggcccgggttaccgctttgctgatgaactgccggtaaaacattcgtatgaccccggtatagttgccatggcaaatgccggccccaataccaacggcagccagttctttatctgtaccggcgcacaagctaaaaacctggactaccagcccaactacacccagttcggccgggtgattgaaggaatggatgtgattaccaagctggcgtcagtaccggtagtagctaacagttatggcgaggtaagcaccccctccaatccccccaagattatcaagataactataaccgaaggctaa

SEQ ID NO: 1087 - protein, 209 aa, Dehalococcoides ethenogenes 195
MKSTKALILATLFPVTLFASGCNGGDAAPEVTPMSWDAAPAMQIDPAKQYFATVETTLGSFKIELFASESPVTVNNFVFLAKENYYNGVIFHRIMKAFMIQTGDQTGTGRGGPGYRFADELPVKHSYDPGIVAMANAGPNTNGSQFFICTGAQAKNLDYQPNYTQFGRVIEGMDVITKLASVPVVANSYGEVSTPSNPPKIIKITITEG

SEQ ID NO: 1088 - DNA, 594 bp, Staphylococcus aureus subsp. aureus COL
  CDS (1)..(594): transl_table=11
atggctaactatccacagttaaacaaagaagtacaacaaggtgaaatcaaagtggttatgcacacaaataaaggtgacatgacattcaaattatttccaaatattgcaccaaaaacagttgaaaattttgtgacacatgcaaaaaatggttattatgatggaatcacattccaccgtgtcattaatgacttcatgattcaaggtggcgatccaacagctactggtatgggtggcgaaagtatttatggcggtgcttttgaagatgaattttcattaaatgcatttaacttatatggcgcattatcaatggctaactcaggacctaatactaatggttcacaatttttcattgttcaaatgaaagaagtacctcaaaatatgttaagtcaacttacagatggtggctggcctcaaccaatcgttgatgcatatggcgaaaagggtggtacaccatggttagatcaaaaacatacagtattcggtcaaatcattgatggtgaaactacattagaagatattgcaaatacaaaagtgggaccacaagataaaccacttcatgatgttgtaattgaatctattgatgttgaagaataa

SEQ ID NO: 1089 - protein, 197 aa, Staphylococcus aureus subsp. aureus COL
MANYPQLNKEVQQGEIKVVMHTNKGDMTFKLFPNIAPKTVENFVTHAKNGYYDGITFHRVINDFMIQGGDPTATGMGGESIYGGAFEDEFSLNAFNLYGALSMANSGPNTNGSQFFIVQMKEVPQNMLSQLTDGGWPQPIVDAYGEKGGTPWLDQKHTVFGQIIDGETTLEDIANTKVGPQDKPLHDVVIESIDVEE

SEQ ID NO: 1090 - DNA, 627 bp, Dehalococcoides sp. CBDB1
  CDS (1)..(627): transl_table=11
atgaaatccactaaagcccttattttggctacactgttccccgtaactctgtttgccggcagctgcggcggcgatgcagtacctgaagtaacacccatgtcctggactaccgccccagccatgcagatagaccccgccaagcaatactatgctaccattgaaactacactggggagtttcaagattgagctctttgcttctgaatcccccaaaacagtaaataattttgtttttctggctaagcaaaactactacaacggggttattttccaccgcataataaaagagtttatgatccagaccggtgaccagaccggcaccggcagaggtggtccgggttaccgctttgcggatgaactgccggtaaaacactcgtatgaccccggcatagttgccatggcaaacgccggtcccaataccaacggcagccagttctttgtctgtaccggagcacaggctaaaaatctgaactaccaacccaactacacccagtttggcagggtgattgagggtatggacgtgattaccaagctggcttcagtatcagtggtgggtaacagttatggtgaggtcagcaccccatccaatccccccaagattataaaaataaccataactgaaagctaa

SEQ ID NO: 1091 - protein, 208 aa, Dehalococcoides sp. CBDB1
MKSTKALILATLFPVTLFAGSCGGDAVPEVTPMSWTTAPAMQIDPAKQYYATIETTLGSFKIELFASESPKTVNNFVFLAKQNYYNGVIFHRIIKEFMIQTGDQTGTGRGGPGYRFADELPVKHSYDPGIVAMANAGPNTNGSQFFVCTGAQAKNLNYQPNYTQFGRVIEGMDVITKLASVSVVGNSYGEVSTPSNPPKIIKITITES

SEQ ID NO: 1092 - DNA, 576 bp, Natronomonas pharaonis DSM 2160
  CDS (1)..(576): transl_table=11
atgagcgatgatgcttcggtctccgaccccgagaacccgaccgcgacgatagcgacgacccacggcgacatcaccgtcgaactcttcgagcagcgcgccccgcgaaccgtcgagaacttcatcggtcttgcgacgggggccaacgattacgagggaaccgacatcgagcccggaaccggcgcgtgggaagaccccgaaaccggtgaaaagcggattgacccactctacgacgatgtgcccttccaccgcgtcattgaggacttcatgattcagggcggtgacccgaccggaaccggccgcggcggccccggctaccagttcgacgacgagttccacgacgagctgtcccacgacggccccggtatcctctcgatggcgaactccggccccgacacgaacgggagccagttcttcatcacgctggacgcacagccgcatctcgacggccgacacgcggtcttcggccaggtcatcgacgggatggatgtcgtcgaagaggtcggctcgctgccgaccggccgaaacgacgacccgcaggaagacgtcagtatcgaatccgtcgacgtcgaccaatag

SEQ ID NO: 1093 - protein, 191 aa, Natronomonas pharaonis DSM 2160
MSDDASVSDPENPTATIATTHGDITVELFEQRAPRTVENFIGLATGANDYEGTDIEPGTGAWEDPETGEKRIDPLYDDVPFHRVIEDFMIQGGDPTGTGRGGPGYQFDDEFHDELSHDGPGILSMANSGPDTNGSQFFITLDAQPHLDGRHAVFGQVIDGMDVVEEVGSLPTGRNDDPQEDVSIESVDVDQ

SEQ ID NO: 1094 - DNA, 585 bp, Lactobacillus sakei subsp. sakei 23K
  CDS (1)..(585): transl_table=11
atgacatttccacaattagatttagaaaactttgcaggaccaacagcaacttttgacaccaaccatggtgaattcactgttgcgctattcccagaacaagcgcctaagacggttgaaaacttcatcggcttagctgaaaaagattactatgacggtatcgtcttccaccgagtaattaacgacttcatgattcaaggtggcgatcctacaggtacaggtatgggtggcgaaagtttatggggccaagcttttggtgatgaatttagccaagaacttttcaacttgaatggtgctttatcaatggctaatgctggtcctaatacaaatggtagccaattctttattgtgactaatgaacacatcaacccaagcatgatgtctcaaatgcctggtgctggctatcctgaagaagtgattgcagcttacgaaaaaggtggtacaccttggttagatcacaaacatactgtctttggccaagttttaagtggcatggacgttgttaatgaaattaatgctgttgaaacagggatgcaagacaaacctgttgatccagtggttatcaatcacatttcaatcaaacactaa

SEQ ID NO: 1095 - protein, 194 aa, Lactobacillus sakei subsp. sakei 23K
MTFPQLDLENFAGPTATFDTNHGEFTVALFPEQAPKTVENFIGLAEKDYYDGIVFHRVINDFMIQGGDPTGTGMGGESLWGQAFGDEFSQELFNLNGALSMANAGPNTNGSQFFIVTNEHINPSMMSQMPGAGYPEEVIAAYEKGGTPWLDHKHTVFGQVLSGMDVVNEINAVETGMQDKPVDPVVINHISIKH

SEQ ID NO: 1096 - DNA, 660 bp, Neorickettsia sennetsu str. Miyayama
  CDS (1)..(660): transl_table=11
atgatgagggccagtgtcacaactattactgcgtttgttctgttcttttgtggtgtttgttgctcacatgcctctgtggtattcctgcagtctcaagaaggtgtattatcatatcctgagcacgtgagttttaataagattcagcaaatgaaagagaagaatgcaaatcccgtagtaggtctcgagataggtgctggtgctgagatgttgggtgagatagagattgagctcgcagcagatgtggtacctagaactgcagaaaactttcttcaactctgtactggtaagaatgggttcggctacaaaggttctatatttcataggataataccttccttcatgatacaaggcggtgactttactcagggtaatggtacaggtggccactcgatatacaacaatgatgtttttcccgatgaaaactttgtcataaaacacactggtcccggaaaggtctcaatggccaaccgtggtccgaataccaatggatcacaattctttattactacagtagagaccccctggttggatggtaaacacgttgtttttggacaggttattaggggaatgtcagttgtgaaaaaaatagaaagttatggttccagcaacgggagaccatcaagaattataaagatattggattgttggcaggtgtcgtag

SEQ ID NO: 1097 - protein, 219 aa, Neorickettsia sennetsu str. Miyayama
MMRASVTTITAFVLFFCGVCCSHASVVFLQSQEGVLSYPEHVSFNKIQQMKEKNANPVVGLEIGAGAEMLGEIEIELAADVVPRTAENFLQLCTGKNGFGYKGSIFHRIIPSFMIQGGDFTQGNGTGGHSIYNNDVFPDENFVIKHTGPGKVSMANRGPNTNGSQFFITTVETPWLDGKHVVFGQVIRGMSVVKKIESYGSSNGRPSRIIKILDCWQVS

SEQ ID NO: 1098 - DNA, 588 bp, Lactobacillus delbrueckii subsp. bulgaricus ATCC 11842
  CDS (1)..(588): transl_table=11
atgtctgaatacccacaacttaaccttgaccaagccaagggcccaaaggcaactatcaagaccaaccacggcgacatcgtcattcagcttttcccagaagaagcaccaatgactgttgaaaacttcgtccgcctggcacaaaagggctactacgacggcgtaactttccaccgggtgatcagcgacttcatgatccaaggcggggacccggaaggtactggtgccggcggtcaaagcatctggggccacaactttgaagatgaattctcaaacgaactcttcaacctgcgcggggctttgtcaatggctaatgctggtccaaacaccaacggctcacaattcttcatcgtgcaaaacaagaacatgccaaagcgcttcattcaacaattgcgcgatgcccaatatccagaagatgttgtcaaggcttacaagcaaggtggtacgccatggcttgaccacagacacactgtttttggccatgtaactgaaggcatggatgtcgttgacgaaattgccaaggtagccaaggatggcaacgacaagccactagaagacgtggtaatcacgactgttgagattgctgactaa

SEQ ID NO: 1099 - protein, 195 aa, Lactobacillus delbrueckii subsp. bulgaricus ATCC 11842
MSEYPQLNLDQAKGPKATIKTNHGDIVIQLFPEEAPMTVENFVRLAQKGYYDGVTFHRVISDFMIQGGDPEGTGAGGQSIWGHNFEDEFSNELFNLRGALSMANAGPNTNGSQFFIVQNKNMPKRFIQQLRDAQYPEDVVKAYKQGGTPWLDHRHTVFGHVTEGMDVVDEIAKVAKDGNDKPLEDVVITTVEIAD

SEQ ID NO: 1100 - DNA, 747 bp, Myxococcus xanthus DK 1622
  CDS (1)..(747): transl_table=11
atgcggacccaattcctgacgactgtcctcctctgccttaccctcaccgcctgcaaggactccgacaagaaggaatccatggggggtggtaccccgccttccgcgacgacgccggcgaagcccacggcgccttccgccgccgaggtgccggccgcggcgccccccgccgaggccgcctcgggtgaatggacgaagaaggtccaggcgggccaggacgtctacgccaccctcgaaacgaaccagggcgccatcgtcgtgcgcctcttctccaaggatgcccccaagacggtggccaacttcgtgggcctggccacgggcgagaaggcctggacggacccgaagacgggccagcgcgtggagggcaagccgctgtacgacggcgtcatcttccaccgggtgattccgggcttcatgattcagggcggcgaccccacgggcaccggccgcggcgacccgggctaccgcttcgaggacgagttccagagcggccgcaccttcgacaagaagggcctgctggccatggccaacgccggccccggcaccaacggcagccagttcttcatcaccacctccacgccggactacctcaacaaccgtcacaccatcttcggtgaagtggtgtcgggctacgacgtggtggagaagatttccaacgtgcagcgcgacccgcgcgacaagcccctggagccggtcgtcatccagaagatcgcgatgagcgaccaggccccggccggcagcgggaactga

SEQ ID NO: 1101 - protein, 248 aa, Myxococcus xanthus DK 1622
MRTQFLTTVLLCLTLTACKDSDKKESMGGGTPPSATTPAKPTAPSAAEVPAAAPPAEAASGEWTKKVQAGQDVYATLETNQGAIVVRLFSKDAPKTVANFVGLATGEKAWTDPKTGQRVEGKPLYDGVIFHRVIPGFMIQGGDPTGTGRGDPGYRFEDEFQSGRTFDKKGLLAMANAGPGTNGSQFFITTSTPDYLNNRHTIFGEVVSGYDVVEKISNVQRDPRDKPLEPVVIQKIAMSDQAPAGSGN

SEQ ID NO: 1102 - DNA, 585 bp, Lactobacillus casei ATCC 334
  CDS (1)..(585): transl_table=11
atggattacccacaattagaactcaaagactttaagggaccaaaagcgatttttgaaacaagcgaaggtcgctttgaaatcgcacttttccctgaacaggcgccaaagacagttgaaaactttgtaggccttgccaaaaaacattattacgacggtttgatctttcaccggattattgatgatttcatgattcaaggcggcgaccccaccggtaccggcatgggcggtgaaagtctctgggggaagccctttaatgatgagttttcaaatcagctattcaatttgaaaggtgcactttcaatggctaatgctggtccaaatacgaatggcagccaattcttcattgtgactaatgcgcatttagacccgagcatgcaggcgcaactaagtgaggctggattcccagaacccatcattgaagcgtataaacaaggcggtacaccgtggctcgatcatcgccacacagtctttggccaagtcctaagtggcctgtccgtggttgagaagattagtaaagtcaaaacaggtgctaatgataagccggttgaaccggtcacgattgatcaggttacgattgaagactaa

SEQ ID NO: 1103 - protein, 194 aa, Lactobacillus casei ATCC 334
MDYPQLELKDFKGPKAIFETSEGRFEIALFPEQAPKTVENFVGLAKKHYYDGLIFHRIIDDFMIQGGDPTGTGMGGESLWGKPFNDEFSNQLFNLKGALSMANAGPNTNGSQFFIVTNAHLDPSMQAQLSEAGFPEPIIEAYKQGGTPWLDHRHTVFGQVLSGLSVVEKISKVKTGANDKPVEPVTIDQVTIED

SEQ ID NO: 1104 - DNA, 591 bp, Lactococcus lactis subsp. cremoris SK11
  CDS (1)..(591): transl_table=11
atgacttacccacaacttgatcttgaaaactacaaaagtaccacagcaattattaataccaatcatggaaaaatgactgtcaaattatttgatagtcttgctcctaaaacagtaaaaaactttattgaactcagtaaagaaggctattatgatggtgtgattttccaccgaatcatcaaagattttatgattcaaggaggagatccaacaggaactgggatgggtggttcttcaatttacggtgaaaaatttgaggatgagttctcaatagatctctttaaccttcgtggggctttgtcaatggcaaatgccggtcctaatacgaacggtagtcaatttttcatcgttcaaaataaaaacttgccttatccaaaggactcacttattcaagggggttggcctgaagaagtagcagaaacatatactgatggtggaactccgcatcttgacggtcgacatactgtttttggtcaattagttgatgaagaaagctacaaagtccttgataaaatcgcagatgtacgtgtgggtgcacaagataaaccagttgacgatgttgtcattgaatcagttgagattatcgagccataa

SEQ ID NO: 1105 - protein, 196 aa, Lactococcus lactis subsp. cremoris SK11
MTYPQLDLENYKSTTAIINTNHGKMTVKLFDSLAPKTVKNFIELSKEGYYDGVIFHRIIKDFMIQGGDPTGTGMGGSSIYGEKFEDEFSIDLFNLRGALSMANAGPNTNGSQFFIVQNKNLPYPKDSLIQGGWPEEVAETYTDGGTPHLDGRHTVFGQLVDEESYKVLDKIADVRVGAQDKPVDDVVIESVEIIEP

SEQ ID NO: 1106 - DNA, 588 bp, Lactobacillus gasseri ATCC 33323
  CDS (1)..(588): transl_table=11
atggaatacccacaattagatctaaagaatgcgaaaggtccaaaagctataattcaaactaatcatggagatattgaagttcaattatttgaaaaagaagctccaatgactgttgaaaattttgttcgtttagctaaaaaaggctattacgatggtactacttttcatcgagtaatcagtgatttcatgatccaaggtggtgatccaaagggtgacggtacaggtggtgaaagtatctggggacatcccttcgaagatgaattttcaaacaaattatttaatgtacgtggtgcgctctcaatggctaattctggtcctaatacaaatggaagccaattctttattgttcaaaataagaatgtacctaaacggatgattaaagaaatggatgctgcaggttatccaaaagaattagttaaggcatataaacaaggcggaaccccatggcttgacggtcgtcacactgtttttggacaagtaattaaaggtatggatgttgttgatgaaattgcaaaggttccgcgtgacaaggcaaatgataaaccaaaagaagatgtaatcattaagagtattcatattgaagattaa

SEQ ID NO: 1107 - protein, 195 aa, Lactobacillus gasseri ATCC 33323
MEYPQLDLKNAKGPKAIIQTNHGDIEVQLFEKEAPMTVENFVRLAKKGYYDGTTFHRVISDFMIQGGDPKGDGTGGESIWGHPFEDEFSNKLFNVRGALSMANSGPNTNGSQFFIVQNKNVPKRMIKEMDAAGYPKELVKAYKQGGTPWLDGRHTVFGQVIKGMDVVDEIAKVPRDKANDKPKEDVIIKSIHIED

SEQ ID NO: 1108 - DNA, 588 bp, Leuconostoc mesenteroides subsp. mesenteroides ATCC 8293
  CDS (1)..(588): transl_table=11
atggtagattatccacaattagacgctgctaattatagtggccctgttgcaatttttaaaacaaataagggtgatattagaattaaattgttttctgatattgcgccaaaaactgtcgaaaatttcattacacatgcaaaaaatggatattacaacaatggcatttttcatcgtgtgatcagtgactttatgattcaaggtggcgatcctgaaggaaccggtatgggcggtgaaagtatttggggcggcagttttgaagatgagtttagcgatcgtttgtttaatacgtatggggctctttcgatggctaacgctggtcctaatacgaatggatcgcagttctttattgtacaggcatctaattttccatcacaaatggtttcggcattgcgtgatttaccggcagaggtagctgatttttatcgacaaaaaggtggtacaccatggcttgatggcaaacatactgtgtttggtcaagtgattgaaggattaaatattgtcgatgaaatagcgaaagtaaaagttgatatggcggataagccacgtgtagacgtagttatcaatacgattgagatagcaggtgcataa

SEQ ID NO: 1109 - protein, 195 aa, Leuconostoc mesenteroides subsp. mesenteroides ATCC 8293
MVDYPQLDAANYSGPVAIFKTNKGDIRIKLFSDIAPKTVENFITHAKNGYYNNGIFHRVISDFMIQGGDPEGTGMGGESIWGGSFEDEFSDRLFNTYGALSMANAGPNTNGSQFFIVQASNFPSQMVSALRDLPAEVADFYRQKGGTPWLDGKHTVFGQVIEGLNIVDEIAKVKVDMADKPRVDVVINTIEIAGA

SEQ ID NO: 1110 - DNA, 543 bp, Arthrobacter aurescens TC1
  CDS (1)..(543): transl_table=11
atgaccatcgcaaccgcaaaagcaacgatccacacgagcctcggcgacatcaaggttgacctcttcggcaaccacgcccccaagacggtcgccaacttcgttggcctggccacgggcgaaaagtcctggaaccaccccgaaaccggcgaagacaagaccggcaccccgctttacaacggcaccatcttccaccggatcatcaaagatttcatgatccaggcaggcgaccccttgggccgcggcgtgggtggaccgggctaccagttcgatgacgaaatccacccggaactgaccttcaacgctccgtacaagcttgctatggccaacgccggcatccagatgggcaagggcaccaacgggtcacagttcttcatcaccaccgtgaacacggactggctgttcggcaagcacagcatcttcggtgaagtgacggacgaagagtcccgcaaggttgttgacgcgatcgagtccgtccgcacgggcatgggcgaccgcccggttgaggacgtcgtcatcaacagcatcgacatcgaacagctctag

SEQ ID NO: 1111 - protein, 180 aa, Arthrobacter aurescens TC1
MTIATAKATIHTSLGDIKVDLFGNHAPKTVANFVGLATGEKSWNHPETGEDKTGTPLYNGTIFHRIIKDFMIQAGDPLGRGVGGPGYQFDDEIHPELTFNAPYKLAMANAGIQMGKGTNGSQFFITTVNTDWLFGKHSIFGEVTDEESRKVVDAIESVRTGMGDRPVEDVVINSIDIEQL

SEQ ID NO: 1112 - DNA, 525 bp, Crocosphaera watsonii WH 8501
  CDS (1)..(525): transl_table=11
atggcaaacgcttatcctttggtaactaaaaaagtattcatggatatttccatcggtggagaaaaagcagaaagaattgtaatcggtttatttggcgaagtagttcccaagacggttgacaatttttaccaactctgcacccacgaaaaagggtttggctaccgtcaaagttctttccatcgggtaattaaggattttatgatgcaaggaggggacttcaccagagggaacggtactggtgggaaatctatttacggagaaaagtttcctgacgaaaactttaccgtgaaacacaatggccgtggttggttatctatggctaatgcaggaccaaataccaacggttctcaattttttattaccttcacccaaaccccctggttagacggaaaacatacggtttttggtaaggtgttagaagggctagaggtattagataaggtagaaaactgtgacaccgatggcagagatcgaccccagcaagacatcaaaattgaagacagtggtagcttacctgtggagtaa

SEQ ID NO: 1113 - protein, 174 aa, Crocosphaera watsonii WH 8501
MANAYPLVTKKVFMDISIGGEKAERIVIGLFGEVVPKTVDNFYQLCTHEKGFGYRQSSFHRVIKDFMMQGGDFTRGNGTGGKSIYGEKFPDENFTVKHNGRGWLSMANAGPNTNGSQFFITFTQTPWLDGKHTVFGKVLEGLEVLDKVENCDTDGRDRPQQDIKIEDSGSLPVE

SEQ ID NO: 1114 - DNA, 585 bp, Enterococcus faecium DO
  CDS (1)..(585): transl_table=11
atggcattcccacaactagatttaaaaagtgaaaaaggaccaaaagctgttatcaaaacaaaccgtggtgacattactgttcaattattccctgaactagcaccgaagacggttcaaaatttcattgaactttccaaaaaaggttattatgatggcgtgatttttcaccgcgttattcctgatttcatgatccaaggcggcgatccaactggaacaggaatgggtggcgaaagtatttatggcgaaagttttgaagatgaattcagtcgtgaactgttcaaccttcgcggagctttatctatggcaaattcaggtccaaacacaaacggaagccaattctttattgtaaataacacaaatgtgccagctaatatgcttggacaactagaaggtgctggattcccatcagaaatcattgaagcgtataaaggtggcggaactccttggctagatttccgacatacagtctttggacatgtactagaagggatggacacagtagatgaaatcgcaaatgtacaacgtggtccacaagaccgacctgtacatgatgtagtgattgaaacaattgaaatttcagaatag

SEQ ID NO: 1115 - protein, 194 aa, Enterococcus faecium DO
MAFPQLDLKSEKGPKAVIKTNRGDITVQLFPELAPKTVQNFIELSKKGYYDGVIFHRVIPDFMIQGGDPTGTGMGGESIYGESFEDEFSRELFNLRGALSMANSGPNTNGSQFFIVNNTNVPANMLGQLEGAGFPSEIIEAYKGGGTPWLDFRHTVFGHVLEGMDTVDEIANVQRGPQDRPVHDVVIETIEISE

SEQ ID NO: 1116 - DNA, 600 bp, Blastopirellula marina DSM 3645
  CDS (1)..(600): transl_table=11
atgttgcgtttggcgatgtttgttgcgatttcggttatttccgcttcttcgttgttagcggctcctgcttcgcagggcaaagtgaccgacaaggtctttctcgaagtggatgtcaacggcaagcccgccggccggattgtgatcggtttgtttggcgatacgacgccaaagacggccgcaaacttccgtgctctttgcaccggtgaaaagggaaaaggccgctctggcaagatgctgacctacaagggaagctcgttccaccgcattatcccgcagttcatgctgcaggggggcgatttcacaaacggcaacggcaccggcggcgaaagcatctatggcgccaagttcgccgacgagaactttgatttgacgcacgatgggcccggcgtgttgagcatggcgaactcgggaccggggaccaatggctcccagttctttatcaccaccgtgaagaccagttggcttgacggcaagcatgtcgtctttggtcgtgtggtcgaaggaatggaggtcgtcaaaaggcttgaatccctcggttcgcagagcggcaaacctcgtgcgacggtgacgatcgccaactgcggcgtctgggataaatag

SEQ ID NO: 1117 - protein, 199 aa, Blastopirellula marina DSM 3645
MLRLAMFVAISVISASSLLAAPASQGKVTDKVFLEVDVNGKPAGRIVIGLFGDTTPKTAANFRALCTGEKGKGRSGKMLTYKGSSFHRIIPQFMLQGGDFTNGNGTGGESIYGAKFADENFDLTHDGPGVLSMANSGPGTNGSQFFITTVKTSWLDGKHVVFGRVVEGMEVVKRLESLGSQSGKPRATVTIANCGVWDK

SEQ ID NO: 1118 - DNA, 516 bp, Stigmatella aurantiaca DW4/3-1
  CDS (1)..(516): transl_table=11
atggcgaacagcaacgtcttcttcgacatttccatcaacgacaccccgtccggccgcatcgtcttcgcgctcgactatgagcgcacgcccaagaccgccgagaacttccgggccctgtgcacgggcgagaagggcatcggaaagcagggcaagccgctgcactacaagggctcgatcttccaccgcatcatcccgcagttcatgctccaggggggcgacttcaccaacggcaatggcaccggaggggagtccatctacggggagaagttcaaggacgagaacttcatcaacaagcacaccaagcccggccagctgtccatggccaacgcgggggccaacaccaacggctcgcagttcttcatcaccaccattcccaccacgtggctcgacgggaagcacgtcgtcttcggcgaagtcatcgaggggatggatctggtgaagaagatcgagtcgttcggcacggcctcgggtcaacccaaggccaagatcgtcatcacggacagcggcgcggtgtag

SEQ ID NO: 1119 - protein, 171 aa, Stigmatella aurantiaca DW4/3-1
MANSNVFFDISINDTPSGRIVFALDYERTPKTAENFRALCTGEKGIGKQGKPLHYKGSIFHRIIPQFMLQGGDFTNGNGTGGESIYGEKFKDENFINKHTKPGQLSMANAGANTNGSQFFITTIPTTWLDGKHVVFGEVIEGMDLVKKIESFGTASGQPKAKIVITDSGAV

SEQ ID NO: 1120 - DNA, 705 bp, Halorubrum lacusprofundi ATCC 49239
  CDS (1)..(705): transl_table=11
atgtcgccgattcggcggcctcgattcataagggcgacgttctgtgccggttcagacaactgtcacctcgccgccgccgatcgaccgcctagagcgcggatgggcagggttttcagacgggcgctcctccgcagagacatggcacgagaggtttccaatcccgacaacccgcaggtgacgcttcacacgaaccacggcgacgtcgtcgtcgagctgttcgccgaccgcgcgccgaagacggtcgagaacttcctcggactggcgcgtcacgaccccgccgccgacgcggatcccgcccgtgacacgaacacgtgggaggaccccgaaagcggcgaggtccgaggcgactcgctgtacgaggggaacgtcttccaccgcgtcatcgaggacttcatgattcagggcggcgacccgcaagagagcggccgcggcggccccggctaccagttcgacgacgagttccacgacgatctgactcacgacggtccgggaatcctctccatggcgaactccggcccgaacacgaacggctcgcagttcttcatcacgctggacgccacgccgcacctcgacggcaaacacgccgtcttcgggcaggtcatcgacgggatggacgtggtcgaggagatcggtgccgttcccaccgaccgccgcgacgagccccgcgacaccgtcgagatcgagcagatcacggtcgaggagtaa

SEQ ID NO: 1121 - protein, 234 aa, Halorubrum lacusprofundi ATCC 49239
MSPIRRPRFIRATFCAGSDNCHLAAADRPPRARMGRVFRRALLRRDMAREVSNPDNPQVTLHTNHGDVVVELFADRAPKTVENFLGLARHDPAADADPARDTNTWEDPESGEVRGDSLYEGNVFHRVIEDFMIQGGDPQESGRGGPGYQFDDEFHDDLTHDGPGILSMANSGPNTNGSQFFITLDATPHLDGKHAVFGQVIDGMDVVEEIGAVPTDRRDEPRDTVEIEQITVEE

SEQ ID NO: 1122 - DNA, 516 bp, Desulfatibacillum alkenivorans AK-01
  CDS (1)..(516): transl_table=11
atggcaaatcctgtcgccgtttttgacacgagcatgggcgcctttaaggcggaactttacaaggataaaatgcccggcaccgccggcaattttatcaagctggccaaagagggcttctacgacggcctgcattttcaccgtattatcgccgacttcatgattcagttcggctgcccccacagcaaggaccccctgagcccccgctgcggaaccggcggaccggacagcggctgcatcaaggacgagttcccggaagacgccaagttctccaacgagcccggaaccctgtccatggccaacacgggcatgcccaactccggcggctcccagttcttcatcaacctggtccataacgactacctggactggttcacccccggacgctccaagcaccccgtcttcggcaaggtcatagaaggcatggacgtggtggaagagctgggcaaggtggaaaccggccccacggaccgccccaagactccggtgaaagtcaacagcatcaccatcgaggaatag

SEQ ID NO: 1123 - protein, 171 aa, Desulfatibacillum alkenivorans AK-01
MANPVAVFDTSMGAFKAELYKDKMPGTAGNFIKLAKEGFYDGLHFHRIIADFMIQFGCPHSKDPLSPRCGTGGPDSGCIKDEFPEDAKFSNEPGTLSMANTGMPNSGGSQFFINLVHNDYLDWFTPGRSKHPVFGKVIEGMDVVEELGKVETGPTDRPKTPVKVNSITIEE

SEQ ID NO: 1124 - DNA, 630 bp, Dehalococcoides sp. VS
  CDS (1)..(630): transl_table=11
atgaaatccactaaagcccttattctggctacactgttccccgtaaccctgtttgccggcagttgcagcggcggagatgccgtacccgaagtgacacccatgtcatggactaccgcccccgccatgcaaatagaccctgccaagcagtattatgcaactgttgaaactacactagggacttttaaaattgagctatttgcctctgaatctcccaaaaccgtaaataattttgtatttctagccaaggaaaactactacaacggggtaattttccaccgcataataaaagaatttatgattcagacaggtgaccagacaggtaccggcagaggaggcccgggttaccgctttgctgacgaactgccggtaaaacactcgtatgatcccggcatagttgccatggcaaacgcaggccccaataccaacggcagccagttctttatttgcaccggcgcacaggcaaaaaacctgaactaccagcccaactacacccagtttggcagggtaattgaaggaatggatgtgattaccaagctggcatccgtgacggtgataggtaacagctatggtgaggtcagcactccctccaatccccctaaaattataaagataaccataaccgaaggctaa

SEQ ID NO: 1125 - protein, 209 aa, Dehalococcoides sp. VS
MKSTKALILATLFPVTLFAGSCSGGDAVPEVTPMSWTTAPAMQIDPAKQYYATVETTLGTFKIELFASESPKTVNNFVFLAKENYYNGVIFHRIIKEFMIQTGDQTGTGRGGPGYRFADELPVKHSYDPGIVAMANAGPNTNGSQFFICTGAQAKNLNYQPNYTQFGRVIEGMDVITKLASVTVIGNSYGEVSTPSNPPKIIKITITEG

SEQ ID NO: 1126 - DNA, 726 bp, Paenibacillus sp. JDR-2
  CDS (1)..(726): transl_table=11
atgtttaaacgcaataaagggttgccggtgcttgtactgcttacggcagcgttactgctcgtcattgccggctgcggcggcggcagcaagactagctccaacagcaacggcacaagcggctccggagcggctaacgcaacggcaacgccggaagccacccagccgcctcagccggacaagctgcttggctccgataagcatccggtcgtaacggtcgagatggataacggcaaatcgtttaaggttgagctgtacccggagattgctccaaataccgtcaacaacttcgtttcgcttgtgaaaaaaggcttctatgacggcacgatcttccatcgcgtgatccccggcttcatgattcagggaggcgatcccgaaggcactggcatgggaggccctggctacggcattaagggcgagttcatgagcaacggcttccagaacgatctgttacatacgcgcggcgtaatctccatggcacgttccggagatcccgattccgcaggctcccagttcttcgttatggttgccgatgccccgtcgcttgacggcgattacgcggcattcggcaaagtatcagaaggtatggacacagtggatgaaatcgtcaatcaggcaaccgagaagacgggcgaaggctcccgtccggttaaaccgatggcgattaagaaagcgactgtcgatacaaaaggcatgacctttgccgagcctgaaaaggtgaataaatag

SEQ ID NO: 1127 - protein, 241 aa, Paenibacillus sp. JDR-2
MFKRNKGLPVLVLLTAALLLVIAGCGGGSKTSSNSNGTSGSGAANATATPEATQPPQPDKLLGSDKHPVVTVEMDNGKSFKVELYPEIAPNTVNNFVSLVKKGFYDGTIFHRVIPGFMIQGGDPEGTGMGGPGYGIKGEFMSNGFQNDLLHTRGVISMARSGDPDSAGSQFFVMVADAPSLDGDYAAFGKVSEGMDTVDEIVNQATEKTGEGSRPVKPMAIKKATVDTKGMTFAEPEKVNK

SEQ ID NO: 1128 - DNA, 594 bp, Lactobacillus reuteri 100-23
  CDS (1)..(594): transl_table=11
atgaaatatccccaattatcattggatgaagttaaaggacccaaagcagtgattgaaactacaatggggacaattactgcccagctttttccaaaatacgcacctaaaacggttgagaactttgttaagttagcggagaaaaattattatgataatgtaattttccaccgggttattccagactttatgattcaaggtggtgacccaactggaactggacgtggcggcgaaagtatttatggtcacccatttgaagacgagttttctgaagaattgtttaacttcactggtgctctttcgatggctaatgctggcccgaacacaaatggcagccaattctttattgtcactaatgaacatgttccggaaaatatgattgagcaaatgaaagccgttgggtacccacaagagattattgattattatgaaaaacatggtggtacaccgtggcttgacttccatcacaccgtatttggtcaagtgttatctgggatggatgttgtcgaaaagatcagtaaagttaagcgggatgcgatggataagcctgaaaaagacgttattattaaaacaattaaaattgaaaaagagaagtaa

SEQ ID NO: 1129 - protein, 197 aa, Lactobacillus reuteri 100-23
MKYPQLSLDEVKGPKAVIETTMGTITAQLFPKYAPKTVENFVKLAEKNYYDNVIFHRVIPDFMIQGGDPTGTGRGGESIYGHPFEDEFSEELFNFTGALSMANAGPNTNGSQFFIVTNEHVPENMIEQMKAVGYPQEIIDYYEKHGGTPWLDFHHTVFGQVLSGMDVVEKISKVKRDAMDKPEKDVIIKTIKIEKEK

SEQ ID NO: 1130 - DNA, 585 bp, Lactobacillus rhamnosus HN001
  CDS (1)..(585): transl_table=11
atggactatccacaactagaacttgcagaattcaaaggaccaaaagcaatttttgaaaccagtgaaggacattttgagattgcactatttccaaaacaggctcctaaaaccgttgagaacttcatcggtttaactaaaaaagggtactacgatggcctgatttttcaccgcattattgccgattttatgattcaaggcggcgacccgacaggcacgggaatgggcggtgaaagcctgtggggcaaaccctttgaagatgaattttcaaatcaactatttaatctaaaaggtgctttgtcaatggccaacgcgggtcctaacaccaacggcagtcaatttttcatcgtcacgaataggcatctggatccgagcatgaaggcacaattaagcgaagccggatttcccgaaccgattatcaaagcctatgaacaaggcggcacaccgtggttagatcatcgccacaccgtttttggtcaagtgttatcaggactatcgattgtggagaaaatcggtcaagtcaaaaccggtgccaatgataagccagttgagccggtgacgatcgatcggttgacaattcaagactaa

SEQ ID NO: 1131 - protein, 194 aa, Lactobacillus rhamnosus HN001
MDYPQLELAEFKGPKAIFETSEGHFEIALFPKQAPKTVENFIGLTKKGYYDGLIFHRIIADFMIQGGDPTGTGMGGESLWGKPFEDEFSNQLFNLKGALSMANAGPNTNGSQFFIVTNRHLDPSMKAQLSEAGFPEPIIKAYEQGGTPWLDHRHTVFGQVLSGLSIVEKIGQVKTGANDKPVEPVTIDRLTIQD

SEQ ID NO: 1132 - DNA, 516 bp, Solanum sogarandinum
  CDS (1)..(516)
atggcaaatccaagggttttctttgaccttaccatcggcggtgcatcagccggccgtgtggttatggagctcttcgccgataccactcccaagaccgctgagaacttccgagctctctgtaccggtgaaaaaggtattggaaagatgggtaagcctttgcactacaagggctcaaccttccaccgtgtgatcccagggttcatgtgtcaaggaggtgatttcaccgccggaaacggtaccggaggagagtcgatctacggcgccaaattcaaggacgagaacttcgtcaagaagcacaccggcgctggaattctctccatggctaatgctggacctggaaccaacggttctcagttcttcatctgtaccgctaagactgagtggctcgatggaaagcacgtcgtgtttggacaagttgttgaaggcttggatgtgattaagaagaccgaggctgttggatctagctctggaaggtgctccaagcctgtggtggttgctgactgcggtcaactctag

SEQ ID NO: 1133 - protein, 171 aa, Solanum sogarandinum
MANPRVFFDLTIGGASAGRVVMELFADTTPKTAENFRALCTGEKGIGKMGKPLHYKGSTFHRVIPGFMCQGGDFTAGNGTGGESIYGAKFKDENFVKKHTGAGILSMANAGPGTNGSQFFICTAKTEWLDGKHVVFGQVVEGLDVIKKTEAVGSSSGRCSKPVVVADCGQL

SEQ ID NO: 1134 - DNA, 519 bp, Citrus hybrid cultivar
  CDS (1)..(519)
atgccaaaccccaaagtgttcttcgacatgaccgtcggcggtcagcccgccggcaggatcgtgatggagctcttcgccgaagtcaccccccgaaccgccgagaacttccgcgccctctgcaccggcgagaaaggcatcggcaagtccggcaagccactccactacaagggctcgtccttccaccgtgtgatccccggattcatgtgccaggggggagacttcaccgccggaaacggaaccggaggcgaatcaatctacggctcaaaattcgccgatgagaacttcgtgaagaagcacaccggccccggaatcctctccatggcgaatgccggacccggaaccaacggatctcagttcttcgtctgtacggccaagaccgagtggctcgatgggaagcacgttgtgttcggtcaagtcgtcgaaggaatggacgtcgtcaaggccatcgagaaagtggggtccagctccggaaggaccaacaagcccgtcgtgatcgctgattgcggtcaattgtcttag

SEQ ID NO: 1135 - protein, 172 aa, Citrus hybrid cultivar
MPNPKVFFDMTVGGQPAGRIVMELFAEVTPRTAENFRALCTGEKGIGKSGKPLHYKGSSFHRVIPGFMCQGGDFTAGNGTGGESIYGSKFADENFVKKHTGPGILSMANAGPGTNGSQFFVCTAKTEWLDGKHVVFGQVVEGMDVVKAIEKVGSSSGRTNKPVVIADCGQLS

SEQ ID NO: 1136 - DNA, 495 bp, Dermatophagoides farinae
  CDS (1)..(495)
atggcacttcctcgtgtttttttcgatattgctgccgataatcaaccattgggtcgtattgtcattgagctccgtagtgatgttgtgcccaaaacagcggaaaatttccgtgcactttgcactggtgaaaaaggatttggttttaaatcatcctcatttcatcgtatcatacccaattttatgatccaaggcggtgatttcactaaccataatggtactggtggtaaatccatctatggtaacaaatttgccgatgaaaatttcacacttcaacacaccggacctggtatcatgtccatggcaaatgccggtccaaacaccaatggttcacagtttttcattacaaccgtaaagactacctggttggatggcaaacacgttgtttttggttcggttgtcgaaggaatggacattgtaaaaaaggtggaaagctatggctcacaatcgggtaaaccatccaagaaagtgaccattgctaattgtggtcagctttaa

SEQ ID NO: 1137 - protein, 164 aa, Dermatophagoides farinae
MALPRVFFDIAADNQPLGRIVIELRSDVVPKTAENFRALCTGEKGFGFKSSSFHRIIPNFMIQGGDFTNHNGTGGKSIYGNKFADENFTLQHTGPGIMSMANAGPNTNGSQFFITTVKTTWLDGKHVVFGSVVEGMDIVKKVESYGSQSGKPSKKVTIANCGQL

SEQ ID NO: 1138 - DNA, 495 bp, Suidasia medanensis
  CDS (1)..(495)
atggccaaccccaaggttttctttgatatcgccattgacaaccagcccgctggacgaattgtcatcgagctccacgccaatgtggtcccgaagaccgcggagaacttccgtgctctgtgcaccggcgagaagggcttcggctacaagggatccatcttccaccggatcattcccaacttcatgtgccagggtggtgacttcaccaaccacaacggcactggtggcaagtcgatctatggcaacaagttcgaggacgagaacttcactctgaagcacaccgcccctggtgccctatcgatggccaacgcgggtcccaacaccaacggatcgcagttcttcatcaccacggtgaagactagctggctcgacggcaagcacgttgtctttggccaggtcgtcgagggcatggatgtggtcaagaagatggagtcgtacggctcgcagtcaggcaagcccaccaagcgtatctcgattaccgagagtggccagctctaa

SEQ ID NO: 1139 - protein, 164 aa, Suidasia medanensis
MANPKVFFDIAIDNQPAGRIVIELHANVVPKTAENFRALCTGEKGFGYKGSIFHRIIPNFMCQGGDFTNHNGTGGKSIYGNKFEDENFTLKHTAPGALSMANAGPNTNGSQFFITTVKTSWLDGKHVVFGQVVEGMDVVKKMESYGSQSGKPTKRISITESGQL

SEQ ID NO: 1140 - DNA, 498 bp, Maconellicoccus hirsutus
  CDS (1)..(498)
atggcatctttacccagagtgtttttcgatatgaccgccgacgatcaacctgttggaagaatcgtaatggaattacgaagcgatgttgtacctaaaaccgccgagaatttccgcgccctctgtactggagaaaaaggtttcggatatagaggcagtacctttcacagggtaatcccaaatttcatgtgccaaggaggtgatttcaccaaccataacggcactggaggcaaatctatctacggtaacaaattcgaagacgaaaacttcaccttgaaacataccggacccggtattttatctatggccaacgccggccctaacacaaacggcagccaattcttcgttacaacggtgaaaactacctggttagatggcaaacacgtagtgttcggttctgtcattgaaggtatggacgtcgtcaagaaattagaatcgtatggtagtcaaagcggcaaaacgtccaagaaaatcgtcgttcaaaatagcggccagttgtaa

SEQ ID NO: 1141 - protein, 165 aa, Maconellicoccus hirsutus
MASLPRVFFDMTADDQPVGRIVMELRSDVVPKTAENFRALCTGEKGFGYRGSTFHRVIPNFMCQGGDFTNHNGTGGKSIYGNKFEDENFTLKHTGPGILSMANAGPNTNGSQFFVTTVKTTWLDGKHVVFGSVIEGMDVVKKLESYGSQSGKTSKKIVVQNSGQL

SEQ ID NO: 1142 - DNA, 657 bp, Leptospirillum sp. Group II UBA
  CDS (1)..(657): transl_table=11
atgctctgtctggaaaaaaaacgaacagtgatggtccttgcctcagtctgccttttttttctggggtttattggcataccgcttacaggaggaatgaccttggcgaacgcagatgaaacagcaaaaccgactcttcctccgggagagtatgcggaatttgatacctcgatgggaacgattatttgtcagcttttcccccagtcagctccccacacagtcgaaaattttgtgggactggcggagggcaccaaagattttcaggaccctcagtcgggaaaaatggtcaagcgccctttttacgatggactcgttttccatcgtgtcatcaagaattttatgattcagggaggagaccccctcggaaatgggactggcggtccaggatatcagtttgacgatgaaatcgatgcttcacgggatttttctcataaaggtgtgctggcgatggcaaatgccggtccgaatacaaatggaagccagttttttataacggtggccccggccccatggctgaacggcaattattcgatcttcggtcaggtggtttcagggcagtccgtggcggataaaatttccgaagttgcgacagaccgccgggaccgtccccagactccggttgtcatccagcacgtaaaaatctttcgggtcaatccctga

SEQ ID NO: 1143 - protein, 218 aa, Leptospirillum sp. Group II UBA
MLCLEKKRTVMVLASVCLFFLGFIGIPLTGGMTLANADETAKPTLPPGEYAEFDTSMGTIICQLFPQSAPHTVENFVGLAEGTKDFQDPQSGKMVKRPFYDGLVFHRVIKNFMIQGGDPLGNGTGGPGYQFDDEIDASRDFSHKGVLAMANAGPNTNGSQFFITVAPAPWLNGNYSIFGQVVSGQSVADKISEVATDRRDRPQTPVVIQHVKIFRVNP

SEQ ID NO: 1144 - DNA, 498 bp, Artemia sanfranciscana
  CDS (1)..(498)
atgccaaacccaaaggttttctttgacctcactgctgatggcaaaaatgttggaagagttactatggagctcagagctgatgtagtcccaaagacagcagaaaacttcagagctctttgcacccacgaaaagggatttggctacaaaaattcctctttccacagaattatcccaggcttcatgtgtcagggtggtgactttaccaaccacaatggaactggtggcaagtcgatttatggcaacaaatttgaagatgaaaacttccagctcaagcacacaagcgaaggtattctctctatggctaacgctgggccaaacaccaatggctctcaattcttcatttgcacagctaaaactagttggctagatggcaaacacgtcgtctttggtaaagttgtcgacggcatggacgttgttaaacaggttgaatcttatggatcttcgagtggcaagacaagcaagaaagttgtcattgccgactgtggtcaacttgaataa

SEQ ID NO: 1145 - protein, 165 aa, Artemia sanfranciscana
MPNPKVFFDLTADGKNVGRVTMELRADVVPKTAENFRALCTHEKGFGYKNSSFHRIIPGFMCQGGDFTNHNGTGGKSIYGNKFEDENFQLKHTSEGILSMANAGPNTNGSQFFICTAKTSWLDGKHVVFGKVVDGMDVVKQVESYGSSSGKTSKKVVIADCGQLE

SEQ ID NO: 1146 - DNA, 498 bp, Streptomyces ambofaciens ATCC 23877
  CDS (1)..(498): transl_table=11
atgagcaattccaaggtttacttcgacatcgacatcgacggccaggatgcgggccgcatcgtcttcgagctcttcgaggacgtcacccccaagaccgccaagaacttcatcgagctggcgaccggcgagcacggcttcggctacgcgggttccccgttccaccgcgtgatcccgcagttcatgctccagggcggtgacttcacccggggtgacggcaccggcggcaagagcatctacggcgagaagttcgcggacgagaacttccagctgaagcacaccggcccgtacctgctctccatggcgaacgcgggaccgaacagcaacggctcgcagttcttcatcaccaccgtgcccaccccctggctggacggcaagcacgtcgtcttcggcaaggtcgtcgagggcacggagctggtcgaccggatcgagggctacggctcctccccgtccggccgcacctccgcgaagatcaccgtgcgggagtccggcaagctctga

SEQ ID NO: 1147 - protein, 165 aa, Streptomyces ambofaciens ATCC 23877
MSNSKVYFDIDIDGQDAGRIVFELFEDVTPKTAKNFIELATGEHGFGYAGSPFHRVIPQFMLQGGDFTRGDGTGGKSIYGEKFADENFQLKHTGPYLLSMANAGPNSNGSQFFITTVPTPWLDGKHVVFGKVVEGTELVDRIEGYGSSPSGRTSAKITVRESGKL

SEQ ID NO: 1148 - DNA, 525 bp, Vitis vinifera
  CDS (1)..(525)
atgtcaaatccaaaagttttcttcgacatacttgttggaaagatgaaagcaggccgaattgtaatggaactctttgctgatgttaccccaaaaactgctgaaaatttccgtgccttatgtacaggagagaaagggattggaatgtccgggaagccactgcactacaagggctcagcatttcaccgcattatcccaaacttcatgtgtcaaggtggagatttcaccaggggcaatgggactggaggagaatcgatccacggaatgaaatttgcagatgagaactttacgatgaaacacacaggacctggtgttttgtccatggcaaatgctggaccaaacaccaacggttctcagttctttatatgcaccacaaaaactccatggcttgatgggaagcatgtcgtgtttgggaaagttgtagatggctatagtgtggttaaggagatggagaaggtgggtacagatagcgggacaactttggaaaaggttgtaatcgaggattgtggacagatagttgagaattga

SEQ ID NO: 1149 - protein, 174 aa, Vitis vinifera
MSNPKVFFDILVGKMKAGRIVMELFADVTPKTAENFRALCTGEKGIGMSGKPLHYKGSAFHRIIPNFMCQGGDFTRGNGTGGESIHGMKFADENFTMKHTGPGVLSMANAGPNTNGSQFFICTTKTPWLDGKHVVFGKVVDGYSVVKEMEKVGTDSGTTLEKVVIEDCGQIVEN

SEQ ID NO: 1150 - DNA, 516 bp, Pinus taeda
  CDS (1)..(516)
atgccgaaccctaaggtttactttgacatgtccgtggggggcgcgcccgccggaagaatcgtgatggagctttttgctgacgttacgcctaagacggcagagaacttccgagcactctgcaccggtgagattggcgtcgggaaatccgggaagcctctgcactacaagggatccgcgttccaccgtgtgatccctggctttatgtgccagggaggggatttcaccgccggaaacggcactggcggtgagtccatttacggtaacaagttccccgacgagaatttcgtgaagaagcacaccgggccgggaatcctgtcgatggcaaacgccgggaagaataccaatggatcgcagttctttatctgtactgcaaagacagagtggttggacgggaaacatgtggtgttcggtcaggtggtggagggccttgatgttgtcaaggccatcgagggtgtggggtcctccagtggtaggacttccaagcccgtagttattgctgattgcggtcagctctga

SEQ ID NO: 1151 - protein, 171 aa, Pinus taeda
MPNPKVYFDMSVGGAPAGRIVMELFADVTPKTAENFRALCTGEIGVGKSGKPLHYKGSAFHRVIPGFMCQGGDFTAGNGTGGESIYGNKFPDENFVKKHTGPGILSMANAGKNTNGSQFFICTAKTEWLDGKHVVFGQVVEGLDVVKAIEGVGSSSGRTSKPVVIADCGQL

SEQ ID NO: 1152 - DNA, 519 bp, Panax ginseng
  CDS (1)..(519)
atggcaaatcataaggttttcttcgatatggccatcggcggtacaccggccggtcgcatcgttatggagctctacgccgacaccactcccaagacggccgagaacttccgtgcactccgcaccggcgagaagggaatcggcaaggccggcaagcccttacactccaagggatcgagtttccaccgtgtgatccccccattcatgtgccagggaggtgatttcaccgccgggaacggcaccggtggcgagtcgatttacggcgcgaagttcgcggacgagaatttcatcaagaagcataccggaccggggattttgtcgatggcgaatgccgggcccggaaccaatggatcgcagttcttcatatgtactgcaaagacggagtggctgaacgggaagcacgtggtgtttggtcaagttatagagggattggatgtggtgaaggccattgagaaagtgggatccagttctggaaggacctccaagcctgtgaccgttactgattgtggccagctctcttag

SEQ ID NO: 1153 - protein, 172 aa, Panax ginseng
MANHKVFFDMAIGGTPAGRIVMELYADTTPKTAENFRALRTGEKGIGKAGKPLHSKGSSFHRVIPPFMCQGGDFTAGNGTGGESIYGAKFADENFIKKHTGPGILSMANAGPGTNGSQFFICTAKTEWLNGKHVVFGQVIEGLDVVKAIEKVGSSSGRTSKPVTVTDCGQLS

SEQ ID NO: 1154 - DNA, 1155 bp, Saccharomyces cerevisiae (strain YJM789)
  CDS (1)..(1155)
atgactagacctaaaactttttttgatatttctattggaggtaaaccccaaggccgtatagtttttgagttgtacaatgacatagtgcctaaaacggctgaaaattttttgaagttgtgtgaaggaaatgctggtatggcaaagactaaacctgatgtaccattgtcgtacaagggttccattttccacagagtgatcaaagacttcatgtgtcaatttggtgattttaccaattttaatggtactggcggtgagagcatatacggtgaaaaattcgaggatgaaaatttcactgttaaacatgataagccattccttctatccatggccaacgccggtccaaataccaatggatctcaagctttcataacctgtgttcctacacctcatttggacgggaagcacgttgtgtttggtgaagtgattcaaggtaaaagaattgttcgtttgattgaaaaccaacaatgtgaccaagaaaacaacaagccattgcgtgatgtaaagattgatgactgtggcgtgttacctgacgattatcaagtgccagagaatgccgaagctacaccaacagatgagtacggcgataattatgaagatgttttaaaacaagacgaaaaagttgacttgaagaatttcgacaccgtcttgaaagctatcgaaacggtaaagaacattggtactgaacagttcaagaaacagaactattccgtggctttagaaaaatatgtcaaatgtgataaattcttgaaagagtatttcccagaagatttggagaaggaacaaattgaaaaaatcaatcaattgaaagtgtctattccattgaatattgccatctgtgctcttaaattaaaagattacaagcaagtattagtagcctcatcggaggtgttatatgccgaagcggctgacgaaaaagctaaggccaaagctttgtaccgtcgtggcctggcctattaccatgttaatgacacagatatggctctcaatgacctagaaatggccactactttccagccaaatgacgctgccattttgaaagctattcatgatactaaattaaaaagaaagcaacaaaacgaaaagctaaaaagtctctttcgaagatgttctcctgattacttgcattatatatatgcttatatgtttaagtactaa

SEQ ID NO: 1155 - protein, 384 aa, Saccharomyces cerevisiae (strain YJM789)
MTRPKTFFDISIGGKPQGRIVFELYNDIVPKTAENFLKLCEGNAGMAKTKPDVPLSYKGSIFHRVIKDFMCQFGDFTNFNGTGGESIYGEKFEDENFTVKHDKPFLLSMANAGPNTNGSQAFITCVPTPHLDGKHVVFGEVIQGKRIVRLIENQQCDQENNKPLRDVKIDDCGVLPDDYQVPENAEATPTDEYGDNYEDVLKQDEKVDLKNFDTVLKAIETVKNIGTEQFKKQNYSVALEKYVKCDKFLKEYFPEDLEKEQIEKINQLKVSIPLNIAICALKLKDYKQVLVASSEVLYAEAADEKAKAKALYRRGLAYYHVNDTDMALNDLEMATTFQPNDAAILKAIHDTKLKRKQQNEKLKSLFRRCSPDYLHYIYAYMFKY

SEQ ID NO: 1156 - DNA, 516 bp, Triticum aestivum
  CDS (1)..(516)
atggcgaacccgaaggtgttcttcgacatgacggtcggcggcgcgccggcggggcgcatcgtgatggagctgtacaaggacgcggtgccgaggacggtggagaacttccgcgcgctgtgcacgggcgagaagggcgtgggcaagagcggcaagccgctgcactacaaggggagcgcgttccaccgcgtgatccccgacttcatgtgccagggcggcgacttcaccaggggcaacgggacgggcggcgagtccatctacggcgagaagttcgccgacgagaagttcgtccacaagcacaccaagcccgggatcctctccatggccaacgccgggcccaacaccaacggctcccagttcttcatctgcaccgtcccctgcaattggctcgacggcaagcacgtcgtcttcggcgaggtcgtcgagggcatggacgtcgtcaagaacatcgagaaggtgggctcccgcagcggcaccaccgccaagcaggtcgtcatcgccgactgcggccagctctag

SEQ ID NO: 1157 - protein, 171 aa, Triticum aestivum
MANPKVFFDMTVGGAPAGRIVMELYKDAVPRTVENFRALCTGEKGVGKSGKPLHYKGSAFHRVIPDFMCQGGDFTRGNGTGGESIYGEKFADEKFVHKHTKPGILSMANAGPNTNGSQFFICTVPCNWLDGKHVVFGEVVEGMDVVKNIEKVGSRSGTTAKQVVIADCGQL

SEQ ID NO: 1158 - DNA, 516 bp, Dasypyrum villosum
  CDS (1)..(516)
atggccaacccgagggtgttcttcgacatgaccgtcggcggcgcgccggccgggcgcatcgtgatggagctgtacaaggacgcggtgccgaggacggtggagaacttccgcgcgctgtgcacgggcgagaagggcgtgggcaagagcggcaagccgctgcactacaaggggagcgcgttccaccgcgtgatccccgactttatgtgccagggcggcgacttcaccaggggcaacgggacgggcggcgagtccatctacggcgagaagttcgccgacgagaagttcgtctacaagcacaccaagcccgggatcctctccatggccaacgccgggcccaacaccaacggctcccagttcttcatctgcaccgtcccctgcaattggctcgacggcaagcacgtcgtcttcggcgaggtcgtcgagggcatggacgtcgtcaagaacatcgagaaggtgggctcccgcagcggcaccaccgccaagcaggtcgtcatcgtcgactgcggccagctctag

SEQ ID NO: 1159 - protein, 171 aa, Dasypyrum villosum
MANPRVFFDMTVGGAPAGRIVMELYKDAVPRTVENFRALCTGEKGVGKSGKPLHYKGSAFHRVIPDFMCQGGDFTRGNGTGGESIYGEKFADEKFVYKHTKPGILSMANAGPNTNGSQFFICTVPCNWLDGKHVVFGEVVEGMDVVKNIEKVGSRSGTTAKQVVIVDCGQL

SEQ ID NO: 1160 - DNA, 516 bp, Dasypyrum villosum
  CDS (1)..(516)
atggccaacccgagggtgttcttcgacatgaccgtcggcggcgcgccggccgggcgcatcgtgatggagctgtacaaggacgcggtgccgaggacggtggagaacttccgcgcgctgtgcgcgggcgagaagggcgtgggcaagagcggcaagccgctgcactacaaggggagcgcgttccaccgcgtgatccccgactttatgtgccagggcggcgacttcaccaggggcaacgggacgggcggcgagtccatctacggcgagaagttcgccgacgagaagttcgtccagaagcacaccaagcccgggatcctctccatggccaacgccgggcccaacaccaacggctcccagttcttcatctgcaccgtcccctgcaattggctcgacggcaagcacgtcgtcttcggcgaggtcgtcgagggcatggacgtcgtcaagaacatcgagaaggtgggctcccgcagcggcaccaccgccaagcaggtcgtcatcgccgactgcggccagctctag

SEQ ID NO: 1161 - protein, 171 aa, Dasypyrum villosum
MANPRVFFDMTVGGAPAGRIVMELYKDAVPRTVENFRALCAGEKGVGKSGKPLHYKGSAFHRVIPDFMCQGGDFTRGNGTGGESIYGEKFADEKFVQKHTKPGILSMANAGPNTNGSQFFICTVPCNWLDGKHVVFGEVVEGMDVVKNIEKVGSRSGTTAKQVVIADCGQL

SEQ ID NO: 1162 - DNA, 516 bp, Dasypyrum villosum
  CDS (1)..(516)
atggcgaacccgagggtgttcttcgacatgacggtgggcggcgcgccggcggggcgcatcgtgatggagctgtacaaggacgcggtgccgaggacggtggagaacttccgcgcgctgtgcacgggcgagaagggcgtgggcaagagcggcaagccgctgcactacaaggggagcgcgttccaccgcgtgatccccgacttcatgtgccagggcggcgacttcaccaggggcaacgggacgggcggcgagtccatctacggcgagaagttcgccgacgagaagttcgtccacaagcacaccaagcccgggatcctctccatggccaacgccgggcccaacaccaacggctcccagttcttcatctgcaccgtcccctgcaattggctcgacggcaagcacgtcgtcttcggcgaggtcgtcgagggcatggacgtcgtcaagaacatcgagaaggtgggctcccgcagcggcaccaccgccaagcaggtcgtcatcgccgactgcggccagctctag

SEQ ID NO: 1163 - protein, 171 aa, Dasypyrum villosum
MANPRVFFDMTVGGAPAGRIVMELYKDAVPRTVENFRALCTGEKGVGKSGKPLHYKGSAFHRVIPDFMCQGGDFTRGNGTGGESIYGEKFADEKFVHKHTKPGILSMANAGPNTNGSQFFICTVPCNWLDGKHVVFGEVVEGMDVVKNIEKVGSRSGTTAKQVVIADCGQL

SEQ ID NO: 1164 - DNA, 516 bp, Dasypyrum villosum
  CDS (1)..(516)
atggccaacccgagggtgttcttcgacatgaccgtcggcggcgcgccggccgggcgcatcgtgatggaactgtacaaggacgcggtgccgcggacggtggagaacttccgcgcgctgtgcaccggcgagaagggcgtcggcaagagcggcaagccgctgcactacaagggcagcgccttccaccgcgtgatccccgacttcatgtgccagggtggcgacttcacccggggcaacggcaccggcggcgagtccatctacggcgagaagttcgccgacgagaagttcgtccacaagcacaccaagcccgggatcctctccatggccaacgcggggcccaacaccaacggctcccagttcttcatctgcaccgtcccctgcaattggctcgacggcaagcacgtggtcttcggcgaggtcgtcgagggcatggacgtcgtcaagaacatcgagaaggtgggctcccgcagcggcacctgctccaagcaggtggtcatcgccgactgcggccagctctag

SEQ ID NO: 1165 - protein, 171 aa, Dasypyrum villosum
MANPRVFFDMTVGGAPAGRIVMELYKDAVPRTVENFRALCTGEKGVGKSGKPLHYKGSAFHRVIPDFMCQGGDFTRGNGTGGESIYGEKFADEKFVHKHTKPGILSMANAGPNTNGSQFFICTVPCNWLDGKHVVFGEVVEGMDVVKNIEKVGSRSGTCSKQVVIADCGQL

SEQ ID NO: 1166 - DNA, 498 bp, Phlebotomus papatasi
  CDS (1)..(498)
atgggattaccgcgtgtttacttcgacatgtccgccgatcatgccccaattgggcgcattgtgatggaattgcgttcggacgttgtaccgaagacggctgaaaacttccgtgctctgtgcactggtgagaagggattcggctacaagggatccaccttccatcgtgtcattcccaatttcatgtgccaaggtggtgatttcaccaatcacaatggcactggtggaaaatccatctatggttccaagtttgaagatgagaattttatgctgaagcatttgggacctggtactctgtctatggccaatgctgggccaaataccaatggttcccaattcttcatcaccacggtgaagacatcctggctggacaatcgccatgtggtgttcggtacggtggtggagggtatggaagtggtgaagaagattgagggcttcggcagccaatctggcaagacatccaaacaaatcgttgtggctgactctggacaattgtcataa

SEQ ID NO: 1167 - protein, 165 aa, Phlebotomus papatasi
MGLPRVYFDMSADHAPIGRIVMELRSDVVPKTAENFRALCTGEKGFGYKGSTFHRVIPNFMCQGGDFTNHNGTGGKSIYGSKFEDENFMLKHLGPGTLSMANAGPNTNGSQFFITTVKTSWLDNRHVVFGTVVEGMEVVKKIEGFGSQSGKTSKQIVVADSGQLS

SEQ ID NO: 1168 - DNA, 600 bp, Phlebotomus papatasi
  CDS (1)..(600)
atgaagtgcattttactcatttccctggcctttttgggctttgtggctgctgaaaggggtcccaccgtcactgataaggtgtactttgatatgactatcgatggacaaccggccggacgcattgtaattgggctgtttggaggcactgtgccaaaaacagtgcgaaatttcaaggaattggccgagaagcccgaaggcgaaggatacaagggcagcaaattccaccgtgtgatccgtgattttatgatccagggaggtgactttacgcggggcgatggaactggaggtcgttcaatttacggtgaacgttttgaggatgagaacttcaagctgaagcactatggtgctggatggttgagtatggctaatgctggaaaggacaccaatggttctcaattctttatcacggtgaagaaaactccctggctcgatggccgtcatgttgtatttggtaaggttattgaggggatggatgtggtgaggaagattgaggataccaagactgatggacgcgacaagcctgtcaaggatgtcgtaattgccgattgtggatcaattcctgttgaggaacaatttgctgttgaaaaggatgatgcataa

SEQ ID NO: 1169 - protein, 199 aa, Phlebotomus papatasi
MKCILLISLAFLGFVAAERGPTVTDKVYFDMTIDGQPAGRIVIGLFGGTVPKTVRNFKELAEKPEGEGYKGSKFHRVIRDFMIQGGDFTRGDGTGGRSIYGERFEDENFKLKHYGAGWLSMANAGKDTNGSQFFITVKKTPWLDGRHVVFGKVIEGMDVVRKIEDTKTDGRDKPVKDVVIADCGSIPVEEQFAVEKDDA

SEQ ID NO: 1170 - DNA, 519 bp, Gerbera hybrida
  CDS (1)..(519)
atggcaaaccctaaggttttcttcgacatgaccgtcggcggggcaccggccggcaggatcgtcatggagctctacgccgatacaactccaaggaccgctgagaacttccgtgcactctgcacaggcgagaagggaaaaggatcctccggcaagccgttgcacttcaaaggatccagcttccaccgtgtgatccctaactttatgtgccagggcggcgacttcaccagaggaaacggcaccggcggcgagtcgatctacggcaacaagttcgccgacgaaaacttcatcaagaagcacaccggtcctggtattctctccatggccaacgccggtccgaacacgaacggatcgcagtttttcatctgcaccgctaaaaccgagtggctcgatggcaagcacgtcgtgttcgggaaagttattgacggaatggatgtcgtgaaggcgatcgaaaaggttggatctggaagcggaaccacgtcgaagcccgttgtcattgccgattgcggtcaactctcttag

SEQ ID NO: 1171 - protein, 172 aa, Gerbera hybrida
MANPKVFFDMTVGGAPAGRIVMELYADTTPRTAENFRALCTGEKGKGSSGKPLHFKGSSFHRVIPNFMCQGGDFTRGNGTGGESIYGNKFADENFIKKHTGPGILSMANAGPNTNGSQFFICTAKTEWLDGKHVVFGKVIDGMDVVKAIEKVGSGSGTTSKPVVIADCGQLS

SEQ ID NO: 1172 - DNA, 495 bp, Penaeus monodon
  CDS (1)..(495)
atgggcaaccccaaagtctttttcgacattaccgctgacaaccagcccgttggcaggatcgtcatggagctccgcgccgacgtggtccccaagaccgccgagaacttccggtcgctgtgcacgggcgagaagggcttcggctacaagggttcctgcttccaccgcgtgatccccaacttcatgtgtcagggaggcgacttcaccgccggcaacggcacgggcggcaagtccatctacggcaacaaattcgaggacgagaacttcgcactgaagcacaccggccccggcaccctgtccatggccaacgccggccccaacaccaacgggtcgcaattcttcatctgcaccgtcaaaaccccctggctggacaacaagcacgtggttttcggctccgtggtggagggcatggacatcgtgcgccaggtcgagggtttcggcacccccaacggctcttgcaagcggaaagtgatgatcgccaactgcggccagctgtaa

SEQ ID NO: 1173 - protein, 164 aa, Penaeus monodon
MGNPKVFFDITADNQPVGRIVMELRADVVPKTAENFRSLCTGEKGFGYKGSCFHRVIPNFMCQGGDFTAGNGTGGKSIYGNKFEDENFALKHTGPGTLSMANAGPNTNGSQFFICTVKTPWLDNKHVVFGSVVEGMDIVRQVEGFGTPNGSCKRKVMIANCGQL

SEQ ID NO: 1174 - DNA, 495 bp, Aequipecten irradians
  CDS (1)..(495)
atggcaaatccaagggtttacttcgatgtgactgccggcggtgcggcgataggaagaattactatggagttgcgtgctgatgttgtgccaagaacagcagaaaacttcagagccctttgcactggagagaagggatttggttataaaggatctaccttccatcgagtcattactgatttcatgtgtcagggtggagatttcaccagacataacggaactggtggtaagagcatctacggagagaagtttgctgacgaaaacttcatcctcaagcacacagggccaggtgttctgtctatggccaatgctggaccaaacacaaacggatcccagtttttcctttgcacagtcaagacttcgtggttggatggcaagcatgttgtgtttgggtctgttgtggaagggatggatgtagtgaagaatgttgaaagttatggcagccaaagtggaaaaacatcccagaaaattgtaattgctgattgtgggcaattatga

SEQ ID NO: 1175 - protein, 164 aa, Aequipecten irradians
MANPRVYFDVTAGGAAIGRITMELRADVVPRTAENFRALCTGEKGFGYKGSTFHRVITDFMCQGGDFTRHNGTGGKSIYGEKFADENFILKHTGPGVLSMANAGPNTNGSQFFLCTVKTSWLDGKHVVFGSVVEGMDVVKNVESYGSQSGKTSQKIVIADCGQL

SEQ ID NO: 1176 - DNA, 516 bp, Picea sitchensis
  CDS (1)..(516)
atgccgaaccccaaggtttactttgagatgaccgtcgggggcgcacccgtcggaagaatcgtgatggagcttttcgccgacgtgacgcctaagactgcagagaacttccgagcactgtgcaccggtgagattggcgtcgggaaatccggcaagccgctgcactacaagggatcgtcgttccaccgtgtgatccctggcttcatgtgccagggaggggattttaccgccgggaacggtaccggcggtgagtccatctacggttccaagttccccgacgagaatttcgtgaagaagcacactgggccgggaatcctgtcgatggcaaacgccgggaagaataccaacggatcccagttcttcgtctgtactgcaaaaacagagtggttggacgggaagcatgtggtcttcggtcaggtggtagagggtcttgacgttgtcaaggtcatcgagggtgtgggctcctccagtggaaggacttccaagcccgtagcgattgctgactgcggtcagctctga

SEQ ID NO: 1177 - protein, 171 aa, Picea sitchensis
MPNPKVYFEMTVGGAPVGRIVMELFADVTPKTAENFRALCTGEIGVGKSGKPLHYKGSSFHRVIPGFMCQGGDFTAGNGTGGESIYGSKFPDENFVKKHTGPGILSMANAGKNTNGSQFFVCTAKTEWLDGKHVVFGQVVEGLDVVKVIEGVGSSSGRTSKPVAIADCGQL

SEQ ID NO: 1178 - DNA, 570 bp, Picea sitchensis
  CDS (1)..(570)
atggcaagtggagcagcagcaggggtggtagaatggcaccagaagcctccaaacccaaagaatcccgtcgtcttcttcgatgtaacgataggcaccattccagcgggacgaattaagatggagcttttcgccgatattgttcccaggacagctgaaaactttcggcagttctgcacaggggaatacaggaaagcgggcattcctattggctataaaggctgccattttcacagggttattaaggatttcatgattcaagctggtgattttgtcaagggagatggcagtggatgcatttctatctatggtagcaagtttgaagatgaaaacttcatagctaaacatacaggtcctggcctcctctctctggcaaatagcgggcctaatactaatggatcccagttctttttaacttgtgcaaaatgtgattggctggacaataagcatgtggtttttgggagagtgctaggagaaggactcttggttgtgaggaaaatcgaaaatgtccaaactgggcccaataatcgacccaagctaccttgtgttattgctgagtgtggtgaaatgtaa

SEQ ID NO: 1179 - protein, 189 aa, Picea sitchensis
MASGAAAGVVEWHQKPPNPKNPVVFFDVTIGTIPAGRIKMELFADIVPRTAENFRQFCTGEYRKAGIPIGYKGCHFHRVIKDFMIQAGDFVKGDGSGCISIYGSKFEDENFIAKHTGPGLLSLANSGPNTNGSQFFLTCAKCDWLDNKHVVFGRVLGEGLLVVRKIENVQTGPNNRPKLPCVIAECGEM

SEQ ID NO: 1180 - DNA, 516 bp, Picea sitchensis
  CDS (1)..(516)
atgccgaaccccaaggtttactttgagatgaccgtcgggggcgcacccgtcggaagaatcgtgatggagcttttcgccgacgtgaggcctaagactgcagagaacttccgagcactgtgcaccggtgagattggcgtcgggaaatccggcaagccgctgcactacaagggatcgtcgttccaccgtgtgatccctggcttcatgtgccagggaggggattttaccgccgggaacggtaccggcggtgagtccatctacggttccaagttccccgacgagaatttcgtgaagaagcacactgggccgggaatcctgtcgatggcaaacgccgggaagaataccaacggatcccagttcttcgtctgtactgcaaaaacagagtggttggacgggaagcatgtggtcttcggtcaggtggtagagggtcttgacgttgtcaaggtcatcgagggtgtgggctcctccagtggaaggacttccaagcccgtagcgattgctgactgcggtcagctctga

SEQ ID NO: 1181 - protein, 171 aa, Picea sitchensis
MPNPKVYFEMTVGGAPVGRIVMELFADVRPKTAENFRALCTGEIGVGKSGKPLHYKGSSFHRVIPGFMCQGGDFTAGNGTGGESIYGSKFPDENFVKKHTGPGILSMANAGKNTNGSQFFVCTAKTEWLDGKHVVFGQVVEGLDVVKVIEGVGSSSGRTSKPVAIADCGQL

SEQ ID NO: 1182 - DNA, 519 bp, Populus jackii
  CDS (1)..(519)
atgtcaaatcctaaggtattctttgacatgaccgtcggcggccaacctgctggtcggatcgtcatggagctgttcgccgatattgttccaaggacagccgagaatttccgtgctctttgcaccggtgagaaaggtgttggcaagtccggcaagccacttcacttcaaaggttcaagctttcaccgtgtgatccctaacttcatgtgccaaggtggtgacttcaccgccggaaacggcaccggcggtgaatcaatctatggggctaagtttgccgatgagaacttcgtgaagaagcacactggacctggtgtgctttccatggctaatgccggtcctgggacgaatggatctcagttctttatctgcactgttaagaccgagtggcttgacgggaaacatgtcgttttcggccaggttgttgaagggatggacgtggtgaaagcaatcgagaaggttggatctggaaatggcaggacttcgaagcctgttgttgttgctgactgtggtcaactctcttag

SEQ ID NO: 1183 - protein, 172 aa, Populus jackii
MSNPKVFFDMTVGGQPAGRIVMELFADIVPRTAENFRALCTGEKGVGKSGKPLHFKGSSFHRVIPNFMCQGGDFTAGNGTGGESIYGAKFADENFVKKHTGPGVLSMANAGPGTNGSQFFICTVKTEWLDGKHVVFGQVVEGMDVVKAIEKVGSGNGRTSKPVVVADCGQLS

SEQ ID NO: 1184 - DNA, 519 bp, Populus jackii
  CDS (1)..(519)
atggcaaaccctagagtctacttcgacatgacaatcggcggccaaccagccggccggatcgtgatggaactgttcgccgacacaactccacgaaccgcagagaacttcagggctctttgcactggagagaagggaaaaggccgaagcggcaagcctttacactacaaaggctcgactttccatcgagtcatccctggattcatgtgccaaggaggagatttcactgcagggaatggaaccggaggggaatcgatctacggatcgaaatttgctgacgagaattttataaagaaacatactgggccggggattttgtccatggccaatgccgggcctgggactaacgggtcgcagttctttgtctgtacagccaagactgaatggctcgatggaaaacacgtggtgtttggaagagtagtggagggtctggatgttgtgaaggctatagagaagtttgggtcttctaatggaaggacctctaagcctgttgttattgctgactgtggacagctttcttga

SEQ ID NO: 1185 - protein, 172 aa, Populus jackii
MANPRVYFDMTIGGQPAGRIVMELFADTTPRTAENFRALCTGEKGKGRSGKPLHYKGSTFHRVIPGFMCQGGDFTAGNGTGGESIYGSKFADENFIKKHTGPGILSMANAGPGTNGSQFFVCTAKTEWLDGKHVVFGRVVEGLDVVKAIEKFGSSNGRTSKPVVIADCGQLS

SEQ ID NO: 1186 - DNA, 1134 bp, Aspergillus fumigatus (strain CEA10 / CBS 144.89 / FGSC A1163)
  CDS (1)..(1134)
atggctgagactcaacgtcgtcctcgcgtctacttcgacatccagattggccgccagaaggctggtcgtattgcgcttgaattggtgagattaccgttcaacgatgttgttcccaagaccgcagagaactttcgcgctctctgtacaggcgagaagggtgtgggaaaacaagggaaaccattgagctacaagggatccattttccaccgtgtgatcaagcagtttatgatccagggtggtgactttaccaatttcaatggaaccggtggtgaatccatttacggcgagaaattccccgatgagaacttcgagctcaagcacgacagacctttcctcctctcaatggccaactccggtccaggcaccaatggcagccagtttttcatcaccactgtcccaacccctcacctcgatggcaagcacgtggtcttcggtgaggtgatcaacggaaagagtattgttcgcaagatcgagaacatgcctacccaagccgacaagcctaccaccgacgtgaccattgttgactgcggtgagctgtctggcgaggattacgagaacgccactaagcgggttgccgatgccactggagacccctacgaggattaccccgatgatcaccagggcgaggagctcaacgctcaggtctgcttcaagatcgcttccgagctgaagaactttggcaacactgctttcaagagcggcgacgttgcccttggtcttgacaagtaccagaagggcctgcgctacctgaacgaatttcctgatcccgatgagaacgatcccaaggacctcgagcctcagatgaaatctcttcgcttcactcttcactctaactcgtctctgctcgcgaacaagcttggtcaattcaagaatgcccagaactgggctacctacgcccttgaagtcgccgacgccgccaacgccaaggaagcagatagagccaaggcctactatcgccgcgctgttgcatacagtggccagaaggaggaagatgaggctctgaaggatctccaggaggcattgaagctggcccccggtgacgctggcattctcaacgagatcgccaaggtcaagaaggcgatcaaggacagtgaagccaaggagaaggccgccgctcggaagtttttctcgtaa

SEQ ID NO: 1187 - protein, 377 aa, Aspergillus fumigatus (strain CEA10 / CBS 144.89 / FGSC A1163)
MAETQRRPRVYFDIQIGRQKAGRIALELVRLPFNDVVPKTAENFRALCTGEKGVGKQGKPLSYKGSIFHRVIKQFMIQGGDFTNFNGTGGESIYGEKFPDENFELKHDRPFLLSMANSGPGTNGSQFFITTVPTPHLDGKHVVFGEVINGKSIVRKIENMPTQADKPTTDVTIVDCGELSGEDYENATKRVADATGDPYEDYPDDHQGEELNAQVCFKIASELKNFGNTAFKSGDVALGLDKYQKGLRYLNEFPDPDENDPKDLEPQMKSLRFTLHSNSSLLANKLGQFKNAQNWATYALEVADAANAKEADRAKAYYRRAVAYSGQKEEDEALKDLQEALKLAPGDAGILNEIAKVKKAIKDSEAKEKAAARKFFS

SEQ ID NO: 1188 - DNA, 630 bp, Aspergillus fumigatus (strain CEA10 / CBS 144.89 / FGSC A1163)
  CDS (1)..(630)
atgaattttaaaagtctgttcttgtccttcttcctggtcttcgcggttggactcgctctggtccacgccgaggagactaaggagccacgaggcccaaagatcacaagcaaggttttctttgacattgagcatggagacaaacctctaggaagaatcgtgcttggattgtacggcaagactgtccctaagacagctgagaacttccgcgctctcgctaccggtgagaagggcttcggttatgagggctctaccttccaccgtgtcatcaagagcttcatgatccagggcggtgacttcacccgtggtgacggtaccggtggaaagtcgatctacggcgagaaattcgcggatgagaacttcaagcttaggcacacccgcaaaggacttctgagcatggcaaacgctggcaaggataccaacggctctcagttcttcattaccaccgttcctactccttggctcgatggtcgccatgttgtttttggtgaggttcttgagggctacgaggtcgtcgaacagatcgaaaatgttcccaagggtcctggcgacaagcctgcggagacagtcaagatcgtcaaaagtggagagatcaaagacgaatccaccaaaggtagccacgaggagctgtag

SEQ ID NO: 1189 - protein, 209 aa, Aspergillus fumigatus (strain CEA10 / CBS 144.89 / FGSC A1163)
MNFKSLFLSFFLVFAVGLALVHAEETKEPRGPKITSKVFFDIEHGDKPLGRIVLGLYGKTVPKTAENFRALATGEKGFGYEGSTFHRVIKSFMIQGGDFTRGDGTGGKSIYGEKFADENFKLRHTRKGLLSMANAGKDTNGSQFFITTVPTPWLDGRHVVFGEVLEGYEVVEQIENVPKGPGDKPAETVKIVKSGEIKDESTKGSHEEL

SEQ ID NO: 1190 - DNA, 519 bp, Capsicum annuum
  CDS (1)..(519)
atggcaaatccaaaggttttctttgacctcaccatcggcggccaaccggccggacgcgtcgtgatggagctgttcgccaacgatgttcctaagacggcggaaaacttccgcgcactctgcaccggcgagaagggcgtcggaaggatgggtaagcctttgcactacaaaggctccaccttccaccgtgtgatcccagggttcatgtgtcaaggaggtgatttcaccgccggaaacggtactggaggagaatcgatttacggcgctaagtttgctgatgaaaactttaagaggaagcacaccggacctggagttctatccatggctaatgctggacctggaaccaacggttcacaattcttcatctgcactgctaagactgaatggcttgatggaaagcacgttgtttttggtcaggttgttgaaggatttgatgtgattaagaaggctgaagctgttggatccagctctggaaggtgctctaagcctgttgtgattgctgactgtggtcaactctgctag

SEQ ID NO: 1191 - protein, 172 aa, Capsicum annuum
MANPKVFFDLTIGGQPAGRVVMELFANDVPKTAENFRALCTGEKGVGRMGKPLHYKGSTFHRVIPGFMCQGGDFTAGNGTGGESIYGAKFADENFKRKHTGPGVLSMANAGPGTNGSQFFICTAKTEWLDGKHVVFGQVVEGFDVIKKAEAVGSSSGRCSKPVVIADCGQLC

SEQ ID NO: 1192 - DNA, 621 bp, Penicillium marneffei
  CDS (1)..(621)
atgcagtttaaaagtcttctattttctttccttttggccctgaccttcgggtttgtcctccttacccaggctgaggacactccccgcggacctaagattactaacaaggtctacttcgacattgagcaggatggccaatctcttggccgaattgtctttggtttgtacggaaagactgttcctttgaccgctgagaacttccgtgctcttgctaccggagagaagggtttcggatatgagggctcaagcttccaccgtgttattaagaactttatgatccagggtggtgactttaccaaccacgatggaactggtggcaagtctatctatggcaacaagttcgccgatgagaacttcaagctccgtcacaccaagaaaggtcttctcagcatggccaacgctggaaaggacaccaacggatcccaattcttcatcaccactgttatcacaagctggcttgatggccgtcacgtcgtcttcggtgaagtcctcgagggctacgatgtcgtggagaagattgagaacacccctaccaagccgggtgaccgacctctttccgcggtcacgatcgttaggagcggcgagcttttgatggatgaaggtagccactcggagctttaa

SEQ ID NO: 1193 - protein, 206 aa, Penicillium marneffei
MQFKSLLFSFLLALTFGFVLLTQAEDTPRGPKITNKVYFDIEQDGQSLGRIVFGLYGKTVPLTAENFRALATGEKGFGYEGSSFHRVIKNFMIQGGDFTNHDGTGGKSIYGNKFADENFKLRHTKKGLLSMANAGKDTNGSQFFITTVITSWLDGRHVVFGEVLEGYDVVEKIENTPTKPGDRPLSAVTIVRSGELLMDEGSHSEL

SEQ ID NO: 1194 - DNA, 618 bp, Bombyx mori
  CDS (1)..(618)
atgggtacccttacaatggctttaggaattttgttgttcatcgctagtgccaaatctgatgaaattcccaaaggacctaaagttactcataaggtgagctttgacatgaagattggtgatgacaatattggtactattgtgattggattatttggaaagactgtacctaagacaactgagaacttctttcaactagctcagaaacctgagggggaggggtacaaagggagcaagttccacagagtaattaaaaatttcatgatccaaggtggtgattttaccaagggtgatggaactggagggcgcagtatatatggtgaacgttttgaagatgaaaacttcaagccgaagcactatggtgctggttggttatctatggctaatgcaggcaaagacacaaatggatctcaatttttcatcacaactgttaagacaccctggttagatggcagacatgttgttttcggtaaagttttagaaggaatggatgttgtacagaaaattgagacgactgttacgggtgcgaatgatcgcccagtcaaagatgttgttatatctgacacgaaaactgaagttgtagctgaacctttcagtgtcacaaaagagagtgctcactaa

SEQ ID NO: 1195 - protein, 205 aa, Bombyx mori
MGTLTMALGILLFIASAKSDEIPKGPKVTHKVSFDMKIGDDNIGTIVIGLFGKTVPKTTENFFQLAQKPEGEGYKGSKFHRVIKNFMIQGGDFTKGDGTGGRSIYGERFEDENFKPKHYGAGWLSMANAGKDTNGSQFFITTVKTPWLDGRHVVFGKVLEGMDVVQKIETTVTGANDRPVKDVVISDTKTEVVAEPFSVTKESAH

SEQ ID NO: 1196 - DNA, 1125 bp, Setosphaeria turcica
  CDS (1)..(1125)
atggctgactctaagcgcccacgcgtcttctttgacattgccattggcggtgcaaaggccggtcgtgttgcctttgagctttacagtgatatcgttcccaagaccgccgagaacttccgcgcgctatgtaccggcgagaaaggagaaggtgcatctggcaaacccctccactacaagaactcgagcttccaccgcgtcatcaagggtttcatgatccagggcggtgactttacccagggcaacggtactggcggcgagagtatatatggcgagaagtttgaggacgaaaactttgagaagatccacgacaggccgttcctgctgagtatggccaacgccggcccaggaacgaacggctctcagttcttcgtgactacagtccctacaccacatcttgacaacaagcacgtcgtatttggcgaggtcatcaacggcaagagcattgtgcgtacaatcgagaacctcaagacagaaagcggtgacaagccactgcaagatgcaaccattatcgactgtggcgagctcaccggggaagattatgacaaggccaccgagaaggtctctgatgcaactggcgacccatacgaagacttcccagaggaccaaaaggctggcggtgaggaatggaaaggtaccgagatcctcgaaatcgcgaccaagctgaaggaaatgggcaacgacgcattcaaaaagggaaatctcgagcttggcatccagaaataccaaaaaggcatccgctacttgcacgaataccctacaccactagaaaatgaccccaaggacctgtggccccagctcaacgccctcaagatctcgctctactccaacagcgccctgcttcagaacaagacacatcagtacagcgacgcgatagagaacgcaaccaaagcactggagattgagggcatcacggaaaaggaaaaggccaaggcgtactttaggcgcgcacaggccaagattgcgaagaagaacgaggaagaagcgttggctgatcttaaggaggcggcaaagtatgcgccaggtgatgcggcaatcatcaaggaacaggatgcgatcaagaagaaggtgcaggcgcgaaaggagaaggagaagcaggtgtacaagaatgctttcaactttgagtag

SEQ ID NO: 1197 - protein, 374 aa, Setosphaeria turcica
MADSKRPRVFFDIAIGGAKAGRVAFELYSDIVPKTAENFRALCTGEKGEGASGKPLHYKNSSFHRVIKGFMIQGGDFTQGNGTGGESIYGEKFEDENFEKIHDRPFLLSMANAGPGTNGSQFFVTTVPTPHLDNKHVVFGEVINGKSIVRTIENLKTESGDKPLQDATIIDCGELTGEDYDKATEKVSDATGDPYEDFPEDQKAGGEEWKGTEILEIATKLKEMGNDAFKKGNLELGIQKYQKGIRYLHEYPTPLENDPKDLWPQLNALKISLYSNSALLQNKTHQYSDAIENATKALEIEGITEKEKAKAYFRRAQAKIAKKNEEEALADLKEAAKYAPGDAAIIKEQDAIKKKVQARKEKEKQVYKNAFNFE

SEQ ID NO: 1198 - DNA, 525 bp, Setosphaeria turcica
  CDS (1)..(525)
atggctgactctaagcgcccacgcgtcttctttgacattgccattggcggtgcaaaggccggtcgtgttgcctttgagctttacagtgatatcgttcccaagaccgccgagaacttccgcgcgctatgtaccggcgagaaaggagaaggtgcatctggcaaacccctccactacaagaactcgagcttccaccgcgtcatcaagggtttcatgatccagggcggtgactttacccagggcaacggtactggcggcgagagtatatatggcgagaagtttgaggacgaaaactttgagaagatccacgacaggccgttcctgctgagtatggccaacgccggcccaggaacgaacggctctcagttcttcatctgcactgtcaagacgtcatggctggacggcaagcacgtcgttttcggccaggttgtcgagggcatggacgttgtccaggctgttgagaggcaaggctctggctcgggcaagacgaatgcccccattaccattgcgaacagcggtcagctgtaa

SEQ ID NO: 1199 - protein, 174 aa, Setosphaeria turcica
MADSKRPRVFFDIAIGGAKAGRVAFELYSDIVPKTAENFRALCTGEKGEGASGKPLHYKNSSFHRVIKGFMIQGGDFTQGNGTGGESIYGEKFEDENFEKIHDRPFLLSMANAGPGTNGSQFFICTVKTSWLDGKHVVFGQVVEGMDVVQAVERQGSGSGKTNAPITIANSGQL

SEQ ID NO: 1200 - DNA, 567 bp, Haemaphysalis longicornis
  CDS (1)..(567)
atggtcctgcccaaggtgtatttcgatgtcaccgccgacggatcaccactcggacggatagtaattgagctgcgatcggatgtggcccccaagaccgctgaaaacttccgcgccctttgcaccggcgagaagggcttcggctacagcggcagcactttccatcgcgtcatccccaacttcatgtgccagggaggagacttcacgaagcacaacggcactggcggcaagtccatctatggcgagaagttcgaggatgagaacttcatcctgaagcacacgggacccggtattctatccatggccaatgctggtcccaacaccaacgggtcgcaatttttccttaccactgtcaagactccttggctcgacggtaagcacgtagtgtttggtgctgtggtcgagggcatggatgtggtgaagaagatggagagctacggcagccagagtggcaagaccaccaaggaagctggtggtgcagtcctcaggccagctgtcctaagagacattgggcagtgcattccctgcttcaacaacactgcagcgctctctccttatcctttacattga

SEQ ID NO: 1201 - protein, 188 aa, Haemaphysalis longicornis
MVLPKVYFDVTADGSPLGRIVIELRSDVAPKTAENFRALCTGEKGFGYSGSTFHRVIPNFMCQGGDFTKHNGTGGKSIYGEKFEDENFILKHTGPGILSMANAGPNTNGSQFFLTTVKTPWLDGKHVVFGAVVEGMDVVKKMESYGSQSGKTTKEAGGAVLRPAVLRDIGQCIPCFNNTAALSPYPLH

SEQ ID NO: 1202 - DNA, 651 bp, Haemaphysalis longicornis
  CDS (1)..(651)
atgaacattattatcggaacactgggccttctggctctcgtcacggtagtgtggtcggcggaggagaaaaaagcggttaaaggtcccaaagttacagacaaggtctacttcgacattacaataggaggcgaacccgcgggccggattgaaatcggcctattcggcaagactgtgccaaaaactgttaaaaactttatggagctatgccagaagcatttaaccgagaaatcttctgatggcagcctggttggctacaagggcagcaagttccatcgagtgatttcagactttatgatccaagggggcgacttcacaaagggagacggcactggaggtcgcagcatctacggagagcgctttgctgacgagaacttcaagctgaagcactatggcgctggctggctgtcgatggctaacgctggaaaggacacaaacgggtcgcagttcttcatcacctgcaagaagactacctggctggatgggaagcacgtcgtgtttggcagggtcctctcaggaatggatgtggtgcgcagggtggagaagctgtccacggacagccgggataggcccacccaggagggggtgatctcggactccggggtgctgactgtggaaacaccgttccccacagccccgtgccgatgcaactga

SEQ ID NO: 1203 - protein, 216 aa, Haemaphysalis longicornis
MNIIIGTLGLLALVTVVWSAEEKKAVKGPKVTDKVYFDITIGGEPAGRIEIGLFGKTVPKTVKNFMELCQKHLTEKSSDGSLVGYKGSKFHRVISDFMIQGGDFTKGDGTGGRSIYGERFADENFKLKHYGAGWLSMANAGKDTNGSQFFITCKKTTWLDGKHVVFGRVLSGMDVVRRVEKLSTDSRDRPTQEGVISDSGVLTVETPFPTAPCRCN

SEQ ID NO: 1204 - DNA, 519 bp, Hevea brasiliensis
  CDS (1)..(519)
atggcaaatcctaaggtcttcttcgacatgacgataggaggcgctccggcgggtcggatcgtgatggagctattcgcggatacaacgccacgaacggctgagaatttcagggctctttgcacgggagagaaagggattggtcgcagccgcaagcctttgcactacaaaggatcgagtttccaccgagtgatccctggattcatgtgccagggaggcgatttcacagctgggaacggaactggaggggaatccatctacggagctaagttcgccgatgagaatttcattaagaagcacacagggccagggatcttgtcgatggctaatgcagggcctggaacgaatggttcgcagtttttcatatgtacggcgaagaccgagtggctggatgggaagcatgtggtgtttggtagagttgtggaggggatggatgtggtgaagaccattgagaaggttggatcttcctctggaaggacctccaagcccgttgtgattgctgattgtggccagcttgcttga

SEQ ID NO: 1205 - protein, 172 aa, Hevea brasiliensis
MANPKVFFDMTIGGAPAGRIVMELFADTTPRTAENFRALCTGEKGIGRSRKPLHYKGSSFHRVIPGFMCQGGDFTAGNGTGGESIYGAKFADENFIKKHTGPGILSMANAGPGTNGSQFFICTAKTEWLDGKHVVFGRVVEGMDVVKTIEKVGSSSGRTSKPVVIADCGQLA

SEQ ID NO: 1206 - DNA, 1116 bp, Saccharomyces cerevisiae (strain RM11-1a)
  CDS (1)..(1116)
atgactagacctaaaactttttttgatatttctattggaggtaaaccccaaggccgtatagtttttgagttgtacaatgacatagtgcctaaaacggctgaaaattttttgaagttgtgtgaaggaaatgctggtatggcaaagactaaacctgatgtaccattgtcgtacaagggttccattttccacagagtgatcaaagacttcatgtgtcaatttggtgattttaccaattttaatggtactggcggtgagagcatatacggtgaaaaattcgaggatgaaaatttcactgttaaacatgataaaccattccttctatccatggccaacgccggtccaaataccaatggatctcaagctttcataacctgtgttcctacacctcatttggacgggaagcacgttgtgtttggtgaagtgattcaaggtaaaagaattgttcgtttgattgaaaaccaacaatgtgaccaagaaaacaacaagccattgcgtgatgtaaagattgatgactgtggcgtgttacctgacgattatcaagtgccagagaatgccgaagctacaccaacagatgagtacggcgataattatgaagatgttttaaaacaagacgaaaaagttgacttgaagaatttcgacaccgtcttgaaagctatcgaaacggtaaagaacattggtactgaacagttcaagaaacagaactattccgtggctttagaaaaatatgtcaaatgtgataaattcttgaaagagtatttcccagaagatttggagaaggaacaaattgaaaaaatcaatcaattgaaagtgtctattccattgaatattgccatctgtgctcttaaattaaaagattacaagcaagtattagtagcctcatcggaggtgttatatgccgaagcggctgacgaaaaagctaaggccaaagctttgtaccgtcgtggcctggcctattaccatgttaatgacacagatatggctctcaatgacctagaaatggccactactttccagccaaatgacgccgccattttgaaagctattcatgatactaaattaaaaagaaagcaacaaaacgaaaaagctaaaaagtctctttcgaagatgttctcctga

SEQ ID NO: 1207 - protein, 371 aa, Saccharomyces cerevisiae (strain RM11-1a)
MTRPKTFFDISIGGKPQGRIVFELYNDIVPKTAENFLKLCEGNAGMAKTKPDVPLSYKGSIFHRVIKDFMCQFGDFTNFNGTGGESIYGEKFEDENFTVKHDKPFLLSMANAGPNTNGSQAFITCVPTPHLDGKHVVFGEVIQGKRIVRLIENQQCDQENNKPLRDVKIDDCGVLPDDYQVPENAEATPTDEYGDNYEDVLKQDEKVDLKNFDTVLKAIETVKNIGTEQFKKQNYSVALEKYVKCDKFLKEYFPEDLEKEQIEKINQLKVSIPLNIAICALKLKDYKQVLVASSEVLYAEAADEKAKAKALYRRGLAYYHVNDTDMALNDLEMATTFQPNDAAILKAIHDTKLKRKQQNEKAKKSLSKMFS

SEQ ID NO: 1208 - DNA, 522 bp, Elaeis guineensis var. tenera
  CDS (1)..(522)
atggcttcgaaccctagggttttcttcgacatggcaatcggcggtgcccccgccggccggatcgtgatggagctgtatgctgacgtggtcccccgcacggcggagaacttccgtgccctgtgcaccggcgagaagggcgtcgggaggtccggcaagccgctgcactacaaggggtcgacgttccacagggtgatcccggggttcatgtgccagggcggcgacttcaccgccgggaacggcaccggcggggagtcgatctacggggcgaagttccaggacgagaacttcatcaagaagcacacgggctccggggtgctgtcgatggcgaacgcgggggccaacacgaacggctcccagttcttcatctgcaccgccaccacctcgtggctcgacgggaagcacgtcgtctttgggcaggtggtggaggggttggacgtcgtcagatccatcgagaaggttggatcccagagcgggaggacctccaagcccgtcaccgtcgcggactgcggccaactcgcttag

SEQ ID NO: 1209 - protein, 173 aa, Elaeis guineensis var. tenera
MASNPRVFFDMAIGGAPAGRIVMELYADVVPRTAENFRALCTGEKGVGRSGKPLHYKGSTFHRVIPGFMCQGGDFTAGNGTGGESIYGAKFQDENFIKKHTGSGVLSMANAGANTNGSQFFICTATTSWLDGKHVVFGQVVEGLDVVRSIEKVGSQSGRTSKPVTVADCGQLA

SEQ ID NO: 1210 - DNA, 642 bp, Zea mays
  CDS (1)..(642)
atgcgacgcggcgcgctctccctccgtcccgcccgcgctatccccacgttgaggctcggcggccaccgcgacgcccgtggcgctgtcgtcgtccgcgccactgcggcagagggagccgtggagctgcaggccaaggtgacgagcaagtgcttcttcgacgtggaggtcggcggggagcctgcgggccgcatcgtcatcgggctcttcggagaggtcgtacctaagaccgtcgacaacttccgtgcgctctgcactggtgagaaagggtacggctacaagggctgctccttccaccggatcatcaaggactttatgattcaaggcggggacttccagcaaaacaatggtactggtgggagaagtatttatggtgaatgctttgatgatgaaaattttacactgaagcatgttggccctggtgtgctaagcatggcaaatgctggccccaacacaaatggaagtcaatttttcatttgcactgtgaagacaccgtggttggacaaccgtcacgtcgtgtttggacacgtattagaggggatggacgtggtgaagcagcttgaatcgcaagagaccagcaggtccgatactcccaagcagccttgccgaatcgttaactgtggcgaggtccccctggacagctga

SEQ ID NO: 1211 - protein, 213 aa, Zea mays
MRRGALSLRPARAIPTLRLGGHRDARGAVVVRATAAEGAVELQAKVTSKCFFDVEVGGEPAGRIVIGLFGEVVPKTVDNFRALCTGEKGYGYKGCSFHRIIKDFMIQGGDFQQNNGTGGRSIYGECFDDENFTLKHVGPGVLSMANAGPNTNGSQFFICTVKTPWLDNRHVVFGHVLEGMDVVKQLESQETSRSDTPKQPCRIVNCGEVPLDS

SEQ ID NO: 1212 - DNA, 525 bp, Ziziphus jujuba
  CDS (1)..(525)
atgtcaaatccaaaggttttctttgacatactgattggaaagatgaaagctggccgagtagtaatggagttattcgctgatgttactccaaaaaccgctgagaatttccgcgtcctttgcactggggagaaagggattggaatttctgggaagccactgcactataagggctccaccttccaccgtattattccaaactttatgtgtcagggtggagatttcaccaggggtaatgggactggaggagaatccatctatggtacaaagtttgcagatgagaacttcaagctgaaacacacaggccctggaattttgtcaatggcaaatgctggaccaaacactaatggttcccagttctttatatgtacagagaagaccccgtggcttgatggaaagcatgttgtgtttggtaaagttgttgatgggtataatgtcgtcaaagagatggagaaggtgggttcagatagtgggagaacttcacaacctgttgtcattgaagattgtggtcagataacagggaagtga

SEQ ID NO: 1213 - protein, 174 aa, Ziziphus jujuba
MSNPKVFFDILIGKMKAGRVVMELFADVTPKTAENFRVLCTGEKGIGISGKPLHYKGSTFHRIIPNFMCQGGDFTRGNGTGGESIYGTKFADENFKLKHTGPGILSMANAGPNTNGSQFFICTEKTPWLDGKHVVFGKVVDGYNVVKEMEKVGSDSGRTSQPVVIEDCGQITGK

SEQ ID NO: 1214 - DNA, 657 bp, Leptospirillum sp. Group II '5-way CG'
  CDS (1)..(657): transl_table=11
atgctctgtctggaaaaaaaacgaacagtgatggcccttgtctcagtctgctttttttttctggggtttattggcataccgcttacaggaggaatgactttggcaaacgcggatgaaacagcaaaaccgactcttcctccgggagagtatgcggaatttgatacctcgatgggaacgattatttgtcagcttttcccccagtcggccccccatacggtcgagaattttgtggggctggcggagggaacgaaggattttcaggacccccagtcgggaaaaatggtcaagcgccctttttatgatggtctcgtttttcatcgggtcatcaagaattttatgattcagggaggagaccccctcggaaatgggaccggcggtccagggtaccagtttgacgatgaaatcgatgcgtcacgggatttttctcacaaaggtgtgctggcgatggcaaatgccggtccgaatacaaatggaagccagttttttataacggttgcaccggctccatggcttaacggcaattattcaatcttcggtcaggtggtttcgggtcagtccgtggcggataaaatttctgaagttgcgacagaccgccgggaccgtccccagactccggttgtcatccagcacgtaaaaatctttcgggtcaatccctga

SEQ ID NO: 1215 - protein, 218 aa, Leptospirillum sp. Group II '5-way CG'
MLCLEKKRTVMALVSVCFFFLGFIGIPLTGGMTLANADETAKPTLPPGEYAEFDTSMGTIICQLFPQSAPHTVENFVGLAEGTKDFQDPQSGKMVKRPFYDGLVFHRVIKNFMIQGGDPLGNGTGGPGYQFDDEIDASRDFSHKGVLAMANAGPNTNGSQFFITVAPAPWLNGNYSIFGQVVSGQSVADKISEVATDRRDRPQTPVVIQHVKIFRVNP

SEQ ID NO: 1216 - DNA, 748 bp, Zea mays
  CDS (29)..(547)
aacaatattatctcaaagctaaccaacaatggcgttcccaaaggtgttcttcgacataaacatcaacggccaggcagcgggaaggatcgtgatggagttgtatacggataagacgccgaagacggctgagaatttcagagctctgtgcactggagagaagggagtggggcgtaagggaaagcccctccacttcaagggatcttccttccaccgagtgatccccagtttcatgtgccagggaggtgatttcaccgcgggaaacgggacaggaggtgagtccatctacggtgataagttcgaggacgagaactttgagaggaagcacacgggtcctggcaacctttccatggcgaacgccggagccaacaccaacggatctcagttcttcatctgcaccgtaaaaaccgattggcttgacggtaagcacgtggtgttcgggcaggtggtggaagggttagacgtggtgaaggcgatcgagaaggtgggatcgtcgtctggaaagccgtcgaagccggtggttatcgccgattgtggacagctctcttagatagatctctctcatctatcctcattttaaattatagcgtcagcgtccttgtcctatatatgttatgtatgtttggtgtctcgtttgtatgtgtagtcataatcttggtgtgtattctcatgacagtcttttggattgccagagagaaactcgtcaccctaattacctactaccataaataaatattgaacatcttgcagt

SEQ ID NO: 1217 - protein, 172 aa, Zea mays
MAFPKVFFDININGQAAGRIVMELYTDKTPKTAENFRALCTGEKGVGRKGKPLHFKGSSFHRVIPSFMCQGGDFTAGNGTGGESIYGDKFEDENFERKHTGPGNLSMANAGANTNGSQFFICTVKTDWLDGKHVVFGQVVEGLDVVKAIEKVGSSSGKPSKPVVIADCGQLS

SEQ ID NO: 1218 - DNA, 609 bp, Zea mays
  CDS (1)..(609)
atggcgtccggcggagcggccatctcggcggggcctacaccaccgtcggcgacgacggcgtcgtcggttgagtggcaccagcggccgccgaacccgaagaatcccgtggtgttcttcgacgtgaccatcgggtccatcgccgccggccgcatcaagatggagctcttcgccgacatcgcccccaagaccgcggagaacttccggcagttctgcactggggagcatagaaaaaatgctttgccacaaggttataagggctgccaattccatagagtgatcaaagatttcatgattcagggtggtgacttcttgaagaatgatggtactggatgcacatcaatctacggtaccaaatttgatgatgaaaattttatagcaaagcatacagggcctggactgctctcgatggcaaacagtggaattaactctaatggatctcagttctttataacatgtgcaaagtgtgactggcttgacaacaaacatgtggtatttgggagagtgcttggagacggtttgctcgtcgtgaggaagattgaaaatgttgcaactggagcgaataacaaaccaaagcttgcctgcgttataagtgagtgtggtgaaatgtag

SEQ ID NO: 1219 - protein, 202 aa, Zea mays
MASGGAAISAGPTPPSATTASSVEWHQRPPNPKNPVVFFDVTIGSIAAGRIKMELFADIAPKTAENFRQFCTGEHRKNALPQGYKGCQFHRVIKDFMIQGGDFLKNDGTGCTSIYGTKFDDENFIAKHTGPGLLSMANSGINSNGSQFFITCAKCDWLDNKHVVFGRVLGDGLLVVRKIENVATGANNKPKLACVISECGEM

SEQ ID NO: 1220 - DNA, 558 bp, Medicago truncatula
  CDS (1)..(558)
atggcaggttcaggtgtggagtggcacgtgcgtccaccaaaccctaaaaatccaatcgtcttcttcgatgttaccatcggtaacatccctgctggtagaatcaaaatggaactcttcgctgatattgctcccaaaacagctgaaaatttcaggcagttctgcacgggggagtacaggaaagcaggtcttcctattggttacaagggttgtcaatttcatagagtgattaaggattttatgattcaggctggtgattatgtaaagggtgatggtagtggatgtacttccatctatggactaaagtttgatgatgaaaattttactgccaaacacactggacctggtcttctatcaatggcagatagtggaccaaataccaatggttgtcagttctttataacttgtgcaaaatgtgactggcttgacaacaagcatgttgttttcgggagagtgcttggagatggtcttttggtagtgaggaagattgagaatgttgcaactggacccaataaccggccaaaattagcttgtgtcattgctgaatgtggtgaaatgtaa

SEQ ID NO: 1221 - protein, 185 aa, Medicago truncatula
MAGSGVEWHVRPPNPKNPIVFFDVTIGNIPAGRIKMELFADIAPKTAENFRQFCTGEYRKAGLPIGYKGCQFHRVIKDFMIQAGDYVKGDGSGCTSIYGLKFDDENFTAKHTGPGLLSMADSGPNTNGCQFFITCAKCDWLDNKHVVFGRVLGDGLLVVRKIENVATGPNNRPKLACVIAECGEM

SEQ ID NO: 1222 - DNA, 735 bp, Medicago truncatula
  CDS (1)..(735)
atggctgctgctgctgcattcaatgttactacaacaccgccacttttctcactgtcaaatgttgttgctctgaaccctaaccctagaagaagtatttccgtcggggtggttaggtcccgaggtgggggtgtgaaactagcagtagcggtacgacgacaagtgaaagtgagggcagtggaaagtggtagtagttcagaggagaaagtaatagtacagtcaaaagtgactcacaaagtattctttgatgttagtattggaaatccagttgggaagctggttggaaggattgtgataggactctttggtgatgatgtcccacaaactgttgagaacttccgtgccctttccaccggtgagaagggctttggctacaagtcctccaccttccatcgcgtcatcaaggacttcatgattcaaggaggagactttgataaaggaaatggaactggaggcaaaagtatctatggtcgtactttcaaagatgagaattttaatctgtctcataccggaccaggagctgttagcatggcaaatgctggtcccaacaccaatgggagtcagtttttcatatgcactgtcaagacgccgtggctggatcagaggcatgttgtattcggccaagttttggaaggcatggacattgttaggttgattgaatcacaggagcctgatcgtggtgatcgtcccctaaagaaggtgacaatcagtgactgtggcgagcttccaattgcttga

SEQ ID NO: 1223 - protein, 244 aa, Medicago truncatula
MAAAAAFNVTTTPPLFSLSNVVALNPNPRRSISVGVVRSRGGGVKLAVAVRRQVKVRAVESGSSSEEKVIVQSKVTHKVFFDVSIGNPVGKLVGRIVIGLFGDDVPQTVENFRALSTGEKGFGYKSSTFHRVIKDFMIQGGDFDKGNGTGGKSIYGRTFKDENFNLSHTGPGAVSMANAGPNTNGSQFFICTVKTPWLDQRHVVFGQVLEGMDIVRLIESQEPDRGDRPLKKVTISDCGELPIA

SEQ ID NO: 1224 - DNA, 519 bp, Medicago truncatula
  CDS (1)..(519)
atgtcaaatccaaaggttttctttgatattctaattggaagaatgaaagctggaaagatagtaatggagctgtttgctgatgctaccccaaaaacagctgaaaattttagggcactctgcacaggagaaaggggaattgggcaatgcggtaaacctttacactataaaggttctggttttcatcgtattattccagagtttatgtgtcaaggaggagattttactaaagggaatggtactggaggagagtctatttatgggtctaaattcgcagacgagaatttcaagctgaaacatactggacctggtattctttccatggcaaattctggacccaatactaatggttctcaatttttcatttgtacttcaaagactcaatggcttgatggaaagcatgttgtatttggcaaagtggtcgaaggatacgatgtagttcaggccatggagaaggttggttcacaaaatggtaggacatcagagcatgttgtcattgaagattgtggacaaattagttga

SEQ ID NO: 1225 - protein, 172 aa, Medicago truncatula
MSNPKVFFDILIGRMKAGKIVMELFADATPKTAENFRALCTGERGIGQCGKPLHYKGSGFHRIIPEFMCQGGDFTKGNGTGGESIYGSKFADENFKLKHTGPGILSMANSGPNTNGSQFFICTSKTQWLDGKHVVFGKVVEGYDVVQAMEKVGSQNGRTSEHVVIEDCGQIS

SEQ ID NO: 1226 - DNA, 552 bp, Ixodes scapularis
  CDS (1)..(552)
atggcgaactggaaccaacttcaacagcagcttcggcacccgaataatcctgtggtgttctttgatattaccattggttccacggaggtgggacggatgaaaatggaacttttctcggatgtcgtcccccggacaactgagaatttcaggcaattttgcaccggtgaatacaagaaagatggtgttccgataggctacaaaggctccacatttcatcgggtcattaaggacttcatgattcaaggaggggacttcgttaatggggacggcatgggacttatgagcatctacggaggttccttcagtgacgaaaacttcaaaatgaggcatgatgccccaggtcttttgtccatggctaacagtggaaaggacacaaatggctgtcagttcttcatcacgtgtgccagatgtgatttccttgacggaaagcatgtagttttcggacgaattctggacggccttttggtgatgcggaaaattgagaatgttcccatcggccccaacaacaagccaaagattcctgtcatcatttctcagtgtggggagatgtga

SEQ ID NO: 1227 - protein, 183 aa, Ixodes scapularis
MANWNQLQQQLRHPNNPVVFFDITIGSTEVGRMKMELFSDVVPRTTENFRQFCTGEYKKDGVPIGYKGSTFHRVIKDFMIQGGDFVNGDGMGLMSIYGGSFSDENFKMRHDAPGLLSMANSGKDTNGCQFFITCARCDFLDGKHVVFGRILDGLLVMRKIENVPIGPNNKPKIPVIISQCGEM

SEQ ID NO: 1228 - DNA, 717 bp, Oryza sativa subsp. indica
  CDS (1)..(717)
atggcttgcaggtcggccgtgtgctccccctccgccctcgcgccgccgcgccaccgcctcctctccctcggctgcgcgcgcaccgccgccccctcgggcggactcccgctccgcctccgcctccgctccagccccgcgccccgcggccacggcgccgacctcgtcgtccgcgcggcggccgcagagggggccgtggagctgcaggcgaaggtgaccagcaaatgcttcttcgacgtcgaggtcggcggggagcccgcggggaggatcgtcatcgggctcttcggggaagtcgtccccaagacggtggacaacttccgcgccctgtgcactggtgataagggctacgggtacaagggttgctccttccaccgaatcatcaaggacttcatgattcagggcggggacttccagaacaacaatggtactggtggtaggagtatctatggtgaatgttttgacgatgaaaattttacattaaagcacaccggtcctggtgtactaagcatggcaaacgctggccctgacacaaatggaagccaatttttcatttgtaatgtgaagacaccatggttggacaatcgtcacgttgtctttgggcatgtcttggaggggatggacgtggtgaagaatcttgaatcacaagaaaccagcaggtccgatattcctaagcagccctgcagaatcgtgaattgtggcgagctgcccgtggacggttga

SEQ ID NO: 1229 - protein, 238 aa, Oryza sativa subsp. indica
MACRSAVCSPSALAPPRHRLLSLGCARTAAPSGGLPLRLRLRSSPAPRGHGADLVVRAAAAEGAVELQAKVTSKCFFDVEVGGEPAGRIVIGLFGEVVPKTVDNFRALCTGDKGYGYKGCSFHRIIKDFMIQGGDFQNNNGTGGRSIYGECFDDENFTLKHTGPGVLSMANAGPDTNGSQFFICNVKTPWLDNRHVVFGHVLEGMDVVKNLESQETSRSDIPKQPCRIVNCGELPVDG

SEQ ID NO: 1230 - DNA, 519 bp, Ipomoea batatas
  CDS (1)..(519)
atgggcaatcctagagttttctttgatatgaccatcggcggccagccggccggccgtatagtgatggagttattcgccgatacgactccccagacggccgagaacttccgtgctttttgcactggcgagaagggagttggaaagtccggcaagcccttgcactacaagggctccaccttccaccgtgtgatccccaacttcatgtgccagggcggcgatttcaccgctggaaacggcaccggaggagagtcgatatacggatcgaagttcaaggacgagaatttcgtggagaagcacaccggacctggcatcctgtccatggccaatgccggccccaacaccaacggctttcagttcttcatctgcacggcgaagaccgagtggctggacggcaagcacgtggtgttcggccaggtggttgaaggtttggacgtggtgaagaaggtggagcaggttggatccggctccgggaggtgctcaaagccggtggtcgtcgccgactgtggtcaactctcttaa

SEQ ID NO: 1231 - protein, 172 aa, Ipomoea batatas
MGNPRVFFDMTIGGQPAGRIVMELFADTTPQTAENFRAFCTGEKGVGKSGKPLHYKGSTFHRVIPNFMCQGGDFTAGNGTGGESIYGSKFKDENFVEKHTGPGILSMANAGPNTNGFQFFICTAKTEWLDGKHVVFGQVVEGLDVVKKVEQVGSGSGRCSKPVVVADCGQLS

SEQ ID NO: 1232 - DNA, 591 bp, Ricinus communis
  CDS (1)..(591)
atggcgtcaggagtaggcaacacgagcacagcaaccggagcagggaacgtagagtggcacgtaagacctccaaatcctaaaaacccaatcgttttcttcgatattacaattggcaccattcccgctggtcgcatcaaaatggaactctttgccgatattgcccctaaaaccgccgagaatttcaggcaattttgcactggagagtacagaaaagctggattgcctgtaggttataaagggtgtcagtttcatagagtgattaaagacttcatgattcaagctggtgattttcttaagggtgatggcagtggatgcgtttcgatatatggacataaatttgatgatgaaaattttattgccaagcacactggtcctggtctactctcaatggcaaatagtggaccaaacactaatgggtgtcagttcttcatcacttgtgcaaaatgtgactggctcgacaacaagcatgttgtgtttgggagggtgcatggagacggtcttttggtcgtcagaaagattgagaatgtggccacgggacccaacaatcggcctaaactggcatgtactattgctgaatgtggggaaatgtag

SEQ ID NO: 1233 - protein, 196 aa, Ricinus communis
MASGVGNTSTATGAGNVEWHVRPPNPKNPIVFFDITIGTIPAGRIKMELFADIAPKTAENFRQFCTGEYRKAGLPVGYKGCQFHRVIKDFMIQAGDFLKGDGSGCVSIYGHKFDDENFIAKHTGPGLLSMANSGPNTNGCQFFITCAKCDWLDNKHVVFGRVHGDGLLVVRKIENVATGPNNRPKLACTIAECGEM

SEQ ID NO: 1234 - DNA, 525 bp, Coffea canephora
  CDS (1)..(525)
atgtcgaatcctaaggtgttcttcgacatactgattggaaatgtgaaggctggtcgggttgtgtttaaattgtttgcagatactactcctaaaactgctgaaaactttcgcgctctttgcactggagagaaaggcattggaatttcagggaaaccacttcattataagggctcaacctttcaccgcatcattccaagttttatgtgtcaaggtggagacttcactaggggaaatgggacaggaggagaatctatctatggaatgaaatttgctgatgaaaatttccaaaagaagcacatccaacctggccttctttcgatggcaaatgctggaccaaatactaacggatctcaattctttatcactactgttagcacaccttggcttgataataagcatgtggtgtttgggcaggttgtggagggttataatgttgtcgaggcaatggagaaggtgggctcagccagtggaaagacttcttcaccggttgtgatagaagattgtggtgaaatgaaagaacagtga

SEQ ID NO: 1235 - protein, 174 aa, Coffea canephora
MSNPKVFFDILIGNVKAGRVVFKLFADTTPKTAENFRALCTGEKGIGISGKPLHYKGSTFHRIIPSFMCQGGDFTRGNGTGGESIYGMKFADENFQKKHIQPGLLSMANAGPNTNGSQFFITTVSTPWLDNKHVVFGQVVEGYNVVEAMEKVGSASGKTSSPVVIEDCGEMKEQ

SEQ ID NO: 1236 - DNA, 633 bp, Micromonas sp. RCC299
  CDS (1)..(633)
atggcctttttggaacttagggttgctggcgaggggtcactcgcggaggccggaccgaaccgcggagtcgcgcactcgagaatgacggatatacaatggcaccagcgggcgcccaacccgaacaatccagtggtgtttttcgacgtcaccatcggaggcgcggacgtcggcaggatcaagatggagctgttcgccgacgtcgcgcccaagacgtgcgagaacttccgacagttctgcaccggtgagcacaagaagggcggctttccgcagggatacaaggacgtggagttccaccgcgtcatcaaagatttcatgatccagggcggggacttcctcaagggagacggcacgggctgcgtctccatctacgggagcaagttcaacgacgaaaacttcgtcgcgaaacacacgggccccgggctgctgagcatggccaacagcgggcccaacagcaacgggtgccagtttttcctgacctgcaccaagacggagtggctcgacgacaagcacgtggtgttcgggcgggtcctgggggacgggttactggtgctgaggaagatcgagaacgtcgcgactggacccaacaacaagcccaaactctcgtgtaaaatctcgcagtgcggcgagatgtag

SEQ ID NO: 1237 - protein, 210 aa, Micromonas sp. RCC299
MAFLELRVAGEGSLAEAGPNRGVAHSRMTDIQWHQRAPNPNNPVVFFDVTIGGADVGRIKMELFADVAPKTCENFRQFCTGEHKKGGFPQGYKDVEFHRVIKDFMIQGGDFLKGDGTGCVSIYGSKFNDENFVAKHTGPGLLSMANSGPNSNGCQFFLTCTKTEWLDDKHVVFGRVLGDGLLVLRKIENVATGPNNKPKLSCKISQCGEM

SEQ ID NO: 1238 - DNA, 597 bp, Micromonas sp. RCC299
  CDS (1)..(597)
atgcagaaaaagcttctgattctctcggccctcatggtcgccctcgcgtgcgcgcacgcgggcgagaccccccccgagatcaccaacaaggtttacttcgacgtctccatcggcggccagcccgcgggcaggatcaccatgggcctctacggcaccgccgtgcccaagacggtggagaacttccgcgcgctgtgcacgggggagaagggcgttggcaaccgcggaaagcccctccactacaagggctccatcttccaccgcatcatcccccagttcatgctccagggcggcgacttcaccgacggtaacggtcgcggcggtgagtccatctacggcgagaagttcgcggacgagagcttcgccatcaagcactcaggcgcgggcgacctctccatggccaacgcgggacccaacacaaacggatcgcagttcttcatcaccaccatcaagaccgcctggctcgacgggcgccacgtcgtcttcggcaaggtgctcgagggcatggacgtggtgtacaaggtcgaggcggtcggctcccagagcggcaagccctccaaggaggtcgtcatcaccgactccggcgagctcgagatgtga

SEQ ID NO: 1239 - protein, 198 aa, Micromonas sp. RCC299
MQKKLLILSALMVALACAHAGETPPEITNKVYFDVSIGGQPAGRITMGLYGTAVPKTVENFRALCTGEKGVGNRGKPLHYKGSIFHRIIPQFMLQGGDFTDGNGRGGESIYGEKFADESFAIKHSGAGDLSMANAGPNTNGSQFFITTIKTAWLDGRHVVFGKVLEGMDVVYKVEAVGSQSGKPSKEVVITDSGELEM

SEQ ID NO: 1240 - DNA, 519 bp, Solanum commersonii
  CDS (1)..(519)
atggcaaatccaagggttttctttgaccttaccatcggcggtgcaccagctggccgcgtggtgatggagctcttcgccgataccactccaaaaaccgctgagaacttccgagctctctgtaccggtgaaaaaggtgttggaaagatgggtaagcctttgcactacaagggctcaaccttccaccgtgtgatcccagggttcatgtgtcaaggaggtgatttcaccgccggaaacggtaccggagaggaaaagtcgatctacggcgccaaattcaaggacgaaaacttcgtcaagaaacacaccggcgctggaattctctccatggctaatgctggacctggaaccaacggttctcaattcttaatctgttccgctaagactgagtggctcgatgggaagcacgtcgtgtttggacaagttgttgaaggcttggatgtgattaagaaggccgaggctgttggatctagctctggaaggtgctccaagcctgtggtggttgctgactgcggtcaactctag

SEQ ID NO: 1241 - protein, 172 aa, Solanum commersonii
MANPRVFFDLTIGGAPAGRVVMELFADTTPKTAENFRALCTGEKGVGKMGKPLHYKGSTFHRVIPGFMCQGGDFTAGNGTGEEKSIYGAKFKDENFVKKHTGAGILSMANAGPGTNGSQFLICSAKTEWLDGKHVVFGQVVEGLDVIKKAEAVGSSSGRCSKPVVVADCGQL

SEQ ID NO: 1242 - DNA, 663 bp, Tachypleus tridentatus
  CDS (1)..(663)
atgaagcattgctctttgcatttagtgttttttttagtattcgtaaccactctatctattgggttagcaacgacagaaaagaaaccaaaaggaccaaaagttacagacatagtatattttgatatcacaattggtggaaaacctgcaggtcgaatagaaattggtctctttggaaaaactgttcccaagacagttaaaaactttgttgaaactgcaacaaaacatttaactgagaaaagtgaagatgacaagttggttggatataaaggaagcatctttcacaggatcattaatgacttcatgatccaaggaggagattttacaaaaggagatggtacaggaggacgaagtatttatggagagaggtttcctgatgaaaacttcaaactcaaacattatggtgctgggtggttgtccatggctaatgctggaaaagacactaatggttctcagttttttattacctgtaagaaaacttcttggttagatgggaagcatgttgtgtttggaaaagtcgttaaaggaatgagtgttgtgcggaaaattgagtcaaccaaaacggacagcagagataagccggtgaaagacgtggttatcgcagattctggtaccattccagtagaaacgccgtattctgttgaaagagctgatgccattgaataa

SEQ ID NO: 1243 - protein, 220 aa, Tachypleus tridentatus
MKHCSLHLVFFLVFVTTLSIGLATTEKKPKGPKVTDIVYFDITIGGKPAGRIEIGLFGKTVPKTVKNFVETATKHLTEKSEDDKLVGYKGSIFHRIINDFMIQGGDFTKGDGTGGRSIYGERFPDENFKLKHYGAGWLSMANAGKDTNGSQFFITCKKTSWLDGKHVVFGKVVKGMSVVRKIESTKTDSRDKPVKDVVIADSGTIPVETPYSVERADAIE

SEQ ID NO: 1244 - DNA, 516 bp, Vicia faba
  CDS (1)..(516)
atgtcaaaccccaaagttttcttcgatatgaccgtcggcggccaaaacgctggacgcatcatctttgagctttttgccgatgtcactcccagaaccgctgagaatttccgtgctctctgcaccggcgagaaaggagtcggtcgtagcggcaagccactccacttcaagggatcctccttccaccgtgtgatccctaacttcatgtgccagggaggtgacttcaccgccggaaacggcaccggaggagaatcgatctacggttccaagttcgctgacgagaacttcatcaagaagcacaccggtccaggaatcttatccatggcgaacgctggacccggaaccaacggatctcagttcttcatctgcactgccaagactgactggctcgacgggaaacacgtcgtgttcggtcaggttgtcgatggattgaacgttgtgagggatattgagaaggttggatctggctctggcaagacctctaagcctgttgtgatcgccaattgtggacaactgtag

SEQ ID NO: 1245 - protein, 171 aa, Vicia faba
MSNPKVFFDMTVGGQNAGRIIFELFADVTPRTAENFRALCTGEKGVGRSGKPLHFKGSSFHRVIPNFMCQGGDFTAGNGTGGESIYGSKFADENFIKKHTGPGILSMANAGPGTNGSQFFICTAKTDWLDGKHVVFGQVVDGLNVVRDIEKVGSGSGKTSKPVVIANCGQL

SEQ ID NO: 1246 - DNA, 564 bp, Ostreococcus tauri
  CDS (1)..(564)
atgagcgatcgacgatcgatcgaatggcacgaccgcgcgacgacggcgtcgaacccgatcgtcttcttcgacgtcaccatcggcggcgcgcccgcgggacgggtgacgttcgaactcttcgccgacgtcgcgccgaggacggctgagaattttagacaattgtgcgttggggaatttcggacgcgcgagggggcgccgcgcgggtacaaggggtcgacgtttcatcgcgtgattaaagatttcatgattcagggcggtgatttcgtgaataacgacggcacggggtgcgtgtcgatctatgggtcgaagtttgacgacgaggcgttcgtggggaggcacacgggggcgggactgctgagcagcgcgaatagcgggccgaatacgaacgggtgtcagttcttcgtgacgtgtgcgaagacggagtggttggacgataagcacgtggtgttcggacgggttttgggggatgggatgttggtgatcaggaagattgagaacgtggcgacgacgggggggaataagccgaagcttccgtgcgtcatcgcggagtgcggagagatgtag

SEQ ID NO: 1247 - protein, 187 aa, Ostreococcus tauri
MSDRRSIEWHDRATTASNPIVFFDVTIGGAPAGRVTFELFADVAPRTAENFRQLCVGEFRTREGAPRGYKGSTFHRVIKDFMIQGGDFVNNDGTGCVSIYGSKFDDEAFVGRHTGAGLLSSANSGPNTNGCQFFVTCAKTEWLDDKHVVFGRVLGDGMLVIRKIENVATTGGNKPKLPCVIAECGEM

SEQ ID NO: 1248 - DNA, 525 bp, Schistosoma mansoni
  CDS (1)..(525)
atgaacaatccgaataatccagtcgttttcttcgatgtcacgattggtggacaggaaatcggtcgaatgcaattcgaattatttcaagatattgtcccgaaaactgtagagaattttagacaattctgtacaggtgagtatcgtaaagatggtgtaccaactggttacaagggaacatcatttcatagaatcattaaagatttcatggtacaaggcggggattttatcaatggtgatggaactggatcgtttagtatttatggtggtgtacaatttgcagatgagaattttgaagtgaaacattgtacttgtggaatgctgtctatggcgaatagtggtcgtgatacaaatggatgccagttcttcattacttgtgccccttgtgactttctcgatgggaaacatgtggttttcggtcgaattgttgatgggatgttagttttaaagaaaattgaaaatgtaccaactggtgctaataatcgtccaaaagttcccgtactaatatcacaatgtggagaaatgtaa

SEQ ID NO: 1249 - protein, 174 aa, Schistosoma mansoni
MNNPNNPVVFFDVTIGGQEIGRMQFELFQDIVPKTVENFRQFCTGEYRKDGVPTGYKGTSFHRIIKDFMVQGGDFINGDGTGSFSIYGGVQFADENFEVKHCTCGMLSMANSGRDTNGCQFFITCAPCDFLDGKHVVFGRIVDGMLVLKKIENVPTGANNRPKVPVLISQCGEM

SEQ ID NO: 1250 - DNA, 516 bp, Brugia malayi
  CDS (1)..(516)
atgtcacgacctaaagtattcttcgatattacaattgatggaagtaatgcaggacgaattgtcatggagctttttgctgatattgtacctaaaacagctgaaaattttcgctgtctctgtaccggcgaaagaggtatgggacgaagtggtaaaaaattacactataaaggatcgaaatttcatcgtgttatacctaattttatgctacagggtggtgattttacacgtggaaatggcacaggaggtcaatcaatttatggtgaaaaattccctgacgaaaatttccaggagaagcatacaggtcttggtgtcttatcaatggctaatgcgggaccaaatactaatggttctcaattcttcatctgtactgcaaaaacagagtggttggatggaaagcatgtggtatttaatcgtgttgtagaaggtatgaatgtcgtgaaggcagtcgaaagtaaaggatctcaaagtggacgaacatcggcagatatagtaatttcagattgtggacaattgtaa

SEQ ID NO: 1251 - protein, 171 aa, Brugia malayi
MSRPKVFFDITIDGSNAGRIVMELFADIVPKTAENFRCLCTGERGMGRSGKKLHYKGSKFHRVIPNFMLQGGDFTRGNGTGGQSIYGEKFPDENFQEKHTGLGVLSMANAGPNTNGSQFFICTAKTEWLDGKHVVFNRVVEGMNVVKAVESKGSQSGRTSADIVISDCGQL

SEQ ID NO: 1252 - DNA, 516 bp, Curvularia lunata
  CDS (1)..(516)
atgtccaacccccgtgttttcttcgacatcagcattgccggccagccggcaggccgcgtcgtcatggagctcttcgccgacaaggttcccaagactgctgagaacttccgcgccctctgcaccggtgagaagggtaccggcaagtctggaaagcctctccactacgagggctccaccttccaccgcgtcattccccagttcatgcttcagggtggtgacttcacccgcggcaacggcactggtggtgagagcatctacggcgagaagttcgaggacgagaactttgctctgaagcacactggacctggtgtcctgtccatggccaacgctggtcccaacaccaacggcagccagttcttcatctgcaccgtcaagacttcatggttggacggcaagcacgtcgtcttcggccaggttgtcgagggcatggacgttgtccaggctgttgagaaggtcggctcccagtccggtcagaccagcaagcccgtcaagattgagaagtccggccagctatag

SEQ ID NO: 1253 - protein, 171 aa, Curvularia lunata
MSNPRVFFDISIAGQPAGRVVMELFADKVPKTAENFRALCTGEKGTGKSGKPLHYEGSTFHRVIPQFMLQGGDFTRGNGTGGESIYGEKFEDENFALKHTGPGVLSMANAGPNTNGSQFFICTVKTSWLDGKHVVFGQVVEGMDVVQAVEKVGSQSGQTSKPVKIEKSGQL

SEQ ID NO: 1254 - DNA, 495 bp, Aedes aegypti
  CDS (1)..(495)
atgggtttgccgcgttgctttttcgacctaactgctgataacgccccactgggacgtgtcgttattgagctgcgcacagatgtaactccaaagacttgcgaaaacttccgtgcgctctgcaccggagagaagggattcggctacaagggttccaccttccaccgtgtgattcccaacttcatgtgccagggtggcgatttccagaaccacaacggtactggtggaaagtccatctacggcaacaagttcgaggatgagaacttcatcctgcgacacactggccccggaatcatgtcgatggcaaatgccggacccaacaccaacggatcccagttcttcatcaccaccgtgaagacctcctggctcgatgaccgccacgttgtcttcggcagtgttgtcgagggtatggatgtcatccggaaggtcgaatcctacggaaaccaatcgggaaagacctccaagcagattgtggtttccaactgtggtcaactgtaa

SEQ ID NO: 1255 - protein, 164 aa, Aedes aegypti
MGLPRCFFDLTADNAPLGRVVIELRTDVTPKTCENFRALCTGEKGFGYKGSTFHRVIPNFMCQGGDFQNHNGTGGKSIYGNKFEDENFILRHTGPGIMSMANAGPNTNGSQFFITTVKTSWLDDRHVVFGSVVEGMDVIRKVESYGNQSGKTSKQIVVSNCGQL

SEQ ID NO: 1256 - DNA, 666 bp, Glycyphagus domesticus
  CDS (1)..(666)
atgcagcccaattgtcttcaattttcgattgtctttgtttgtttgatctctttggtatcgacatgcattggcaaagaagagaccaaaccaaagggaccaaaagctactgatattgtcacctttgacatcacaatcggtgatgaacctgcgggaaagattcgaattgccgtgtttggaaaaaccgttcctaaaactgccgaaaattttaaacagctctgcatccgacatcttacagagaaagctgaagatgacaaattggttggctacaaaggaagctcttttcatcgtgtgatcactaactttatgatccaaggtggtgactttactcgtggtgacggtaccggcggtcgaagcatctacggcgaaaagtttgccgacgaaaactttaagctcaagcattatggcgctggatggctgtcaatggcaaacgctggaaaagataccaatggatctcagttctttatcaccgttgccaagactcaatggctcgacggaaagcacgttgtttttggaaaagttatcgaaggaatgtcgatcgtaaagaagattgaaagcaccgaaactgattcaagtgaccgtccaaagaaagttgtcaagattgccgattgcagtgtcgaaactctcaccgagccattgtcggtttcacgtgaaagtgccgatctataa

SEQ ID NO: 1257 - protein, 221 aa, Glycyphagus domesticus
MQPNCLQFSIVFVCLISLVSTCIGKEETKPKGPKATDIVTFDITIGDEPAGKIRIAVFGKTVPKTAENFKQLCIRHLTEKAEDDKLVGYKGSSFHRVITNFMIQGGDFTRGDGTGGRSIYGEKFADENFKLKHYGAGWLSMANAGKDTNGSQFFITVAKTQWLDGKHVVFGKVIEGMSIVKKIESTETDSSDRPKKVVKIADCSVETLTEPLSVSRESADL

SEQ ID NO: 1258 - DNA, 498 bp, Graphocephala atropunctata
  CDS (1)..(498)
atgagtttgccacgagtatattttgacatgactgccgacgggcaggcagtaggacgaattgtgattgagctgcggagcgatgtggtaccaaagactgctgagaatttccgagctctgtgcactggagagaaggggttcggctacaagggctgcacgttccacagggtgattcctaacttcatgtgtcaaggtggagacttcaccaagcacaatggtactggcggcaagtccatttatggcaccaagtttgacgacgagaacttcaccctgaagcacactggacccggtgtaatgtcaatggcaaatgctggccctaacaccaacggcagccagttcttcatcaccactgtgaaaaccagctggctagacaacaggcacgttgtgttcggaaacgtggtggagggcatggacgtcgtcaagaagctggagtcttacggctccccgagtggcaagaccaacaagaaaattgtggtcgaaaactctggccagctatcataa

SEQ ID NO: 1259 - protein, 165 aa, Graphocephala atropunctata
MSLPRVYFDMTADGQAVGRIVIELRSDVVPKTAENFRALCTGEKGFGYKGCTFHRVIPNFMCQGGDFTKHNGTGGKSIYGTKFDDENFTLKHTGPGVMSMANAGPNTNGSQFFITTVKTSWLDNRHVVFGNVVEGMDVVKKLESYGSPSGKTNKKIVVENSGQLS

SEQ ID NO: 1260 - DNA, 516 bp, Cryptomeria japonica
  CDS (1)..(516)
atggcaaatccaagggttttctttgaaatggccgtcggcggtgcaccggcgggccgaatcgtgatggagctgtatgctgacgtgacaccgaagaccgcagagaacttcagggcactctgcactggtgagaagggtactggcaagtcaggcaagccccttcacttcaagggctcctccttccaccgggtcatccctggctttatgtgccagggcggtgactttactgctggaaatggcaccggcggtgagtccatttacggttcaaagttccctgacgagaacttccagaagaggcacactggccctggtatcctgtccatggctaacgctgggaagaacaccaacggctcccagttcttcatctgcaccgccaagactgagtggctcgacggcaaacatgtcgtctttggccagatcgtcgacgggatggacgtcgtccgcgccattgagcgcgtcggctcctccagcgggcgcacctccaagcctgttgtcatccaagattgtggtcagctttaa

SEQ ID NO: 1261 - protein, 171 aa, Cryptomeria japonica
MANPRVFFEMAVGGAPAGRIVMELYADVTPKTAENFRALCTGEKGTGKSGKPLHFKGSSFHRVIPGFMCQGGDFTAGNGTGGESIYGSKFPDENFQKRHTGPGILSMANAGKNTNGSQFFICTAKTEWLDGKHVVFGQIVDGMDVVRAIERVGSSSGRTSKPVVIQDCGQL

SEQ ID NO: 1262 - DNA, 516 bp, Dirofilaria immitis
  CDS (1)..(516)
atgtcacgacctaaagtatacttcgatattacaattgatggaagtaatgcaggacgaattgtcatggagctttttgctgatattgtaccaaaaacagctgaaaattttcgttgtctttgtaccggagaaagaggtgtaggacgaagtggtaaaaaattacactataaaggatcgaaatttcatcgtgttataccaaatttcatgttacagggtggtgatttcacacgcggaaacggtacaggaggtgaatcaatttatggtgaaaaattccctgacgaaaacttccaggagaagcatacaggtcctggtgtattgtcaatggcaaatgctggaccaaacaccaatggctcacagtttttcatttgtactgctaagacagaatggttagatggaaagcatgtggtatttggccgtgtagtagaaggtatgaatgttgtgaaggcaatcgaaagtaaaggatctcagagtggacgaacatcggcagatgtagtaattacagattgcgggcagttgtaa

SEQ ID NO: 1263 - protein, 171 aa, Dirofilaria immitis
MSRPKVYFDITIDGSNAGRIVMELFADIVPKTAENFRCLCTGERGVGRSGKKLHYKGSKFHRVIPNFMLQGGDFTRGNGTGGESIYGEKFPDENFQEKHTGPGVLSMANAGPNTNGSQFFICTAKTEWLDGKHVVFGRVVEGMNVVKAIESKGSQSGRTSADVVITDCGQL

SEQ ID NO: 1264 - DNA, 516 bp, Onchocerca volvulus
  CDS (1)..(516)
atgactcgcccacgcgtcttcttcgatattaccatcggtggacagcaatctggacgtattgttatggagctgttcaacgatatagtgccgaaaacagcggaaaatttccgtgcattatgcacaggtgaaaagggcgttggtaaatcagggaaaccgcttcactacaaaggttcaaaattccatcgggtcatcccgaatttcatgtgccagggtggtgatttcactcgtggtaatggaaccggcggtgaatcaatttatggtgaaaaatttgaggatgaaaacttcaaggagaagcacactggacctggtgtgctatctatggcaaatgctggtccagatacgaatggatctcagttcttcttgtgcactgtgaagacagactggttggatggtaagcatgttgtgttcggccgagttgtcgatggaatggacgttgtgcaaaagatcgaagcagtgggttcacaaagtggtaagacatcaaaggatgtagtagttgcaaattgtggacaattataa

SEQ ID NO: 1265 - protein, 171 aa, Onchocerca volvulus
MTRPRVFFDITIGGQQSGRIVMELFNDIVPKTAENFRALCTGEKGVGKSGKPLHYKGSKFHRVIPNFMCQGGDFTRGNGTGGESIYGEKFEDENFKEKHTGPGVLSMANAGPDTNGSQFFLCTVKTDWLDGKHVVFGRVVDGMDVVQKIEAVGSQSGKTSKDVVVANCGQL

SEQ ID NO: 1266 - DNA, 612 bp, Orpinomyces sp. (strain PC-2)
  CDS (1)..(612)
atgaatctttcaattaaatctgtaatctttttagctattgtagctttagctactttagtttctgcttctactaacccaaaggtcaccaacaaggtttactttgatattagacaaggtgataaggatcttggtagaattgttttaggtttatatggtgaagttgttccaaaaactgttgaaaacttccgtgctttagctactggagaaaaaggttatggttacaagaactctaaattccaccgtgttattaaggactttatgattcaaggtggtgatttcactcgtggtgatggtactggtggtaagtctatttacggtgaaagattcgctgatgaaaacttcaagcttagacacaccggtccaggtattctttccatggctaatgctggtcgtgatactaatggtagtcaattctttattactactgttaccacttcatggttagatggtcgtcatgttgttttcggtaaagttattgaaggtatggatgttgttactgctattgaaaccactaagactcttccaggtgacagaccagctactccagttattattgctgactgtggtgaactcccagtttccaacaacaatgatgctaaagctgaattataa

SEQ ID NO: 1267 - protein, 203 aa, Orpinomyces sp. (strain PC-2)
MNLSIKSVIFLAIVALATLVSASTNPKVTNKVYFDIRQGDKDLGRIVLGLYGEVVPKTVENFRALATGEKGYGYKNSKFHRVIKDFMIQGGDFTRGDGTGGKSIYGERFADENFKLRHTGPGILSMANAGRDTNGSQFFITTVTTSWLDGRHVVFGKVIEGMDVVTAIETTKTLPGDRPATPVIIADCGELPVSNNNDAKAEL

SEQ ID NO: 1268 - DNA, 519 bp, Phaseolus vulgaris
  CDS (1)..(519)
atgccgaaccctaaggtcttcttcgacatgaccatcggcggccaacccgccggcaggatcgtgtttgagctctacgccgacgtcactccccgcaccgccgagaacttccgcgccctttgcaccggtgagaagggagtcggtcgcagcggcaagcccgtccacttcaagggatcgatcttccatcgtgtgatccctaacttcatgtgccagggcggtgactttactgccggaaacggtacaggaggcgagtcgatctacggcgccaagttcgcagacgagaacttcgtgaagaagcacaccggccccggcattctgtccatggccaacgccggtcctggaaccaacggatctcagttcttcatctgcacaacgaagacggagtggctcgacggcaagcacgtggtcttcggacaggtcgtcgaaggcctggacgtggtgaaggatatcgagaaggtcggatccggatccggcaagaccgcgaggccggtcgccatcgctgactgtggtcaactctcctag

SEQ ID NO: 1269 - protein, 172 aa, Phaseolus vulgaris
MPNPKVFFDMTIGGQPAGRIVFELYADVTPRTAENFRALCTGEKGVGRSGKPVHFKGSIFHRVIPNFMCQGGDFTAGNGTGGESIYGAKFADENFVKKHTGPGILSMANAGPGTNGSQFFICTTKTEWLDGKHVVFGQVVEGLDVVKDIEKVGSGSGKTARPVAIADCGQLS

SEQ ID NO: 1270 - DNA, 975 bp, Haemonchus contortus
  CDS (1)..(975)
atggctgcgtcgaattttccccacaacaagaagagaacattgtacgttggtggatttggcgaggaggttacagagaaggttttgatggcagctttcattacgttcggagatattgtcgccatttcaattccaatggattatgaaacagggaaacaccgaggattcggcttcgtggaattcgaattagcagaagatgcagcggctgctatagataatatgaacgaaagcgaactgttcggcaggacaattaggtgtaatttcgcccgccctcctaaagccacagagcggtcctctcgtccagtttgggcagatgacgagtggctcaagcgctatggaaaaggtagtggcatagcagatgcaaaggaaagcaatggctcagcatcaacagcaaaaggactgccacgagtttatttgggtgtcaagatcggcataagatatattggacgaatagtaatcgagttacgctcggatgttgtacctaggacagcagaaaatttccggtgtttgtgtacaggcgagaagggatttggttatgaaggttcttcctttcatcgtatcattccgaaattcatgcttcaaggaggagattttacgaaaggtgatggcacaggaggaaagtcaatatatggtcctaagttcgaggatgaaaatttcaagctgaaacatctaatgcctggtactgtgtcgatggcgaactgtggtcccaacacaaatggatcgcaatttttcatatgtgctgaaaagacggattggctagatggaaagcatgttgtattcggacacgtagtggaaggaatgaatgttgtccgacaagttgagcagcagggtacaccctctggaaaaccacaaatggttgtgaaaatagtggagtgcggtgaactcgatccagtccctcaaacagagccgcaagagaacgaagaaaattcagatcctcagacacctatggatgtagaacctcaaaaagagacagcgtaa

SEQ ID NO: 1271 - protein, 324 aa, Haemonchus contortus
MAASNFPHNKKRTLYVGGFGEEVTEKVLMAAFITFGDIVAISIPMDYETGKHRGFGFVEFELAEDAAAAIDNMNESELFGRTIRCNFARPPKATERSSRPVWADDEWLKRYGKGSGIADAKESNGSASTAKGLPRVYLGVKIGIRYIGRIVIELRSDVVPRTAENFRCLCTGEKGFGYEGSSFHRIIPKFMLQGGDFTKGDGTGGKSIYGPKFEDENFKLKHLMPGTVSMANCGPNTNGSQFFICAEKTDWLDGKHVVFGHVVEGMNVVRQVEQQGTPSGKPQMVVKIVECGELDPVPQTEPQENEENSDPQTPMDVEPQKETA

SEQ ID NO: 1272 - DNA, 498 bp, Ixodes scapularis
  CDS (1)..(498)
atgtccaacccccgtgtgtttttcgacgtgactgctgatggagctcccctcggcaggattgtgatggagcttcgcccccgacgtcgtccccaaactgccgaaaacttccgcgccctgtgcaccggcgagaagggcttcggttacaagggcagcattttccaccgagtcatccccaacttcatgtgccagggaggagacttcacccggcacaacggcacgggcggcaagtccatctacggcgagaagttcgaagatgaaaacttcatcctgaagcacaccggaccaggaatcctttccatggctaatgctggccccaacaccaatggatcccagttctttatcacgactgtgaagactgcctggctcgacggcaagcatgtggtctttggggccgtagtggaaggccaggacgtctacaagcagatggagtctttcggcagccagaacggcaagacctccaaaaagttggccatcgcagattgcggtcagctgcaatag

SEQ ID NO: 1273 - protein, 165 aa, Ixodes scapularis
MSNPRVFFDVTADGAPLGRIVMELRPRRRPQTAENFRALCTGEKGFGYKGSIFHRVIPNFMCQGGDFTRHNGTGGKSIYGEKFEDENFILKHTGPGILSMANAGPNTNGSQFFITTVKTAWLDGKHVVFGAVVEGQDVYKQMESFGSQNGKTSKKLAIADCGQLQ

SEQ ID NO: 1274 - DNA, 519 bp, Cucumis sativus
  CDS (1)..(519)
atgccaaaccctaaagttttcttcgacatgacaatcggcggcacaccggccggccggatcatcatggagctctacgccgatgtcactccccgcaccgccgagaacttccgtgcactctgcactggtgagaagggagtcggcaaaggcggcaaaccccttcattacaaaggatcctccttccaccgtgtgatccctaatttcatgtgccagggaggtgatttcaccgccggaaatggtacaggaggtgaatcaatctacggagccaagttcgccgatgagaacttcatcaagaagcacaccggccctggtattctatccatggcgaatgctggacctggaaccaacggatctcagttcttcatttgcaccgctaagaccgattggctcgatggtaagcacgttgtgttcggtcaagtcgttgagggtatgaatgtggtaaaagacgttgagaaagtgggttcgagctctggaaggacctcgaaaccggttgtcattgccgattgtggccagctctcttag

SEQ ID NO: 1275 - protein, 172 aa, Cucumis sativus
MPNPKVFFDMTIGGTPAGRIIMELYADVTPRTAENFRALCTGEKGVGKGGKPLHYKGSSFHRVIPNFMCQGGDFTAGNGTGGESIYGAKFADENFIKKHTGPGILSMANAGPGTNGSQFFICTAKTDWLDGKHVVFGQVVEGMNVVKDVEKVGSSSGRTSKPVVIADCGQLS

SEQ ID NO: 1276 - DNA, 498 bp, Bombyx mori
  CDS (1)..(498)
atgtctctaccacgagtattcttcgacgttactgttgacgatgccccactgggaaaaattgttattgagctgagaagtgacgtcactcccaagacgtgtgaaaacttccgtgccctgtgcactggcgagaaaggcttcggttacaagggctctattttccatcgtgtcatccccaatttcatgctgcaaggaggggacttcaccaaccataacggcactgggggaaagtccatctacggcaataagtttgaagacgagaatttcacccttaagcacactggacctggcgtcctctccatggctaatgccggtgctgatactaatggttcccagttcttcatcaccactgtcaagacctcctggctggatggcagacatgttgtctttgggaatgttgttgaaggcatggaagttgtcaagcagattgagacctttggcagccagtctgggaagacctctaagagaatcgttatcaaagactgtggtcagattgcctaa

SEQ ID NO: 1277 - protein, 165 aa, Bombyx mori
MSLPRVFFDVTVDDAPLGKIVIELRSDVTPKTCENFRALCTGEKGFGYKGSIFHRVIPNFMLQGGDFTNHNGTGGKSIYGNKFEDENFTLKHTGPGVLSMANAGADTNGSQFFITTVKTSWLDGRHVVFGNVVEGMEVVKQIETFGSQSGKTSKRIVIKDCGQIA

SEQ ID NO: 1278 - DNA, 642 bp, Schistosoma japonicum
  CDS (1)..(642)
atggccgtgttaagagtgttgtgcggacttctgctggtttccattttgtttcttgggtttgtcctcagtgaagcaaatgggccgaaagtaacagaaaaagtgttctttgatattgaagttgataaacaacctctcggtcgaataatcatcggattatttggtaaaacagtaccgaagactgtggaaaatttcaagcaactttctattggtacaacgttgaaagatggtcgaactgccgcatataaaggaagcacttttcatcgtgtcataaagtcatttatgatacagggtggtgattttacaaatcatgatggaactggcggctttagtatttatggtgagcggtttcccgatgagaatttcaaactaaaacatgttggtgcagggtggctgtcgatggctaatgctggtcctaacacaaatggagcccaatttttcatcacgactacaaaaaccccgtggttggatggaaaacatgttgttttcggaaaagttgtagaagggatgagtgttgttagacaaattgaaaacatgcagacggactctagagataggcctgttaaaagtgtgaagatagcaaactgtggacacattcctgttgatgtaccgttttcagtatccaacactgacgctgttgaatga

SEQ ID NO: 1279 - protein, 213 aa, Schistosoma japonicum
MAVLRVLCGLLLVSILFLGFVLSEANGPKVTEKVFFDIEVDKQPLGRIIIGLFGKTVPKTVENFKQLSIGTTLKDGRTAAYKGSTFHRVIKSFMIQGGDFTNHDGTGGFSIYGERFPDENFKLKHVGAGWLSMANAGPNTNGAQFFITTTKTPWLDGKHVVFGKVVEGMSVVRQIENMQTDSRDRPVKSVKIANCGHIPVDVPFSVSNTDAVE

SEQ ID NO: 1280 - DNA, 495 bp, Schistosoma japonicum
  CDS (1)..(495)
atgtcaacgtttcccagggtgttcttcgatattacgattggtggacaaccgtccggaaaaattgtatttgagctttttgacaacgttccgaagactgcagagaacttccgcgcattgtgcacaggggaaaagggttatggatacaaaaactctacttttcatcggatcattccaggcttcatgtgtcaaggcggggattttactaatcataacggcactggtggcaaaagcatctatggaaacaagtttgaagacgagagttttgacaataagcacgataaaaaatttctactttctatggccaatgctggacccaacaccaatggctcacaatttttcatcactactgcagtctgttcttggctagacggcaaacatgttgtctttggtcgagttgttgagggtgaagatgtggttacaaagatggaaaaagttggatcacagagtgggagaacaaaccaagaagtcaaaatagttaattgcgggcaatgctaa

SEQ ID NO: 1281 - protein, 164 aa, Schistosoma japonicum
MSTFPRVFFDITIGGQPSGKIVFELFDNVPKTAENFRALCTGEKGYGYKNSTFHRIIPGFMCQGGDFTNHNGTGGKSIYGNKFEDESFDNKHDKKFLLSMANAGPNTNGSQFFITTAVCSWLDGKHVVFGRVVEGEDVVTKMEKVGSQSGRTNQEVKIVNCGQC

SEQ ID NO: 1282 - DNA, 495 bp, Crassostrea gigas
  CDS (1)..(495)
atggggaaaccacaagtctttttcgacatttccatcggtgggcaacccgccggtaggattgtcatggaattggaagctgacgttgttccaaagacggcagaaaatttccgtgctctttgcacaggagagaaaggctttggctacaaaggcagtggattccacagagttattccccagttcatgtgccagggtggagacttcacaaaccacaatggcactggaggaaaaagcatctatggaaacaagttccctgatgagaacttccagctgaagccccttggaccaggaactctttccatggccaatgctggacccaacaccaatggaagccagttcttcatttgcacagaaaagacatcttggctcgatggcaaacacgttgtgttcggaagagtgaccgatggcatgaatgtcgtcaaagcgatggaagcaaccggatcgcagagtggaaagccatccaagccaatcaagatcgaaaactgtggtcaactttaa

SEQ ID NO: 1283 - protein, 164 aa, Crassostrea gigas
MGKPQVFFDISIGGQPAGRIVMELEADVVPKTAENFRALCTGEKGFGYKGSGFHRVIPQFMCQGGDFTNHNGTGGKSIYGNKFPDENFQLKPLGPGTLSMANAGPNTNGSQFFICTEKTSWLDGKHVVFGRVTDGMNVVKAMEATGSQSGKPSKPIKIENCGQL

SEQ ID NO: 1284 - DNA, 586 bp, Drosophila melanogaster
  CDS (2)..(586)
cttgaaagtcgttacttttttttatcataaagctgacaccaccaagttatccgatctggcttttttccgaaaattttcggcatctgcgaagatgtcgttgccacgcgtttacttcgatatagccgcaggaggtgagaagttaggtagaattgtgatggaactacgttcggatgtggtgcccaagacggcggagaatttccgggccctctgcaccggagagaaggggtacggctacaagggatcaccattccaccgcgtcatcccgaatttcatgtgtcagggcggtgatttcactaatcaaaacggaactggaggacgctccatttatggaaacaagtttcccgatgagaatttcgagctaaagcataccggagctggtgtactttcgatggccaatgctggggccaataccaatggatctcagtttttcatttgcaccgggaaaaccacatggctggataataagcatgtcgtgttcggcaaggtcgttgagggaatggatatcgtccagaaggtagaatcttacggttcacaagatgggaagaccagcaagaaagtaattatcgaagactgcggagccctctga

SEQ ID NO: 1285 - protein, 194 aa, Drosophila melanogaster
LKVVTFFYHKADTTKLSDLAFFRKFSASAKMSLPRVYFDIAAGGEKLGRIVMELRSDVVPKTAENFRALCTGEKGYGYKGSPFHRVIPNFMCQGGDFTNQNGTGGRSIYGNKFPDENFELKHTGAGVLSMANAGANTNGSQFFICTGKTTWLDNKHVVFGKVVEGMDIVQKVESYGSQDGKTSKKVIIEDCGAL

SEQ ID NO: 1286 - DNA, 525 bp, Codonopsis lanceolata
  CDS (1)..(525)
atgtcgaaccccaaagttttctttgacatagtgattggaaagatgaaagctggccgtattgtcatggaactatttgcagattctaccccaaaaactgctgaaaacttccgtgccctctgcacaggggagaaggggattggattatccgggaagcccttacattacaagggctctattttccaccgcattatcccaaacttcatgtgtcaaggtggagatttcactaggtttaatgggacaggaggtgaatccatctatggagcgaagtttgcggatgagaacttcaagaacaaacatacaggaccaggtattctatctatggctaattctggaccaaatactaatgggtctcagttcttcatatgtactgagaagacatcgtggctcgatggaaagcatgttgtctttggaaaggttgttgatggctatagcgttgtcaaagagatggagaaagttgggtcagatggtgggaattctaaatcgacagttgagattgaagaatgtggccagattcaagagaattag

SEQ ID NO: 1287 - protein, 174 aa, Codonopsis lanceolata
MSNPKVFFDIVIGKMKAGRIVMELFADSTPKTAENFRALCTGEKGIGLSGKPLHYKGSIFHRIIPNFMCQGGDFTRFNGTGGESIYGAKFADENFKNKHTGPGILSMANSGPNTNGSQFFICTEKTSWLDGKHVVFGKVVDGYSVVKEMEKVGSDGGNSKSTVEIEECGQIQEN

SEQ ID NO: 1288 - DNA, 495 bp, Paxillus involutus
  CDS (1)..(495)
atggccaacgttttctttgacatcctgatcaacaaccagcccgctggccgcatcgtcttcaggctctacgaccagcaggtgcccataactaccaaaaacttccgtgaactcgccactggccaaaatggcttcggttacgagggatcctctttccaccgtgtgattccccagttcatgctccagggtggtgatttcactaagggcaacggtactggaggccaatcgatctacggagaaaagttcgctgatgagaagccaggcttggccctgaagcacagcaagcctggtttgctttccatggctaacgctggcaagaacacgaacggatcgcagttcttcatcaccactgttgttacctcttggcttgacggtgttcacgtcgtgtttggtgaagttgttgagggttttgatgtcgtcaaggagattgaggcgcgcggaaccgcgtctggaaagcccaatgctaacatcaaaatcgctaaaagtggtaccgtctga

SEQ ID NO: 1289 - protein, 164 aa, Paxillus involutus
MANVFFDILINNQPAGRIVFRLYDQQVPITTKNFRELATGQNGFGYEGSSFHRVIPQFMLQGGDFTKGNGTGGQSIYGEKFADEKPGLALKHSKPGLLSMANAGKNTNGSQFFITTVVTSWLDGVHVVFGEVVEGFDVVKEIEARGTASGKPNANIKIAKSGTV

SEQ ID NO: 1290 - DNA, 519 bp, Pinus halepensis
  CDS (1)..(519)
atgccgaacccaaaggttttctttgatatgcaggtcggcggtgccccagccggccggatcgtgatggagctctatgcggatgtggtgccgaagacggctgagaacttccgcgcgttgtgtaccggcgagaaaggcaccggccgctcaggcaagcctctgcacttcaagggttcgtcgttccaccgcgtgatcccagggttcatgtgccagggcggtgacttcacaaggggcaacggtaccggtggagagtctatctacggcgagaagtttgccgatgagaactttgtaaagaagcacacggggcctggcatcctctccatggccaacgccggccctaacactaacggctcgcagttcttcatctgtaccgcacagacctcgtggctggatggcaagcatgtcgtatttggtcaagttgtagagggcttggaggtcgtgcgcgagatcgagaaggttggatctggatctggcagaacttcaaagccggttgtcattgccgactctggacagctcgcttga

SEQ ID NO: 1291 - protein, 172 aa, Pinus halepensis
MPNPKVFFDMQVGGAPAGRIVMELYADVVPKTAENFRALCTGEKGTGRSGKPLHFKGSSFHRVIPGFMCQGGDFTRGNGTGGESIYGEKFADENFVKKHTGPGILSMANAGPNTNGSQFFICTAQTSWLDGKHVVFGQVVEGLEVVREIEKVGSGSGRTSKPVVIADSGQLA

SEQ ID NO: 1292 - DNA, 519 bp, Populus trichocarpa
  CDS (1)..(519)
atggcaaaccctaaagtctacttggacatgacaatcggcggcgtcccggccggccggatcgtgattgagctgttcgcggacacaactccacgaaccgcagagaacttcagggctctttgcactggagagaaaggcaaaggccgaagcggcaagcctttacactacaaaggctccacttttcatcgagtgatccctggattcatgtgtcaaggaggggattttactgcggggaatggaaccggaggagaatcaatctatggagcgaaattcgctgatgagaatttcataaagaaacatactgggcctggaattctatctatggcaaattctgggcctggcactaatgggtctcagtttttcatatgtacagataagactgaatggcttgatgggaaacatgtggtgttcggaagagttgtggagggtatgaatgttgtcaaggctatagagaaggttggatctagtggtggaaggacctcccggcctgttgttgttgctgattgcggccagctttcttga

SEQ ID NO: 1293 - protein, 172 aa, Populus trichocarpa
MANPKVYLDMTIGGVPAGRIVIELFADTTPRTAENFRALCTGEKGKGRSGKPLHYKGSTFHRVIPGFMCQGGDFTAGNGTGGESIYGAKFADENFIKKHTGPGILSMANSGPGTNGSQFFICTDKTEWLDGKHVVFGRVVEGMNVVKAIEKVGSSGGRTSRPVVVADCGQLS

SEQ ID NO: 1294 - DNA, 522 bp, Thellungiella halophila
  CDS (1)..(522)
atggcggcaaaccctaaagttttcttcgacatgaccgtcggcggatcaccggccggccgaatcgtgatggagctttacgccgacacaaccccagagacggcggagaatttcagagctctctgcaccggcgagaaaggaatgggaaaatctgggaagccactccactacaagggatcagctttccaccgtgtgatccccaaattcatgtgtcagggaggagatttcaccaaaggaaacggaaccggaggcgagtcgatctacggcatgaaattcaaggacgagaacttcaccaagaagcacaccggtccaggtattctctccatggctaacgctggtgccaacaccaatggatctcagtttttcatctgtaccgagaagacgtcgtggctcgacggtaagcatgtcgtgtttggtcaagtcattgaaggtatggatgttgttagggccattgagaaggttggatctgactctggaaagacctccaagcctgttgtggttgctgattgtggtcagatttcttag

SEQ ID NO: 1295 - protein, 173 aa, Thellungiella halophila
MAANPKVFFDMTVGGSPAGRIVMELYADTTPETAENFRALCTGEKGMGKSGKPLHYKGSAFHRVIPKFMCQGGDFTKGNGTGGESIYGMKFKDENFTKKHTGPGILSMANAGANTNGSQFFICTEKTSWLDGKHVVFGQVIEGMDVVRAIEKVGSDSGKTSKPVVVADCGQIS

SEQ ID NO: 1296 - DNA, 495 bp, Chlamys farreri
  CDS (1)..(495)
atgtctaatccacgagtttttttcgatgtgacagccaatggcaagcctgtggggagaattatgatggagttgcgtggtgatgtcgtgcctaaaacagcagaaaattttagggccttgtgtacaggtgaaaaaggatttggatataaagggtctcctttccatcgagtcataccaagtttcatgtgtcaaggaggcgatttcacaagacaaaatggaactggtggaaagagcatctatggagaaaagttcgcagatgaaaacttcacgctcaagcatactggtccaggagttctgtctatggccaatgctggacccaacacaaatgggtcacagtttttcctttgcacagcaaggactgaatggttggatggcaaacatgtggtgttcggatctgttgttgaaggaatggatgtagtgaagaagattgaaagttatggctcccaaagtgggaaaaccagtgaaaaaataattgttgcggactgtggccagctttaa

SEQ ID NO: 1297 - protein, 164 aa, Chlamys farreri
MSNPRVFFDVTANGKPVGRIMMELRGDVVPKTAENFRALCTGEKGFGYKGSPFHRVIPSFMCQGGDFTRQNGTGGKSIYGEKFADENFTLKHTGPGVLSMANAGPNTNGSQFFLCTARTEWLDGKHVVFGSVVEGMDVVKKIESYGSQSGKTSEKIIVADCGQL

SEQ ID NO: 1298 - DNA, 495 bp, Branchiostoma belcheri tsingtauense
  CDS (1)..(495)
atggcgttaccacgggtctttttcgacattaccgctggtggtcagcctctggggcgtgttgtcatggagcttcgagctgatgttgcccccaagacagcagagaacttccgtgccctgtgcactggggagaagagcatggggtacaaggggtcgaccttccaccgcgtcattcctggcttcatgtgccagggaggtgacttcatcaggggagatggcaccggcggcaagagcatctacggcaataagtttgcagatgagaacttccagctgaagcacaccggcaaaggtatcctgtccatggctaatgctggccccaacaccaacggttcacaattcttcctgtgcactgctaagaccgactggctggatggcaagcacgtcgtgttcgggagtgtcgtggaaggaatggatgtggtgacgaaggtcgagagctatggcagtggcaatggcaagacctccgcaaagattgtcatcgctaacagcgggcagctgtaa

SEQ ID NO: 1299 - protein, 164 aa, Branchiostoma belcheri tsingtauense
MALPRVFFDITAGGQPLGRVVMELRADVAPKTAENFRALCTGEKSMGYKGSTFHRVIPGFMCQGGDFIRGDGTGGKSIYGNKFADENFQLKHTGKGILSMANAGPNTNGSQFFLCTAKTDWLDGKHVVFGSVVEGMDVVTKVESYGSGNGKTSAKIVIANSGQL

SEQ ID NO: 1300 - DNA, 672 bp, Botryotinia fuckeliana
  CDS (1)..(672)
atgctattcgtgccccgcactgcttctgcgttgaaaagcacttcgctgcccctccttcgcaacaccttcatcaacaactctttcacctccatctcttcaagacaatttcacgcatctaaatcaaatatggccatcaagacttacttcgatgttacctgggagggtccagtcctcgacgcttccggaaagcctacctctactgtccaagagcaagccggaagaatcactttcaacctttacgatgatgtagtcccaaagaccgccgagaacttccgtgctctctgcactggtgagaagggtttcggatatgctggctcttccttccacagaatcattcctcaattcatgctccaaggaggtgacttcacccgtggcaacggtaccggtggaaagtcaatctacggtgagaagttcgccgatgagaacttcgagcgaaagcacacccgtccaggtctcctctccatggccaacgctggaccaaacaccaacggatcccaattcttcgttaccaccgttgttaccagctggttggatggcaagcacgtcgtcttcggtgaggttgccgatgatgagtccttgatgattgtcaaggctctcgaggctaccggatccggcagtggaaaggttcaatacaacaagaagccaaccattgtcaagtctggcgagctataa

SEQ ID NO: 1301 - protein, 223 aa, Botryotinia fuckeliana
MLFVPRTASALKSTSLPLLRNTFINNSFTSISSRQFHASKSNMAIKTYFDVTWEGPVLDASGKPTSTVQEQAGRITFNLYDDVVPKTAENFRALCTGEKGFGYAGSSFHRIIPQFMLQGGDFTRGNGTGGKSIYGEKFADENFERKHTRPGLLSMANAGPNTNGSQFFVTTVVTSWLDGKHVVFGEVADDESLMIVKALEATGSGSGKVQYNKKPTIVKSGEL

SEQ ID NO: 1302 - DNA, 519 bp, Kandelia candel
  CDS (1)..(519)
atggccaaccctagggtctacttcgacatgtccgtcggcggttctcccgccggcaggatcgtgatggagctcttcgccgatgtcgtaccccgcaccactgagaacttccgcgccctctgtaccggcgagaagggaaaagggaggagtgggaagcctctccactataagggatctaccttccaccttgtaatccccaacttcatgtgccagggcggagacttcaccgccggaaacgaaaccggaggcgagtcgatctacggatcgaagtttgccgatgagaattttgtgaagaagcacaccggccccggcatcctatccatggcaaatgctggccctgggaccaacgggtctcagttcttcatttgcacagccaagactgagtggcttgacgggaagcacgtggtgtttgggcaagttgtgtacgggatggacgtggtgaaagccatcgagaaggtggggtccggaaatggtaggacctctaagccggtcgtaatcgccgattgcgggcagctttcctag

SEQ ID NO: 1303 - protein, 172 aa, Kandelia candel
MANPRVYFDMSVGGSPAGRIVMELFADVVPRTTENFRALCTGEKGKGRSGKPLHYKGSTFHLVIPNFMCQGGDFTAGNETGGESIYGSKFADENFVKKHTGPGILSMANAGPGTNGSQFFICTAKTEWLDGKHVVFGQVVYGMDVVKAIEKVGSGNGRTSKPVVIADCGQLS

SEQ ID NO: 1304 - DNA, 489 bp, Malassezia pachydermatis
  CDS (1)..(489)
atgtctaacgttttcttcgacattaccaagaacggctcgcctctcgaccccatcaagttcaagctctttgacgacgtcgtgccgaagaccaccgccaacttccgtgctctctgcactggcgagaagggcttcggctacgccggctcgcacttccaccgtgtgatcccgaacttcatgctccagggtggtgacttcactgccggcaacggtactggtggcaagtcgatctacggtgccaagttcgccgacgagaacttccagctgaagcactcgaagccgggtctgctttcgatggccaacgctggcccgaacaccaacggttcgcagttcttcattaccactgtggtcgccccgtggctcgatggcaagcacgtcgtcttcggtgaggtcatcgagggtatggacgttgtcaaggccatcgaggccgagggcagcaacagcggcaagaccagcagccgcattgagatcgccaagtgcggtgcctgctaa

SEQ ID NO: 1305 - protein, 162 aa, Malassezia pachydermatis
MSNVFFDITKNGSPLDPIKFKLFDDVVPKTTANFRALCTGEKGFGYAGSHFHRVIPNFMLQGGDFTAGNGTGGKSIYGAKFADENFQLKHSKPGLLSMANAGPNTNGSQFFITTVVAPWLDGKHVVFGEVIEGMDVVKAIEAEGSNSGKTSSRIEIAKCGAC

SEQ ID NO: 1306 - DNA, 543 bp, Tolypocladium inflatum
  CDS (1)..(543)
atgggcaacaaagtcttcttcgacattgagtgggagggccccgtcatgcagggcggcaagcctacctctaccgtcaaagagcagtctggtcgcatcaacttcaagctgtacgatgacgtcgtccccaagaccgccgagaacttccgcgctctctgcaccggcgagaagggcttcggctacgagggctcgtccttccaccgtatcatccccgagttcatgctccagggcggcgacttcacccgcggtaacggcactggcggcaagtccatctacggcgagaagtttgccgatgagaacggccagctgaagcacgaccgccccggtctgctgtccatggctaacgctggccccaacaccaacggctcccagttcttcgtcaccaccgtcgtcacctcgtggctcaacggccgccacgtcgtcttcggcgaggtcgctgaccaggagtccctggacgtcgtcaaggcccttgaggccactggctctggtagcggcgctgtcaagtacaacaagcgcgccaccattgtcaagtctggcgagctgtaa

SEQ ID NO: 1307 - protein, 180 aa, Tolypocladium inflatum
MGNKVFFDIEWEGPVMQGGKPTSTVKEQSGRINFKLYDDVVPKTAENFRALCTGEKGFGYEGSSFHRIIPEFMLQGGDFTRGNGTGGKSIYGEKFADENGQLKHDRPGLLSMANAGPNTNGSQFFVTTVVTSWLNGRHVVFGEVADQESLDVVKALEATGSGSGAVKYNKRATIVKSGEL

SEQ ID NO: 1308 - DNA, 519 bp, Populus tremuloides
  CDS (1)..(519)
atggcaaaccctaaagtctacttcgatatgacaatcggcggcgccccagccggccggatcgtgatggagctgttcgcggacacaactccacgaaccgcagagaacttcagggctctttgcactggagagaaaggcaaagtccgaagcggcaagcctttacactacaaaggctcgacttttcatcgagtgatccctggattcatgtgtcaaggaggggattttactgaggggaatggaaccggaggagaatcaatctatggagcgaaattcgctgatgagaatttcgtaaagaaacatactgggcctggaattctatctatggctaattctgggcctggcactaatgggtctcagtttttcatatgtacagataagactgaatggcttgatgggaaacatgtggtgttcggaagagttgtggagggtatgaatgttgtcaaggctatagagaaggttggatctagtggtggaaggacctccaggcctgttgttgttgctgattgtggtcagctttcttga

SEQ ID NO: 1309 - protein, 172 aa, Populus tremuloides
MANPKVYFDMTIGGAPAGRIVMELFADTTPRTAENFRALCTGEKGKVRSGKPLHYKGSTFHRVIPGFMCQGGDFTEGNGTGGESIYGAKFADENFVKKHTGPGILSMANSGPGTNGSQFFICTDKTEWLDGKHVVFGRVVEGMNVVKAIEKVGSSGGRTSRPVVVADCGQLS

SEQ ID NO: 1310 - DNA, 495 bp, Beauveria bassiana
  CDS (1)..(495)
atggctaaccccaaggtctttttcgaagtctctgccaacggagagcccctcggcaagatcgtcatggagctccgcaaggacgttgttcccaagacggccgagaacttccgcgctctctgcaccggcgagaagggatatggattcaagggctcttctttccaccgcgtcatccccggcttcatgtgccagggcggtgatttcacgaaccataacggcactggtggcaagtccatctacggcgagaagttcgctgatgagaacttccagctgaagcacactggccccggtattctctccatggccaacgccggccccaacaccaacggctcccagttcttcctctgcactgccaccactggctggctggacggaaagcacgtcgtgtttggcaaggtcgtcgagggcctcgacgttgtcaagaaggttgagaagttcggtagcgactcgggaaagacctccaagaagattgtcattgacgcctctggagagtgctag

SEQ ID NO: 1311 - protein, 164 aa, Beauveria bassiana
MANPKVFFEVSANGEPLGKIVMELRKDVVPKTAENFRALCTGEKGYGFKGSSFHRVIPGFMCQGGDFTNHNGTGGKSIYGEKFADENFQLKHTGPGILSMANAGPNTNGSQFFLCTATTGWLDGKHVVFGKVVEGLDVVKKVEKFGSDSGKTSKKIVIDASGEC

SEQ ID NO: 1312 - DNA, 522 bp, Betula verrucosa
  CDS (1)..(522)
atggcgtcaaaccctaaggtcttcttcgacatggaggtcggtggccagcccgttgggcggatcgtgatggagctctacgccgacaccactccccgcacggccgagaacttccgggccctctgcaccggtgagaagggcaacggccgctccggcaagcccctccactacaagaaatcgtccttccacagggtgatccccgggttcatgtgccaggggggcgacttcactgccggaaacggcaccggtggcgagtccatctacggcgccaagttcgccgatgagaacttcatcaagaagcacaccggccccggcatcctctccatggctaatgccggccccggcaccaatggatctcagttcttcatctgtaccgccaagaccgagtggctcgacggcaagcacgtggtgttcggccaggtcgtggagggtctggacatcgtgaaagccatcgagaaggtcgggtccagctccggcaggacttccaagcccgtggtcgtcgccgactgtggtcaactctcttag

SEQ ID NO: 1313 - protein, 173 aa, Betula verrucosa
MASNPKVFFDMEVGGQPVGRIVMELYADTTPRTAENFRALCTGEKGNGRSGKPLHYKKSSFHRVIPGFMCQGGDFTAGNGTGGESIYGAKFADENFIKKHTGPGILSMANAGPGTNGSQFFICTAKTEWLDGKHVVFGQVVEGLDIVKAIEKVGSSSGRTSKPVVVADCGQLS

SEQ ID NO: 1314 - DNA, 522 bp, Ricinus communis
  CDS (1)..(522)
atggcagcaaaccctaaggtcttctttgacatgactgtcggcggtgctccggcgggccgcatagtgatggagctgttcgcagacacaacaccgcgaacggcggagaatttcagagctctgtgcaccggagaaaaaggagtcggacgcagcgggaagcctttacactacaagggatcgagtttccatagagtgatacctggattcatgtgccagggtggtgatttcaccgccgggaacggaacaggtggagaatcgatctatggagctaagttcgcagatgagaattttattaagaagcacacagggccagggattttgtcgatggctaatgcggggccagggactaatggatcgcagttttttatatgtacggctaagacggagtggcttgatggaaagcatgttgtgttcgggagagtcgtggaagggatggatattgtgaaagctattgagaaagttggatcttcttctggaaggacctccaagcctgttcagattgctgattgtggccagctttcttga

SEQ ID NO: 1315 - protein, 173 aa, Ricinus communis
MAANPKVFFDMTVGGAPAGRIVMELFADTTPRTAENFRALCTGEKGVGRSGKPLHYKGSSFHRVIPGFMCQGGDFTAGNGTGGESIYGAKFADENFIKKHTGPGILSMANAGPGTNGSQFFICTAKTEWLDGKHVVFGRVVEGMDIVKAIEKVGSSSGRTSKPVQIADCGQLS

SEQ ID NO: 1316 - DNA, 519 bp, Picea abies
  CDS (1)..(519)
atgtcgaacccaaaggttttctttgacatgcaggtcggcggcgccccagccggccggatcgtgatggagctctacgccgatgtggtgccgaagacggccgagaactttcgtgcgctgtgcaccggcgagagaggtaccggccgctctggcaagcccctgcacttcaagagctcgacattccaccgcgtgatcccagggttcatgtgccaaggcggcgacttcacgcgtggtaacggtaccggcggggagtcgatctacggcgagaagtttgccgacgagaacttcgcaagaaagcacacgggtcccggcatcctctccatggccaacgcgggccctaacactaacggctcccagttctttatctgcactgcacagacctcgtggctggacggcaagcacgtcgttttcgggcaagtcgttgagggcctggatgtggtgcgcgagatcgagaaagttggatccggatctggcaggacttcaaagccagtttccattgccgactgtgggcaactctcttga

SEQ ID NO: 1317 - protein, 172 aa, Picea abies
MSNPKVFFDMQVGGAPAGRIVMELYADVVPKTAENFRALCTGERGTGRSGKPLHFKSSTFHRVIPGFMCQGGDFTRGNGTGGESIYGEKFADENFARKHTGPGILSMANAGPNTNGSQFFICTAQTSWLDGKHVVFGQVVEGLDVVREIEKVGSGSGRTSKPVSIADCGQLS

SEQ ID NO: 1318 - DNA, 519 bp, Glycine max
  CDS (1)..(519)
atgcctaaccctaaggtcttcttcgacatgaccatcggcggtcaatctgctggccgcatcgtgatggagctctacgccgacgtcactccccgcaccgccgagaacttccgcgcgctttgcaccggcgagaagggcgtagggcggagcggcaagcccctccactacaagggctcgtccttccaccgcgtgatcccgagtttcatgtgtcagggtggcgacttcaccgccggaaacggaaccggcggcgagtcgatttatggcgccaagttcgccgacgagaacttcgtgaagaagcacaccggtcccggcatcctctccatggcgaacgccggtcccggaaccaacggatctcagttcttcatttgcacggagaagacagagtggctcgacggaaagcatgtcgtgttcggacaggtcatcgaaggattgaacgttgtcaaggacatcgagaaggtcggatccggctccggcaggacctccaagcccgttgtcatcgccaactgcggtcaaccctcttag

SEQ ID NO: 1319 - protein, 172 aa, Glycine max
MPNPKVFFDMTIGGQSAGRIVMELYADVTPRTAENFRALCTGEKGVGRSGKPLHYKGSSFHRVIPSFMCQGGDFTAGNGTGGESIYGAKFADENFVKKHTGPGILSMANAGPGTNGSQFFICTEKTEWLDGKHVVFGQVIEGLNVVKDIEKVGSGSGRTSKPVVIANCGQPS

SEQ ID NO: 1320 - DNA, 519 bp, Vigna radiata
  CDS (1)..(519)
atgccgaaccctaaggtcttcttcgacatgaccatcggcggccaacccgccggcaagatcgtgtttgagctctttgccgacaccactccccgcaccgccgagaacttccgcgctctctgcaccggtgagaagggagtcggtaggagcggcaagccgctccactacaagggctcgatcttccaccgtgtgatcccgaacttcatgtgccaaggaggcgacttcaccgccggaaacggcacaggcggcgagtcgatctacggcgccaagttcgccgacgagaacttcgtgaagaagcacaccggtcctggcattctctccatggcgaacgccggtcctggaaccaacggatctcagttcttcatctgcacaacgaagacggagtggctcgacggcaagcacgtggtgttcggacaggtcgttgagggactgaacgtggtgaaggagatcgagaaggtcggatccagctccggcaagacctcgaggccggtcgccatcgctgactgtggtcaactctcctag

SEQ ID NO: 1321 - protein, 172 aa, Vigna radiata
MPNPKVFFDMTIGGQPAGKIVFELFADTTPRTAENFRALCTGEKGVGRSGKPLHYKGSIFHRVIPNFMCQGGDFTAGNGTGGESIYGAKFADENFVKKHTGPGILSMANAGPGTNGSQFFICTTKTEWLDGKHVVFGQVVEGLNVVKEIEKVGSSSGKTSRPVAIADCGQLS

SEQ ID NO: 1322 - DNA, 516 bp, Triticum aestivum
  CDS (1)..(516)
atggccaacccgagggtgttcttcgacatgaccgtcggcggcgcgccggccgggcgcatcgtgatggagctgtacaaggacgcggtgccgcggacggtggagaacttccgcgcgctctgcaccggcgagaagggcgtcggcaagagcggcaagccactgcactacaagggcagctcgttccaccgcgtgatccccgacttcatgtgccagggcggcgacttcaccaagggcaacggcaccggcggcgagtccatctacggcgagaagttcgccgacgagaagttcgtccacaagcacaccaagcccgggatcctctccatggccaacgcgggccccaacaccaacggctcccagttcttcatctgcaccgtcccctgcaattggctcgacggcaagcacgtggtcttcggcgaggtcgtcgagggcatggacgtcgtcaagaacatcgagaaggtgggctcccgcagcggcacctgctccaagcaagtcgtcatcgccgactgcggccagctctag

SEQ ID NO: 1323 - protein, 171 aa, Triticum aestivum
MANPRVFFDMTVGGAPAGRIVMELYKDAVPRTVENFRALCTGEKGVGKSGKPLHYKGSSFHRVIPDFMCQGGDFTKGNGTGGESIYGEKFADEKFVHKHTKPGILSMANAGPNTNGSQFFICTVPCNWLDGKHVVFGEVVEGMDVVKNIEKVGSRSGTCSKQVVIADCGQL

SEQ ID NO: 1324 - DNA, 519 bp, Digitalis lanata
  CDS (1)..(519)
atgtcgaaccctaaggttttctttgacatgacaatcggcggccaaccttgcggccggattgtgatggagctctacgccgatgttgtcccgaagaccgcagagaacttccgcgctctctgcactggcgagaaaggcgtcggcaaaaccggcaagccgctccactacaaaggctcggcgtttcaccgcgtgatccccgggttcatgtgccagggaggcgacttcaccgccggaaacggcaccggaggcgaatctatctacggcgcgaaattcgcggacgagaacttcgtgaagaagcacactggtccaggaatcctgtccatggcgaacgcaggaccgggaaccaatggatctcagttcttcatctgcaccgagaagacatcctggctcgatggcaagcatgtggtgttcggtcaggttgttgagggaatggacgttgtcagggcgatcgagaaggttggatcgcaaagtggaaagactgccaagccggtggtgatcgccgactgtggtcaaatctgttag

SEQ ID NO: 1325 - protein, 172 aa, Digitalis lanata
MSNPKVFFDMTIGGQPCGRIVMELYADVVPKTAENFRALCTGEKGVGKTGKPLHYKGSAFHRVIPGFMCQGGDFTAGNGTGGESIYGAKFADENFVKKHTGPGILSMANAGPGTNGSQFFICTEKTSWLDGKHVVFGQVVEGMDVVRAIEKVGSQSGKTAKPVVIADCGQIC

SEQ ID NO: 1326 - DNA, 519 bp, Digitalis lanata
  CDS (1)..(519)
atgtcgctccctaaggttttctttgatatgtcaatcggcggccagccttgcggccggatcgtgatggagctctacgccgatgttgtcccgaagaccgccgacaacttccgcgctctctgcaccggtgagaaaggcgtaggcaagtccggcaagccgctccactacaaaggctcggcgttccaccgagtgatccccgggttcatgtgtcagggcggcgatttcaccgctggaaacggcaccggaggcgaatcgatctacggcgcgaaattcgccgacgagaacttcgtgaagaagcacactggtccaggaatcctgtccatggccaacgctggaccgggaaccaatggatctcagttcttcatctgcaccgagaagacagcgtggctcgatggcaagcatgtggtgttcggtcaagttgttgagggaatggacgttgtcagggcgatcgagaaggttggatcgcagagtggaaagactgccaagccggtggtggtcgccgactgcggtcaactctgttag

SEQ ID NO: 1327 - protein, 172 aa, Digitalis lanata
MSLPKVFFDMSIGGQPCGRIVMELYADVVPKTADNFRALCTGEKGVGKSGKPLHYKGSAFHRVIPGFMCQGGDFTAGNGTGGESIYGAKFADENFVKKHTGPGILSMANAGPGTNGSQFFICTEKTAWLDGKHVVFGQVVEGMDVVRAIEKVGSQSGKTAKPVVVADCGQLC

SEQ ID NO: 1328 - DNA, 684 bp, Tolypocladium inflatum
  CDS (1)..(684)
atgaagtcaacgctccttcgacccctcctaccccgctataagctctgctcccccgggtcaagatctttccctcttccacaacttgcatcagcttccaacacattccgagctgctcgattcttctccgcaacatcagcaatcatgggcaacaaagtcttcttcgacattgagtgggagggccccgtcatgcagggcggcaagcctacctctaccgtcaaagagcagtctggtcgcatcaacttcaagctgtacgatgacgtcgtccccaagaccgccgagaacttccgcgctctctgcaccggcgagaagggcttcggctacgagggctcgtccttccaccgtatcatccccgagttcatgctccagggcggcgacttcacccgcggtaacggcactggcggcaagtccatctacggcgagaagtttgccgatgagaacggccagctgaagcacgaccgccccggtctgctgtccatggctaacgctggccccaacaccaacggctcccagttcttcgtcaccaccgtcgtcacctcgtggctcaacggccgccacgtcgtcttcggcgaggtcgctgaccaggagtccctggacgtcgtcaaggcccttgaggccactggctctggtagcggcgctgtcaagtacaacaagcgcgccaccattgtcaagtctggcgagctgtaa

SEQ ID NO: 1329 - protein, 227 aa, Tolypocladium inflatum
MKSTLLRPLLPRYKLCSPGSRSFPLPQLASASNTFRAARFFSATSAIMGNKVFFDIEWEGPVMQGGKPTSTVKEQSGRINFKLYDDVVPKTAENFRALCTGEKGFGYEGSSFHRIIPEFMLQGGDFTRGNGTGGKSIYGEKFADENGQLKHDRPGLLSMANAGPNTNGSQFFVTTVVTSWLNGRHVVFGEVADQESLDVVKALEATGSGSGAVKYNKRATIVKSGEL

SEQ ID NO: 1330 - DNA, 489 bp, Cryptococcus neoformans var. neoformans
  CDS (1)..(489)
atgtcccaagtttactttgacattgccattaacaacgcccccgccggccgaatcactttcaagctcttcgacgatgtcgtccccaagactgcccgaaacttccgtgaactctgtaccggccagaacggcttcggttacgccggctctggtttccaccgagtgatcccccagttcatgctccagggtggtgacttcaccaaccacaacggcactggcggcaagtccatctacggcaacaagttcgccgacgagaacttcaagctccgtcacgaccgacctttcctcctctccatggctaacgctggtcccaacaccaatggctctcagttcttcatcaccaccgtcgttacctcttggctcgacggcaagcacgtcgtcttcggtgaggtttcctctggtcaggacctcgtcaggaagatcgagtcttacggctctggctccggtgctaccaaggccaagatcaccattgccgcttctggtaccgtttaa

SEQ ID NO: 1331 - protein, 162 aa, Cryptococcus neoformans var. neoformans
MSQVYFDIAINNAPAGRITFKLFDDVVPKTARNFRELCTGQNGFGYAGSGFHRVIPQFMLQGGDFTNHNGTGGKSIYGNKFADENFKLRHDRPFLLSMANAGPNTNGSQFFITTVVTSWLDGKHVVFGEVSSGQDLVRKIESYGSGSGATKAKITIAASGTV

SEQ ID NO: 1332 - DNA, 489 bp, Cryptococcus neoformans var. neoformans
  CDS (1)..(489)
atgtccgacgtttactttgacattgccatcaacagccagcctgccggccgaatcaccttcaagctcttcgacgatgtcgtccccaagactgtccagaacttccgtgaactctgtaccggccagaacggcttcggctacgccggctctggtttccaccgagtgatcccccagttcatgctccagggtggtgacttcaccaaccacaacggcactggcggcaagtccatctacggcaacaagttcgccgacgagaacttcaagctccgtcacgaccgacctttcctcctctccatggctaacgctggtcccaacaccaatggctctcagttcttcatcaccaccgtcgttacctcttggctcgacggcaagcacgtcgtcttcggtgaggtttcctctggtcaggacctcgtcaggaagatcgagtcttacggctctggctccggtgctaccaaggccaagatcaccattgccgcttctggtaccgtttaa

SEQ ID NO: 1333 - protein, 162 aa, Cryptococcus neoformans var. neoformans
MSDVYFDIAINSQPAGRITFKLFDDVVPKTVQNFRELCTGQNGFGYAGSGFHRVIPQFMLQGGDFTNHNGTGGKSIYGNKFADENFKLRHDRPFLLSMANAGPNTNGSQFFITTVVTSWLDGKHVVFGEVSSGQDLVRKIESYGSGSGATKAKITIAASGTV

SEQ ID NO: 1334 - DNA, 558 bp, Echinococcus multilocularis
  CDS (1)..(558)
atggcagtgccagctcctatggtatccgaacggatgaataatccaaagaatccagtcgtctttttcgacatctctattggaggccaggatattggccgtattcaactcgagctctttgccgatgtgacgcccaaaactgcggaaaatttccgccaactctgcacaggcgagtatcgcaaggatggtgtacccacgggctacaagggctgcaccttccatcgaatcattaaggatttcatggtccaaggtggagatttcgttaacggagatgggaccggttcttgcagtatttacggtggctccaagttctccgacgaaaatttcataatgaagcactcttcgccggggatgctttcgatggcgaatagtgggaaagacactaacggctgtcagtttttcatcacctgtgctccttgtgactttctggacggaaagcacgttgtattcggtcaagtcgtcgacggtatgctggtgctcaagaagattgaaaatgttcccacgggacctcacaatcgtcccaaggtccctgttgttattacccaatgtggagaaatgtag

SEQ ID NO: 1335 - protein, 185 aa, Echinococcus multilocularis
MAVPAPMVSERMNNPKNPVVFFDISIGGQDIGRIQLELFADVTPKTAENFRQLCTGEYRKDGVPTGYKGCTFHRIIKDFMVQGGDFVNGDGTGSCSIYGGSKFSDENFIMKHSSPGMLSMANSGKDTNGCQFFITCAPCDFLDGKHVVFGQVVDGMLVLKKIENVPTGPHNRPKVPVVITQCGEM

SEQ ID NO: 1336 - DNA, 648 bp, Magnaporthe grisea
  CDS (1)..(648)
atgaggactactcttcttcgacccctcgttccccgccagaacatcttctcttcctccatccccagaacttcttttgttaaaccgaacttcgttgctacaccgaaatctcccatcaacaacaccacccgagttcgcttctattcctccaccatgtctaagcctaacgttttcttcgacatttccttcaacggcgtgaccaagcgcgtcgagttcaagctctacgatgatgtagtccccaagaccgccgacaacttcaggcgtctttgcgttggcgagcccggcgttggaggctacaaggactctggcttccaccgtatcatccccgacttcatgctccagggcggtgacttcacccgtggcaacggcaccggtggcaagtccgtctacggcgagaagtttgccgacgagaacttccagatcaagcacaccaggcctggactcctgtccatggccaacgccggccccaacaccaacggctcgcagttcttcatcaccactgtcaagacctcatggttggacggcaagcacgtcgtctttggcgaggttgtctccggtttcgaggatgtcatcaagcccattgaggctcttggctccagcagcggtacccccaagaccaaggtcaccattgtcaacgctggtaccgtctaa

SEQ ID NO: 1337 - protein, 215 aa, Magnaporthe grisea
MRTTLLRPLVPRQNIFSSSIPRTSFVKPNFVATPKSPINNTTRVRFYSSTMSKPNVFFDISFNGVTKRVEFKLYDDVVPKTADNFRRLCVGEPGVGGYKDSGFHRIIPDFMLQGGDFTRGNGTGGKSVYGEKFADENFQIKHTRPGLLSMANAGPNTNGSQFFITTVKTSWLDGKHVVFGEVVSGFEDVIKPIEALGSSSGTPKTKVTIVNAGTV

SEQ ID NO: 1338 - DNA, 489 bp, Cryptococcus neoformans
  CDS (1)..(489)
atgtcccaggtttactttgacattgccattaacaacgcccccgccggccgaatcaccttcaagctctttgatgatgtggttcctaagactgcccggaacttccgagagctctgtaccggccagaacggcttcggttacgccggctccggtttccaccgagtgatcccccagttcatgctccagggtggtgacttcaccaaccacaacggcactggcggcaagtccatctacggcaacaagttcgccgacgaagaattcaagctccgtcacgaccgacctttcctcctctccatggccaacgccggtcccaacaccaacggctctcagttcttcatcaccactgtcgttacctcttggctcgacggcaagcacgtcgtcttcggtgaggttagctctggtcaggacctcgtcaagaatatcgagtcttacggctccgactctggcaagcccaaggccaaggtcactatcactggctccggtactgtctaa

SEQ ID NO: 1339 - protein, 162 aa, Cryptococcus neoformans
MSQVYFDIAINNAPAGRITFKLFDDVVPKTARNFRELCTGQNGFGYAGSGFHRVIPQFMLQGGDFTNHNGTGGKSIYGNKFADEEFKLRHDRPFLLSMANAGPNTNGSQFFITTVVTSWLDGKHVVFGEVSSGQDLVKNIESYGSDSGKPKAKVTITGSGTV

SEQ ID NO: 1340 - DNA, 489 bp, Cryptococcus neoformans
  CDS (1)..(489)
atgtctgacgtttattttgacattgccatcaacagccagcctgccggccgaatcaccttcaagctcttcgacgatgtcgtccccaagactgctcagaacttccgagagctctgtaccggccagaacggcttcggttacgccggctccggtttccaccgagtgatcccccagttcatgctccagggtggtgacttcaccaaccacaacggcactggcggcaagtccatctacggaaacaagttcgccgacgagaacttcaagctccgtcacgaccgacctttcctcctctccatggccaacgccggtcccaacaccaacggctctcagttcttcatcaccactgtcgttacctcttggctcgacggcaagcacgtcgtcttcggtgaggttagctctggtcaggacctcgtcaagaagatcgagtcttacggctctggctccggtgctaccaaggccaagatcaccattgccgcttctggtaccgtttaa

SEQ ID NO: 1341 - protein, 162 aa, Cryptococcus neoformans
MSDVYFDIAINSQPAGRITFKLFDDVVPKTAQNFRELCTGQNGFGYAGSGFHRVIPQFMLQGGDFTNHNGTGGKSIYGNKFADENFKLRHDRPFLLSMANAGPNTNGSQFFITTVVTSWLDGKHVVFGEVSSGQDLVKKIESYGSGSGATKAKITIAASGTV

SEQ ID NO: 1342 - DNA, 516 bp, Solanum tuberosum
  CDS (1)..(516)
atggcaaatccaagggttttctttgaccttaccatcggcggtgcaccagctggccgcgtggtgatggagctcttcgccgataccactcccaaaaccgctgagaacttccgagctctctgtaccggtgaaaaaggtgttggaaagatgggtaagcctttgcactacaagggctcaaccttccaccgtgtgatcccagggttcatgtgtcaaggaggtgatttcaccgccggaaacggtaccggaggagagtcgatctacggcgccaaattcaaggacgagaacttcgtgaagaagcacaccggcactggaattctctccatggctaatgctggacctggaaccaacggttctcagttcttcatctgtaccgctaagactgagtggctcgatggaaagcacgtcgtgtttggacaagttgttgaaggcttggatgtgattaagaaggccgaggctgttggatctagttctggaaggtgctccaagcctgttgtggttgctgactgcggtcaactctag

SEQ ID NO: 1343 - protein, 171 aa, Solanum tuberosum
MANPRVFFDLTIGGAPAGRVVMELFADTTPKTAENFRALCTGEKGVGKMGKPLHYKGSTFHRVIPGFMCQGGDFTAGNGTGGESIYGAKFKDENFVKKHTGTGILSMANAGPGTNGSQFFICTAKTEWLDGKHVVFGQVVEGLDVIKKAEAVGSSSGRCSKPVVVADCGQL

SEQ ID NO: 1344 - DNA, 495 bp, Lumbricus rubellus
  CDS (1)..(495)
atggctctgccaaaggttttcttcgacatcaccatcggaggcaatgccaccggaagaatcatcatggagctgcgttccgatgttgtcccaaagacagcagagaacttccgagcccttagcactggcgagaagggttttggcttcaagggaagtaaattccatcgcgttattccgaagttcatgtgccagggcggtgacttcaccaagggcgacggcaccggtggaaagagcatctacggagagaagttccaggatgagaacttcacgctgaagcaccagggggaaggaacgttgtcgatggccaacgctgggccaaacaccaacggatctcagttcttcatctgcacgggccagacatcatggttggatggtaagcacgttgtctttggccgagtggttgagggtttggatgttgtgaagaagatggaggctgttggctccgagagtggcaagaccaagcaaccggttctgatcgcgaacagtggccagctctaa

SEQ ID NO: 1345 - protein, 164 aa, Lumbricus rubellus
MALPKVFFDITIGGNATGRIIMELRSDVVPKTAENFRALSTGEKGFGFKGSKFHRVIPKFMCQGGDFTKGDGTGGKSIYGEKFQDENFTLKHQGEGTLSMANAGPNTNGSQFFICTGQTSWLDGKHVVFGRVVEGLDVVKKMEAVGSESGKTKQPVLIANSGQL

SEQ ID NO: 1346 - DNA, 570 bp, Pseudotsuga menziesii
  CDS (1)..(570)
atggcaagtggagcagcggcaggggtggtagaatggcaccagaagcttccaaacccaaagaatccagttgtcttcttcgatgtaacgataggcaccattccagcaggacgaattaagatggagctcttcgccgatattgttcccaggacagctgaaaactttcggcagttctgcaccggggaatacaggaaagcgggcattcctattggctataaaggctgccattttcacagagttattaaggatttcatgattcaagctggtgattttgtgaagggagatggaagtggatgcatctctatctatggtagcaagtttgaagatgaaaacttcatagctaaacatacaggtcctggtctcctctctatggcaaatagtggacctaatactaatggatcgcagttctttttaacttgtgcaaaatgtgattggctggacaataagcatgtggtttttgggagagtactaggagaaggactcttggttctgaggaaaattgaaaatgtccagactgggcccaataatcgacccaagctaccttgtgttattgctgagtgtggtgaaatgtaa

SEQ ID NO: 1347 - protein, 189 aa, Pseudotsuga menziesii
MASGAAAGVVEWHQKLPNPKNPVVFFDVTIGTIPAGRIKMELFADIVPRTAENFRQFCTGEYRKAGIPIGYKGCHFHRVIKDFMIQAGDFVKGDGSGCISIYGSKFEDENFIAKHTGPGLLSMANSGPNTNGSQFFLTCAKCDWLDNKHVVFGRVLGEGLLVLRKIENVQTGPNNRPKLPCVIAECGEM

SEQ ID NO: 1348 - DNA, 519 bp, Catharanthus roseus
  CDS (1)..(519)
atgcctaaccctagagttttcttcgatatgagcgtcggcggccaaccggccggccgaattgtgatggagttgttcgccgatacaactcctcgtacggcggagaactttcgtgcactctgcaccggagaaaaaggcaccggaaggagcggtaagcctttgcactacaaggattcttccttccaccgtgtgatccccggattcatgtgtcagggaggcgatttcacagccggaaacggtaccggtggagaatcgatctacggagcgaaattcgccgatgagaacttcatcaaaaagcacaccggtcctggaattctgtccatggctaacgccggtcctaatactaatggatctcagttcttcatctgtactgctaagacagagtggctcgatggcaaacacgttgtgtttggacaggttgttgaaggtatggatgtggtgaaagccattgaaaaggttggatcttcttctggaaggactgctaagaaggttgtggttgaggactgcggccaactctcttag

SEQ ID NO: 1349 - protein, 172 aa, Catharanthus roseus
MPNPRVFFDMSVGGQPAGRIVMELFADTTPRTAENFRALCTGEKGTGRSGKPLHYKDSSFHRVIPGFMCQGGDFTAGNGTGGESIYGAKFADENFIKKHTGPGILSMANAGPNTNGSQFFICTAKTEWLDGKHVVFGQVVEGMDVVKAIEKVGSSSGRTAKKVVVEDCGQLS

SEQ ID NO: 1350 - DNA, 519 bp, Lupinus luteus
  CDS (1)..(519)
atgtccaaccctaaggttttctttgatatggccatcgccggcaaccccgccggccgcatcgtcatggagctgtacgccgacaccacccctcgcaccgccgagaacttccgtgccctctgcaccggcgagaagggagtcggccgcagcggcaagccactccattacaagggatcgaccttccaccgcgtgatccctaacttcatgtgccagggcggtgatttcaccgccggaaacggtaccggagccgaatcgatctacggagctaagttcgctgatgagaacttcatcaagaggcacaccggtcccgggatcttgtccatggcgaatgctggagctggaaccaatggatctcagttcttcatctgtacggagaagacagagtggctcgatggaaagcacgttgtgtttggtaaagtgattgaaggaatgaacgttgtgagggacatagagaaggttggatctggatctggtaaaacctcgaggcctgttactatcgctgattgcggtcaactctcttag

SEQ ID NO: 1351 - protein, 172 aa, Lupinus luteus
MSNPKVFFDMAIAGNPAGRIVMELYADTTPRTAENFRALCTGEKGVGRSGKPLHYKGSTFHRVIPNFMCQGGDFTAGNGTGAESIYGAKFADENFIKRHTGPGILSMANAGAGTNGSQFFICTEKTEWLDGKHVVFGKVIEGMNVVRDIEKVGSGSGKTSRPVTIADCGQLS

SEQ ID NO: 1352 - DNA, 516 bp, Solanum lycopersicum
  CDS (1)..(516)
atggcaaatccaaaggttttctttgaccttaccatcggtggtgcaccagctggtcgtgtggtgatggagctcttcgccgataccactcccaaaaccgctgagaacttccgagctctttgtaccggtgagaaaggtgttggaaagatggggaagcctttgcactacaagggctcaaccttccaccgtgtgatcccagggttcatgtgtcaaggaggtgatttcaccgccggaaacgggaccggaggagagtcgatctatggagccaaattcaacgatgagaacttcgttaagaagcacaccggccctggaatcctctccatggctaatgctggacctggaaccaacggttctcagtttttcatctgtaccgctaagactgagtggctcaacggaaagcacgtcgtgtttggacaagttgttgaaggcatggatgtgattaagaaggcagaggctgttggatctagctctggaaggtgctccaagcctgtggttattgctgactgcggtcaactctag

SEQ ID NO: 1353 - protein, 171 aa, Solanum lycopersicum
MANPKVFFDLTIGGAPAGRVVMELFADTTPKTAENFRALCTGEKGVGKMGKPLHYKGSTFHRVIPGFMCQGGDFTAGNGTGGESIYGAKFNDENFVKKHTGPGILSMANAGPGTNGSQFFICTAKTEWLNGKHVVFGQVVEGMDVIKKAEAVGSSSGRCSKPVVIADCGQL

SEQ ID NO: 1354 - DNA, 492 bp, Uromyces fabae
  CDS (1)..(492)
atggccaactgttactttgacgtttcctccaatggcaagcccctcggccgcatcgtttttgagctttacgacgacgttgtgcccagaaccacgaacaactttcgtcagctttgcttaaaccccccgggcaaaggttttaaacattctatcttccatcgtgtcatcccagatttcatgatccagggtggtgacttcactaatggcaatggcaccggtggagagtcaatttacggaaaaaagtttgaggatgaaaacttccaaaaaaaacacgtggaacggggaatgttgtccatggccaatgctggccctaacaccaacggttcccagtttttcattactgtgaccaaaaccccttggcttgatggcaagcatgtagtatttggcaaggtgattgaaggctatgaccaagtcgtcaaggccatggaaaaaacaggaagtcaaagtggcaagactagctcagtactcaagattgaggattgtggcactctttga

SEQ ID NO: 1355 - protein, 163 aa, Uromyces fabae
MANCYFDVSSNGKPLGRIVFELYDDVVPRTTNNFRQLCLNPPGKGFKHSIFHRVIPDFMIQGGDFTNGNGTGGESIYGKKFEDENFQKKHVERGMLSMANAGPNTNGSQFFITVTKTPWLDGKHVVFGKVIEGYDQVVKAMEKTGSQSGKTSSVLKIEDCGTL

SEQ ID NO: 1356 - DNA, 495 bp, Blattella germanica
  CDS (1)..(495)
atggctcacccacgagtatttttcgacatgagtgccgatgggcagcctgtaggaaggattgtgatggagctccgaagtgatgttgtaccaaaaactgcagaaaatttccgggctctatgtacaggagagaaaggattcggttataagggtagcaggttccatcgtgttattcccaacttcatgtgccagggtggagacttcactaatcacaatggcactggtggaaagtcaatttatggaacaaagtttgaggatgagaacttccagctgaagcacactggtccaggaatcctttggatggccaatgctggacccaatactaacggaagccagttcttcatcaccactgcaaaaaccagttggttggacaatcgacatgtcgtttttggatctgttgtcgaaggaatggacgttgtgaagaagttggagtcattgggatcgcagagtggcaaaacaaacaagaagatcgcagtagtggactgtggacaaatttaa

SEQ ID NO: 1357 - protein, 164 aa, Blattella germanica
MAHPRVFFDMSADGQPVGRIVMELRSDVVPKTAENFRALCTGEKGFGYKGSRFHRVIPNFMCQGGDFTNHNGTGGKSIYGTKFEDENFQLKHTGPGILWMANAGPNTNGSQFFITTAKTSWLDNRHVVFGSVVEGMDVVKKLESLGSQSGKTNKKIAVVDCGQI

SEQ ID NO: 1358 - DNA, 489 bp, Echinococcus granulosus
  CDS (1)..(489)
atgggcgtgaagtgcttcttcgacatctccattggcggtaagccagcgggtcgcatcgtctttgccctgtttgatgacgtcccaaagacagtagagaacttccgtgcactgtgcaccggtgagaagggtttcggatacaagggctcgaagtttcaccgaattattcccggttttatgtgccaaggtggtgattttactgccgggaatggtaccggtggcaagagcatatacgggagcaaatttgaggatgaaaatttcaatcacaagcacagcaagccgatgatgctctcgatggcgaatgcgggtaagaacaccaatggctcgcaattcttcatcactaccgccgtcaccagctggcttgatgggaagcatgttgtctttggtgaggtagaaagtggcgaagatgttgttaaggatatggaggccgtcggtagcagtagtggcaagacttcccaagaagtactgattactgactgcggtcagctgtaa

SEQ ID NO: 1359 - protein, 162 aa, Echinococcus granulosus
MGVKCFFDISIGGKPAGRIVFALFDDVPKTVENFRALCTGEKGFGYKGSKFHRIIPGFMCQGGDFTAGNGTGGKSIYGSKFEDENFNHKHSKPMMLSMANAGKNTNGSQFFITTAVTSWLDGKHVVFGEVESGEDVVKDMEAVGSSSGKTSQEVLITDCGQL

SEQ ID NO: 1360 - DNA, 495 bp, Hemicentrotus pulcherrimus
  CDS (1)..(495)
atggctaaacctcaagttttcttcgaccttcaagccaatggcgagaatcttggaagaatagttatggagcttagggccgatgtagttcccaagactgctgagaacttccgtgccctgtgcactggggagaagggcttcggctacaagggatctactttccatcgtgtcatcccagggttcatgtgccaaggcggagacttcactaggcacaacggcactggtggaaaaagcatctacggagagaagtttgctgatgagaacttcactctgaagcacactcaaccaggaatcctgtcaatggccaacgctggagtcaacaccaatggatctcaatttttcatctgcacagcagtgacctcttggctcgatggaaagcatgtagtctttggcgcagtgactcaaggccttgacatcattaagaaggttgagagttatgggagcgacagcggcaaaaccagtaagaagatcacgattgccgactgtggccagctgtaa

SEQ ID NO: 1361 - protein, 164 aa, Hemicentrotus pulcherrimus
MAKPQVFFDLQANGENLGRIVMELRADVVPKTAENFRALCTGEKGFGYKGSTFHRVIPGFMCQGGDFTRHNGTGGKSIYGEKFADENFTLKHTQPGILSMANAGVNTNGSQFFICTAVTSWLDGKHVVFGAVTQGLDIIKKVESYGSDSGKTSKKITIADCGQL

SEQ ID NO: 1362 - DNA, 486 bp, Schistosoma mansoni
  CDS (1)..(486)
atggctgcgaaagcgtttttcgatattaaggccggtgatgaacgattggggaggattatatttgagctattcaatgatgttccagatactactagaaactttcgcgagttatgcactcacaagaataattttggttacaaaggttccgttttccaccgaataattccaggcttcatgtgtcagggtggcgatttcaccaatggcgatggcacgggtggaaaaagtatatacggaaataaattcaaagatgagaacttcaatcacaaacacgaagcgttctcactttcaatggccaatgcgggacctaacaccaatggttcgcaattctttattactactgtcccttgttcgtggcttgacggcaaacatgttgttttcggtaaagtcgtcagtggcatagacgtggtgaagaaaatggagagtttaggttccacaagtggaaagccgtccaagaaaattataatcgaagattgtggagaatgttaa

SEQ ID NO: 1363 - protein, 161 aa, Schistosoma mansoni
MAAKAFFDIKAGDERLGRIIFELFNDVPDTTRNFRELCTHKNNFGYKGSVFHRIIPGFMCQGGDFTNGDGTGGKSIYGNKFKDENFNHKHEAFSLSMANAGPNTNGSQFFITTVPCSWLDGKHVVFGKVVSGIDVVKKMESLGSTSGKPSKKIIIEDCGEC

SEQ ID NO: 1364 - DNA, 498 bp, Streptomyces chrysomallus
  CDS (1)..(498): transl_table=11
atgacaaccaaggtctacttcgacatcaccatcgacgacgcgcccgcagggcgtatcacgttcaacctgttcgacgacgtcgtccccaagacggcggagaacttccgcgcgctcgccaccggcgagaagggcttcggctacgccggctcgtccttccaccgcgtcatcacggacttcatgctccagggcggcgacttcacccgcggtgacggcaccggcggcaagagcatctacggcgagaagttcgccgacgagaacttccagctcaagcacgaccgtgtgggcctgctctcgatggccaacgccggaaagaacaccaacggttcgcagttcttcatcaccacggtgctcaccccgtggctggacggcaagcacgtggtcttcggcgaggtcgccgacgacgacagcatggccctggtccgcaagatcgaggcgctcggctcctctagcggccgcaccagcgccaaggtcaccatcgccgagtccggcgctctctga

SEQ ID NO: 1365 - protein, 165 aa, Streptomyces chrysomallus
MTTKVYFDITIDDAPAGRITFNLFDDVVPKTAENFRALATGEKGFGYAGSSFHRVITDFMLQGGDFTRGDGTGGKSIYGEKFADENFQLKHDRVGLLSMANAGKNTNGSQFFITTVLTPWLDGKHVVFGEVADDDSMALVRKIEALGSSSGRTSAKVTIAESGAL

SEQ ID NO: 1366 - DNA, 681 bp, Arthroderma benhamiae
  CDS (1)..(681)
atggccagaattgggcgtatcttgactctcgtggtcttcgccgccgtcggtctgttcctcttcatgggacagacggtagaggccaaaggtcccaagatcacaagcaaggtctactttgatatcgagcatgatggtcagcccctcggacggattgtcatgggattgtacggaaagacggtgccaaagaccgctgagaacttccgcgctttggctactggtgagaagggattcggatatgaggggtctaccttccaccgtgttatcaaggacttcatgatccagggtggtgactttaccaatggtgacggaaccggtggaaagtccatctacggcaacaagttcgaggacgagaacttcaagctacgccataccaagaagggtgttctcagcatggccaacgccggaaaagataccaacggatctcagttcttcattaccaccgctattactgcctggcttgatggaaagcacgtcgtcttcggcgaggtgctcgagggatacgatatcgttgataagatccaggtcgtccccaagggcttccaggaccgtcccaccaaagatgtaaaaatcgtcaagtgcggagaacttgacatgaaggaggaagcagagggtgaaggtactgaatcaccatctaagcccgactccgagaaagaacaggccccagtccgtgatgaaatctag

SEQ ID NO: 1367 - protein, 226 aa, Arthroderma benhamiae
MARIGRILTLVVFAAVGLFLFMGQTVEAKGPKITSKVYFDIEHDGQPLGRIVMGLYGKTVPKTAENFRALATGEKGFGYEGSTFHRVIKDFMIQGGDFTNGDGTGGKSIYGNKFEDENFKLRHTKKGVLSMANAGKDTNGSQFFITTAITAWLDGKHVVFGEVLEGYDIVDKIQVVPKGFQDRPTKDVKIVKCGELDMKEEAEGEGTESPSKPDSEKEQAPVRDEI

SEQ ID NO: 1368 - DNA, 639 bp, Aspergillus niger
  CDS (1)..(639)
atgaacttcaagaacatttttctatctttcttcttcgtcctggcggttggacttgctcttgtccacgccgaagatgctcagccccggggccccaagatcaccagtaaggtgttctttgatatagagcacggagacaagcctctgggcagagtcgtgcttggcttgtatggcaagactgttcctaagaccgctgagaacttccgcgctctcgctactggtgagaagggctttggctatgaaggatctaccttccaccgtgtcattaaggacttcatgatccagggtggtgacttcactcgtggcgatggtaccggtggaaagtcgatctacggtgagaagttcgccgacgaaaacttcaagctgaggcatacgcgcaaggggctcctgagcatggccaacgccggcaaggacaccaacggctcccagttcttcatcaccaccgttcctacaccttggcttgatggccgccatgtcgtcttcggtgaagtgctcgagggctacgagatcgtcgctcagattgagaacgtgcccaagggccgttctgacagacccgtggagactgtcaagatcgtcaagagtggagagttggagtctgaggacaaggctggagaaaaaggtagcagccacgaggagctgtag

SEQ ID NO: 1369 - protein, 212 aa, Aspergillus niger
MNFKNIFLSFFFVLAVGLALVHAEDAQPRGPKITSKVFFDIEHGDKPLGRVVLGLYGKTVPKTAENFRALATGEKGFGYEGSTFHRVIKDFMIQGGDFTRGDGTGGKSIYGEKFADENFKLRHTRKGLLSMANAGKDTNGSQFFITTVPTPWLDGRHVVFGEVLEGYEIVAQIENVPKGRSDRPVETVKIVKSGELESEDKAGEKGSSHEEL

SEQ ID NO: 1370 - DNA, 612 bp, Orpinomyces sp. (strain PC-2)
  CDS (1)..(612)
  misc_feature (453)..(453): n is a, g, c or t
atgaatttttcaattaaatctgtaatctttttagctattgtagctttagctactttagtttctgcttctactaacccaaaggtcaccaacaaggtttactttgatattaaacaaggtgataaggatcttggtagaattgttttaggtttatatggtgaagttgttccaaaaactgttgaaaacttccgtgctttagctactggagaaaaaggttatggttacaagaactctaaattccaccgtgttattaaggactttatgattcaaggtggtgatttcactcgtggtgatggtactggtggtaagtctatttacggtgaaagattcgctgatgaaaacttcaagcttagacacaccggtccaggtattctttccatggctaatgctggtcgtgatactaatggtagtcaattctttattactactgttaccacttcatggttagatggtcgncatgttgttttcggtaaagttattgaaggtatggatgttgttactgctattgaaaccactaagactcttccaggtgacagaccagctactccagttattattgctgactgtggtgaactcccagtttccaacaacaatgatgctaaagctgaattataa

SEQ ID NO: 1371 - protein, 203 aa, Orpinomyces sp. (strain PC-2)
MNFSIKSVIFLAIVALATLVSASTNPKVTNKVYFDIKQGDKDLGRIVLGLYGEVVPKTVENFRALATGEKGYGYKNSKFHRVIKDFMIQGGDFTRGDGTGGKSIYGERFADENFKLRHTGPGILSMANAGRDTNGSQFFITTVTTSWLDGRHVVFGKVIEGMDVVTAIETTKTLPGDRPATPVIIADCGELPVSNNNDAKAEL

SEQ ID NO: 1372 - DNA, 642 bp, Schistosoma japonicum
  CDS (1)..(642)
atggccgtgttaagagtgttgtgcggacttctgctggtttccattttgtttcttgggtttgtcctcagtgaaggaaatgggccgaaagtaacagaaaaagtgttctttgatattgaagttgatgaacaacctctcggtcggataatcatcggattatttggtaaaacagtaccgaagactgtggaaaatttcaagcaactttctattggtacaacgttgaaagatggtcgaactgccgcatataaaggaagcacttttcatcgtgtcataaagtcatttatgatacagggtggtgattttacaaatcatgatggaacgggcggctttagtatttatggtgagcggtttcccgatgagaatttcaaactaaaacatgttggtgcagggtggctgtcgatggctaatgctggtcctaacacaaatggagcccaatttttcatcacgactacgcaaaatccctggttggatggaaaacatgttgttttcggaaaagttgtagaagggatgagtgttgttagacaaattgaaaacatgcagacggactctagagataggcctgttaaaagtgtgaagatagcaaactgtggacacattcctgttgatgtaccgttttcagtatccaacactgacgctgctgaatga

SEQ ID NO: 1373 - protein, 213 aa, Schistosoma japonicum
MAVLRVLCGLLLVSILFLGFVLSEGNGPKVTEKVFFDIEVDEQPLGRIIIGLFGKTVPKTVENFKQLSIGTTLKDGRTAAYKGSTFHRVIKSFMIQGGDFTNHDGTGGFSIYGERFPDENFKLKHVGAGWLSMANAGPNTNGAQFFITTTQNPWLDGKHVVFGKVVEGMSVVRQIENMQTDSRDRPVKSVKIANCGHIPVDVPFSVSNTDAAE

SEQ ID NO: 1374 - DNA, 642 bp, Schistosoma mansoni
  CDS (1)..(642)
atggccgttctaaagccgttatgcccgttattactactgtctatcatatgtttcggccttattcgcagtgaagcgaatggacccaaagttactgacaaagtgtttttcgatattgaagttgatggaaaaccacttgctcgaataattatcggattgtttggtaaaacagtgcctaagacagtggaaaatttcaaacaactttcaattggcactcaactgaaggatggtcgaactgcttcatataaaggaagcacttttcatcgtgttattaagtcattcatgatacaaggtggagacttcacaaaccacgatggaactggaggttttagtatttatggcgataggttccctgatgaaaacttcaaattgagacatgtgggtgcagggtggctgtcgatggctaatgctggtcctgatacaaatggaagccaattctttattacgaccgtgaagacctcgtggttagatggaaagcatgttgttttcggaaaagttgtagaaggaatgaacattgttagacagattgaaagtgaaacgacggattcaagagatagacctgttaagagcatcaagatagccagttgcggccacattcccgtggaaatacccttctcggtaacgaactctgatgctgtcgaatga

SEQ ID NO: 1375 - protein, 213 aa, Schistosoma mansoni
MAVLKPLCPLLLLSIICFGLIRSEANGPKVTDKVFFDIEVDGKPLARIIIGLFGKTVPKTVENFKQLSIGTQLKDGRTASYKGSTFHRVIKSFMIQGGDFTNHDGTGGFSIYGDRFPDENFKLRHVGAGWLSMANAGPDTNGSQFFITTVKTSWLDGKHVVFGKVVEGMNIVRQIESETTDSRDRPVKSIKIASCGHIPVEIPFSVTNSDAVE

SEQ ID NO: 1376 - DNA, 1116 bp, Amanita muscaria
  CDS (1)..(1116)
atggacgaccgccctattgtcttcttcgacatcgcaattggtggccagctcgctgggcgggtcgctttccgactctactccgatcttgtaccaaagaccgcggaaaactttcgtgctctatgtactggtgaaaagggcctgggtcaatcgggaaaacctctatggtataagggaagcgcgtttcatcgggtaatcaaagggtttatgtgtcagggtggagatttcacagcaggaaacggaacgggcggtgaatcaatctatggagagaaattcgaggatgaaggtttccctgttcatcattcgaggccgttccttttatccatggcaaatgcgggaccgaatacaaatggctctcagtttttcataactgttagtgcaacgccgcacttggatgggaagcatgtggtttttggcgaggtcatcaagggcagatcagtcgtgcgcacaatcgaaaataatccggcgaccaacggagatgttcctaaagaacctgttgtgatcgctgattgcggccaactatcatccgatgatccttttctggccgagagaacgtcgacagacggtgatccatacgaagattacccggatgatgaagaccaggaactaggtaatccagagacggtgctgcaaatcgcgaaaaccatacgcgaagttgcaaacaggttgtacaagcagggcgacataagtggtgccttacagaagtactcgaaatccattcgttatttggacgtacaccaagaactgccggaaaattctccgccggatttgaatgaacagtacaagagtttattggctccacttttattgaattccgcgcttgctgcgatccgaatcgaacctcactctgccgccaacgcaatgaatgctgttgccaataccagccgtgccctcaataggctcgagttgagcaacgcagataaagcaaaagcatattatcgccgtgggttggcgaagactattatgagagatgaagtgggagcagagcaggatttgaaaacggctaacgagctgcttcccgaggatggtgctattgcagccgagttggcgaagatcatacagaagaagaaggagcagcgggaacgggagaagaaggcttataagaagatgttcgcatga

SEQ ID NO: 1377 - protein, 371 aa, Amanita muscaria
MDDRPIVFFDIAIGGQLAGRVAFRLYSDLVPKTAENFRALCTGEKGLGQSGKPLWYKGSAFHRVIKGFMCQGGDFTAGNGTGGESIYGEKFEDEGFPVHHSRPFLLSMANAGPNTNGSQFFITVSATPHLDGKHVVFGEVIKGRSVVRTIENNPATNGDVPKEPVVIADCGQLSSDDPFLAERTSTDGDPYEDYPDDEDQELGNPETVLQIAKTIREVANRLYKQGDISGALQKYSKSIRYLDVHQELPENSPPDLNEQYKSLLAPLLLNSALAAIRIEPHSAANAMNAVANTSRALNRLELSNADKAKAYYRRGLAKTIMRDEVGAEQDLKTANELLPEDGAIAAELAKIIQKKKEQREREKKAYKKMFA

SEQ ID NO: 1378 - DNA, 615 bp, Oryza sativa
  CDS (1)..(615)
atggcgaaaacgacgtcgttgttgctctttacactgctcctcttcggaaccttagctctcatccaggcgaagaaatcgaaggaggatttgaaggaagtgacccacaaggtttactttgatgttgagattaatggaaaagaagcaggtcgtattgtgatgggtctttttggaaaggctgttccaaaaactgcagaaaactttcgagctctttgcactggggaaaagggaactggtaaaagtggcaagcctctccattacaaaggtagctcattccatagaattattcctagctttatgctccaaggaggtgattttacacatggcaatggtatgggtggagaatcaatttatggagagaagtttgctgatgagaacttcaagttaaagcatactggaccaggacttctatcaatggcaaatgctggtcctgacaccaatggctcacaatttttcattacaaccgtgacaactagctggttggacggaaggcatgttgtttttggtagagttctttctggattggatgttgtttacaatattgaagctgaaggaacacaaagtggcactcccaagagcaaggttgtgattgttgacagtggtgaactccctctataa

SEQ ID NO: 1379 - protein, 204 aa, Oryza sativa
MAKTTSLLLFTLLLFGTLALIQAKKSKEDLKEVTHKVYFDVEINGKEAGRIVMGLFGKAVPKTAENFRALCTGEKGTGKSGKPLHYKGSSFHRIIPSFMLQGGDFTHGNGMGGESIYGEKFADENFKLKHTGPGLLSMANAGPDTNGSQFFITTVTTSWLDGRHVVFGRVLSGLDVVYNIEAEGTQSGTPKSKVVIVDSGELPL

SEQ ID NO: 1380 - DNA, 618 bp, Brassica napus
  CDS (1)..(618)
atgatggcgagctcagtgacgctgcttctatggagtcttcttcttctcggaactctaagcgcgattcaggctaagaagtccaaggaaaacttaaaggagatcacacacaaggtttattttgatgttgagattgatgggaaagaagctggtcgtattgtcatgggtctatttggaaagacagtccctaaaactgcagagaatttccgagctttgtgcacaggggagaaaggaataggtaagaaagggaaggctctacattacaaggggagctccttccatagaatcataccaagctttatgctccagggaggcgatttcacccatggcaatggtatgggaggagagtctatctatggtgagacgtttgctgatgagaacttcaaactcaagcatactggtccagggtttctatcaatggcaaacgccggccaagacaccaacggatctcagtttttcatcacaacagtaacaacaagctggttggacgggaggcacgtagtcttcgggaaggtagtgtcgggaatggacgttgtgtacaaaatcgaagctgaggggaatcagagcggaactcctaagagtaaagttgtgatcgttgacagtggcgagcttcctctgtag

SEQ ID NO: 1381 - protein, 205 aa, Brassica napus
MMASSVTLLLWSLLLLGTLSAIQAKKSKENLKEITHKVYFDVEIDGKEAGRIVMGLFGKTVPKTAENFRALCTGEKGIGKKGKALHYKGSSFHRIIPSFMLQGGDFTHGNGMGGESIYGETFADENFKLKHTGPGFLSMANAGQDTNGSQFFITTVTTSWLDGRHVVFGKVVSGMDVVYKIEAEGNQSGTPKSKVVIVDSGELPL

SEQ ID NO: 1382 - DNA, 516 bp, Brassica napus
  CDS (1)..(516)
atggttaaccctaaagtttatttcgacatgaccgttggcgacaaagccgccggccgcatcgtgatggagctttacgccgacacagtccccgagacggccgagaacttccgtgctctctgcaccggcgagagaggaatcggcaaatccggaaagccactccactacaagggctcggctttccaccgcgtgatccccaagttcatgtgccaaggaggagatttcaccgccgggaacggaacgggaggagagtcgatctacggcatgaagttcaaagacgagaactttgtcaagaagcacaccggtccgggtattctctccatggctaacgctggttcgaacacgaacggatctcagtttttcatttgcactgagaagacatcgtggctcgacgggaagcatgttgtgttcggtcaagttgtcgaagggatggatgtcgttagagacattgagaaggttggatctgacagtggaaggacttctaagaaggttgtgatcgctgactgtggtcagctttag

SEQ ID NO: 1383 - protein, 171 aa, Brassica napus
MVNPKVYFDMTVGDKAAGRIVMELYADTVPETAENFRALCTGERGIGKSGKPLHYKGSAFHRVIPKFMCQGGDFTAGNGTGGESIYGMKFKDENFVKKHTGPGILSMANAGSNTNGSQFFICTEKTSWLDGKHVVFGQVVEGMDVVRDIEKVGSDSGRTSKKVVIADCGQL

SEQ ID NO: 1384 - DNA, 675 bp, Brassica napus
  CDS (1)..(675)
atggcgataacggcgacaagattggtatctctgactctcttgtggatagtcgtcctgttcgtaacacttgctctcatccagattaaattgactgatgttgctgatcctatggtcagtgagaaggttgctgatcaggtaggagaggatttagaaggagttacccacaaagtttactttgatattcagatcaatggttcacctgcagggaggattctcattgggctttttgggaagatagttcctaaaactgcagagaactttcgagcgctttgcacgggagagaaaggagttgggaacatggggaagcctctttacttcaaaggaagcagtttccatagaatcattcctagcttcatgattcaaggtggagacttcacacgaggcgatgggagaggtggagagtcgatctatggcgataagtttgcagatgagaacttcaaactcaaacacaccgggccaggagtcttatcaatggcaaactcgggaccagactccaacggttcacagttctttatcacaaccgtcaccacaaattggttggatggacatcacgttgtgtttgggaaggtaatgtcaggcatggaagtagtgcgcaagatcgaagctcaaggacaaagcagtggagagcccaaaggaaaagttatcattttggacagtggagaagtttctttgtaa

SEQ ID NO: 1385 - protein, 224 aa, Brassica napus
MAITATRLVSLTLLWIVVLFVTLALIQIKLTDVADPMVSEKVADQVGEDLEGVTHKVYFDIQINGSPAGRILIGLFGKIVPKTAENFRALCTGEKGVGNMGKPLYFKGSSFHRIIPSFMIQGGDFTRGDGRGGESIYGDKFADENFKLKHTGPGVLSMANSGPDSNGSQFFITTVTTNWLDGHHVVFGKVMSGMEVVRKIEAQGQSSGEPKGKVIILDSGEVSL

SEQ ID NO: 1386 - DNA, 549 bp, Brassica napus
  CDS (1)..(549)
atggcaaacccgaaggtcttctttgacatcttgataggaaagatgaaggcgggtcgtgtggtgatggagctattcgcagatgtgacaccgagaacagctgataactttcgtgctctatgcacaggagagaagggtattgggcaagcagggaaggcactgcactacaaaggctcagcctttcaccgtatcatcccagggttcatgtgccaaggaggagatttcacccgcgggaatggaaccggaggggaatcgatttacggggctaagtttcaggacgagaacttcaagttgaagcacactggtccggggattttgtctatggctaattctggtcccaacacgaacggttctcagttctttatatgcactgataagacagcttggctcgatgggaagcacgtggtgtttgggaaagttgttgatgggtacaatgtggtgaaggcgatggagaaagttgggtctgagaggggagttacttctgaaccagttgtgattgaagattgtggtgagatcaagaatgaaacttcagaagtttcaaacaaggaatag

SEQ ID NO: 1387 - protein, 182 aa, Brassica napus
MANPKVFFDILIGKMKAGRVVMELFADVTPRTADNFRALCTGEKGIGQAGKALHYKGSAFHRIIPGFMCQGGDFTRGNGTGGESIYGAKFQDENFKLKHTGPGILSMANSGPNTNGSQFFICTDKTAWLDGKHVVFGKVVDGYNVVKAMEKVGSERGVTSEPVVIEDCGEIKNETSEVSNKE

SEQ ID NO: 1388 - DNA, 606 bp, Brassica napus
  CDS (1)..(606)
atggcgaggtcagtgaagctgcttctatggagtcttcttcttctgggaaccctaactgctattcaggccaaaaagtcaaaggaaaagatcacaaacaaggtttatttcgatgtcgaaattaacggcaaagaagcaggtcgtattgtcatgggtctatttggcaagacagtccctaaaactgcagaaaatttccgagctttgtgcacaggggagaaaggagtaggtaagaaagggaaggcattacattacaagggaagttccttccataggatcataccaagctttatgctccagggtggcgactttactgatggaaatggtatgggaggtgaatctatttatggcgagaagtttgctgatgagaacttcaaactcaagcatactggtccagggtatctatcaatggcaaacgctggtgaagacaccaacggatcacagtttttcatcacaacagtaacaacaagctggttggacgggaggcacgtagtgttcgggaaggtagttacaggaatggacgtggtgtacaagatcgaagctgaggggagtcagagtggaactcctaagagtaaagttgtgattgttgacagtggcgagcttcctctgtaa

SEQ ID NO: 1389 - protein, 201 aa, Brassica napus
MARSVKLLLWSLLLLGTLTAIQAKKSKEKITNKVYFDVEINGKEAGRIVMGLFGKTVPKTAENFRALCTGEKGVGKKGKALHYKGSSFHRIIPSFMLQGGDFTDGNGMGGESIYGEKFADENFKLKHTGPGYLSMANAGEDTNGSQFFITTVTTSWLDGRHVVFGKVVTGMDVVYKIEAEGSQSGTPKSKVVIVDSGELPL

SEQ ID NO: 1390 - DNA, 606 bp, Brassica napus
  CDS (1)..(606)
atggctagatcaacctctattctcttcctcacgctactcctttccgcttctctggctttaatccaggcaaaggaagatttgaaggagatcactcacaaagtttacttcgatgtggaaattgacggcaaagaagctggtcgagttgttattggccttttcggcaagactgttcccaaaactgcagaaaatttcagagctctttgcactggggagaaaggtgttgggaagagcgggaagccactacactacaaggggagcaagttccatagaatcattcctagttttatgatccagggaggtgacttcacacacgggaacggtatgggtggagaatccatctacggtcagaagtttgctgatgagaacttcaagctcaagcataccggaccaggtttgctttcgatggccaactctggagaggacacaaacggttcgcagtttttcatcacgacggtgacaacaagctggttagatggaaggcatgtggtgtttgggaaagtggtacaaggaatggatgttgtctacaagattgaagctgaggggaagcaaagtggaactcctaagagcaaagttgttattgcagacagtggagagcttcctctctaa

SEQ ID NO: 1391 - protein, 201 aa, Brassica napus
MARSTSILFLTLLLSASLALIQAKEDLKEITHKVYFDVEIDGKEAGRVVIGLFGKTVPKTAENFRALCTGEKGVGKSGKPLHYKGSKFHRIIPSFMIQGGDFTHGNGMGGESIYGQKFADENFKLKHTGPGLLSMANSGEDTNGSQFFITTVTTSWLDGRHVVFGKVVQGMDVVYKIEAEGKQSGTPKSKVVIADSGELPL

SEQ ID NO: 1392 - DNA, 786 bp, Brassica napus
  CDS (1)..(786)
atggcttcttcgtctccatcgcagatggttcacacttctcgcaccatctctcaaattcgtgtgaggtcccagctcgtttccgcaaatctaacacctcaatcacttcgcttcggaactcgttcctctggtttctcactctcttcaagactacactacgcaacaagcttcccgcttaagacaatctccggagcttacaagctccagagaacagcttgtgttaaatcaatggccgctgaggaggaggaggaagaagaagtactagcacctcctcaagctaaagtgacacacaaagtttactttgatgtggagattggtggtgaagtcgctggaaggatcgtgatgggtctgtttggtgatgttgtccccaaaaccgttgagaacttccgtgccttgtgtactggtgagaagaagtatgggtacaaaggctcttcctttcaccgtatcattaaggactttatgatccaaggaggtgatttcaccgagggaaatggtactggaggtattagtatttacggtgctaagttcgaagatgaaaacttcacccttaagcatactggacctggaatcttgagcatggctaacgctggtcctaatactaacggaagtcagtttttcatttgtaccatcaagacttcatggttagacaacaagcatgttgtgtttggacaagtcattgaaggtatgaagcttgtgaggagacttgagtctcaggagacacgtgctatggatgttccgaagaaagcttgcagaatctatgcctgcggagagctcccaatggacgcttga

SEQ ID NO: 1393 - protein, 261 aa, Brassica napus
MASSSPSQMVHTSRTISQIRVRSQLVSANLTPQSLRFGTRSSGFSLSSRLHYATSFPLKTISGAYKLQRTACVKSMAAEEEEEEEVLAPPQAKVTHKVYFDVEIGGEVAGRIVMGLFGDVVPKTVENFRALCTGEKKYGYKGSSFHRIIKDFMIQGGDFTEGNGTGGISIYGAKFEDENFTLKHTGPGILSMANAGPNTNGSQFFICTIKTSWLDNKHVVFGQVIEGMKLVRRLESQETRAMDVPKKACRIYACGELPMDA

SEQ ID NO: 1394 - DNA, 657 bp, Brassica napus
  CDS (1)..(657)
atggccggtggatttaccatcaacataaacattccggctggtgaaggacttaacattagcattaacccaaactctgctgcagctggtaatctatgtacgaatccgtcctctcaaaagcccctagaatgctctccaggaaaggctaacccaaaggttttctttgatatggcggtgcgcggcaaagctgttggtcggatcgtgatggagctctttgccgacacgaccccacggacggcagagaatttccgcgccctctgtacaggcgagaaaggcatggggaagaagggtaagccacttcattacaaaggatcaatcatccaccatatgtgccccgattatatcattggcggaggagatttcacttacgaaaggaaaggatacggaggcgaatcaatctacgccggaggttttttcgaggatgagaacttcatcaaaaagcacaccggtccgggtatcctctccatgaacaacaatggtcctgacaccaaccaatctcagtttttgatctccttgaccgagaactgggaactcgacgatctacacgtcgtcttcggccaagttgttgaaggattggatgtggtcaggatcatatcacacgaacctcttaaggacaagttttccaagcccgtcgtgatcgactgcggtcagattaaatag

SEQ ID NO: 1395 - protein, 218 aa, Brassica napus
MAGGFTININIPAGEGLNISINPNSAAAGNLCTNPSSQKPLECSPGKANPKVFFDMAVRGKAVGRIVMELFADTTPRTAENFRALCTGEKGMGKKGKPLHYKGSIIHHMCPDYIIGGGDFTYERKGYGGESIYAGGFFEDENFIKKHTGPGILSMNNNGPDTNQSQFLISLTENWELDDLHVVFGQVVEGLDVVRIISHEPLKDKFSKPVVIDCGQIK

SEQ ID NO: 1396 - DNA, 483 bp, Brassica napus
  CDS (1)..(483)
atgtcagtaacactgcacacgaatctgggggatataaagtgcgagatcttctgtgacgaggttcccaagagtgccgagaactttctggcgctatgtgcaagtgggtattacgatgggacaatctttcacaggaatatcaaaggcttcatgattcaaggcggagacccaaccggaactgggaaaggaggaactagcatctgggctaagaaattcaatgacgagattcgtgactccctcaagcacaatgcaagagggatgctgtcgatggcaaacagtggcccaaacacaaacggaagccagttcttcattacctatgcaaaacaacctcatctcaatggattatataccatctttggcaaagtcattcatggcttcgaagtgcttgacatcatggaaaagactcaaacaggtgcgggggataggccgcttgctgagataaggctaaaccgtgtgacaatccacgccaatccacttgctggttaa

SEQ ID NO: 1397 - protein, 160 aa, Brassica napus
MSVTLHTNLGDIKCEIFCDEVPKSAENFLALCASGYYDGTIFHRNIKGFMIQGGDPTGTGKGGTSIWAKKFNDEIRDSLKHNARGMLSMANSGPNTNGSQFFITYAKQPHLNGLYTIFGKVIHGFEVLDIMEKTQTGAGDRPLAEIRLNRVTIHANPLAG

SEQ ID NO: 1398 - DNA, 675 bp, Brassica napus
  CDS (1)..(675)
atgcgtagagagatctcgtttttgttacagcccaggtgccttcttctcctcgtcgcccttacgatcttcctcatcttcgcgctcttcaacgccggcaaggaggaggagaagcaagtaatccaggattttgaaatcacacacagagtgtttctcgatgttgatatcgacggccaacgcttaggcaggatcgttattggactatacggcactgttgtgcccaaaactgtagaaaacttcagggcgttatgcacaggagagaaggggaaaagttcaagcgggaagccactacactacaaaggaacaccgtttcataggataatatcaggattcgtaatccaaggaggagacatcatccatggtgatggcaaaggcagtgagtcaatctatggtggtaccttccctgacgaaaatttcaagatcaagcattcacatgcaggtgttgtagcgatggctaatacaggacctgattctaacggctcacagttctttatcactaccgtcaaggctagctggttggaaggggaacatgtggtgtttgggaaggtgatacaagggatggacaatgtgttcgccattgaaggtggagccggtacttacagtgggaaaccaaggaagaaagttgtgattgctgattctggagagatccctaaagacaaatgggatgaagaaagatga

SEQ ID NO: 1399 - protein, 224 aa, Brassica napus
MRREISFLLQPRCLLLLVALTIFLIFALFNAGKEEEKQVIQDFEITHRVFLDVDIDGQRLGRIVIGLYGTVVPKTVENFRALCTGEKGKSSSGKPLHYKGTPFHRIISGFVIQGGDIIHGDGKGSESIYGGTFPDENFKIKHSHAGVVAMANTGPDSNGSQFFITTVKASWLEGEHVVFGKVIQGMDNVFAIEGGAGTYSGKPRKKVVIADSGEIPKDKWDEER

SEQ ID NO: 1400 - DNA, 522 bp, Brassica napus
  CDS (1)..(522)
atggctaaccctaaggttttctttgatatgacggtgtgcggcaaaacggttggtcggatcgtgatggagctctttgccgacacgaccccacggacggcagagaatttccgcgccctctgtacaggcgagaaaggcatggggaagcttggtaagccactccattacaaaggatcaatcatccaccatatggcccccgattatatgattgctggtggagatttcactgacaaaaggaaaggaagcggaggcgaatcaatctacggcagtaggtttttcgaggatgagaacttcatcaaaaagcacactggtccgggtatcctctccatggccaaccgtggtcccgacaccaacgaatctcagtttatgatctgcatgaaggagagcccggaactggacgatgtacacgtggtgttcggtcaggttgttcaaggattggatgtggtcaggatcatttcaaacgaacctgttagggacacgctttccaggcccgtcgtgatcgccgactgcggtcagatttcatag

SEQ ID NO: 1401 - protein, 173 aa, Brassica napus
MANPKVFFDMTVCGKTVGRIVMELFADTTPRTAENFRALCTGEKGMGKLGKPLHYKGSIIHHMAPDYMIAGGDFTDKRKGSGGESIYGSRFFEDENFIKKHTGPGILSMANRGPDTNESQFMICMKESPELDDVHVVFGQVVQGLDVVRIISNEPVRDTLSRPVVIADCGQIS

SEQ ID NO: 1402 - DNA, 495 bp, Glycine max
  CDS (1)..(495)
atgtgggcaagcgcagaaggtggtgctccggaggttactctggaaacttccatgggttctttcaccgttgagctgtactacaagcatgcgccgaggacttgtaggaacttcattgaactgtctcgccgaggttactacgacaacgttaaattccacaggatcatcaaggacttcatagtacaaggtggggatcccactggaacaggaaggggaggagaatccatatatggtgcaaagtttgaagatgagataaaacgagagttgaagcacactggagctggaatcttatccatggcaaatgctggcccaaataccaatggtagtcagttctttattactctggcaccatgcccctctctcgatggaaaacacacaatatttggaagagtgtgtagggggatggaaattatcaaaagacttggcagcgtccaaacagataacaacgacaggcccatccatgacgttaagatactacgtacctcagtcaaggattag

SEQ ID NO: 1403 - protein, 164 aa, Glycine max
MWASAEGGAPEVTLETSMGSFTVELYYKHAPRTCRNFIELSRRGYYDNVKFHRIIKDFIVQGGDPTGTGRGGESIYGAKFEDEIKRELKHTGAGILSMANAGPNTNGSQFFITLAPCPSLDGKHTIFGRVCRGMEIIKRLGSVQTDNNDRPIHDVKILRTSVKD

SEQ ID NO: 1404 - DNA, 750 bp, Glycine max
  CDS (1)..(750)
atggcggctgcgtttacaagtacaagtgcaacactgagactgtcaaatgttggagagagcagaggtttgcagctgcgtaagtgtaaccctaatcctaataagctgaaggttatgggggggtttggaggttgttctggagtggcagtgggtgtgagagaaagaaaaggaattggaagggttagggttcgggttcgggcgagttcttcgtcggacgaggcagtgagtgcgcagtcaaaagtgactcagaaagtattctttgacgtcagtattggaaatccagttgggaagcttgtgggacgtattgtgattggactgtacggcgacgatgtcccccaaacggccgagaacttccgtgccctttgtactggagagaagggctttggctataagggctccaccttccatcgtgtcatcaaggatttcatgattcaaggaggagactttgacaaaggaaatggaactggaggcaaaagtatatatggtcgtactttcaaagatgagaattttaatttgtctcacactggaccgggtgttgttagcatggcaaatgcaggacccaacacaaatgggagtcagtttttcatatgcactgtcaagacaccttggctggatcagagacatgtagtatttgggcaagttttggaaggcatggatattgttaggttgatcgaatcacaggagacagataggggtgaccgtcctacaaagaaggtgaccatcagtgactgtggtgagcttccaaatgcttga

SEQ ID NO: 1405 - protein, 249 aa, Glycine max
MAAAFTSTSATLRLSNVGESRGLQLRKCNPNPNKLKVMGGFGGCSGVAVGVRERKGIGRVRVRVRASSSSDEAVSAQSKVTQKVFFDVSIGNPVGKLVGRIVIGLYGDDVPQTAENFRALCTGEKGFGYKGSTFHRVIKDFMIQGGDFDKGNGTGGKSIYGRTFKDENFNLSHTGPGVVSMANAGPNTNGSQFFICTVKTPWLDQRHVVFGQVLEGMDIVRLIESQETDRGDRPTKKVTISDCGELPNA

SEQ ID NO: 1406 - DNA, 1083 bp, Glycine max
  CDS (1)..(1083)
atggtgaaccctagatgcttcctcgacatcaccatcggcggcgagttagaaggcaggatcgtcgtcgagctcttccacgacgttgttcccaaaaccgccgagaatttccgcgccctctgcaccggcgaaaagggcatcggccccaacaccggcgtccccctccactataagggcatgtgtttccaccgcgtgatcaaagggttcatgatccagggcggcgacatctccgctggggatggcaccggtggggaatcaatctatggcgccaagttcgaggacgagaacttggagatgaagcacgagaggaaggggacgctttccatggccaatgcgggacccaacaccaacggctcccagttcttcatcaccaccacgcgcactcctcacttggacggaaagcacgtcgtgtttgggaaagttctgaaaggaatgggcattgttcgatctgtggaacacgttgttactggggagaatgaccgtcccactcaggatgttgtggtagttgattgtggggaaattgctgaaggggaagatgatggagttgttaacttctttaaggatggtgacacctatcccgattggcccgctgatctcgatgtcaaacctgatgaactttcttggtggatgagtgctgtggacgctatcaaaacccttgggaatgagcagtacaagaagctagattataagatggctctcagaaagtatcgcaaagctttgcgctatttggatgtgtgttgggagaaggaggacattgaccaagagaatagcgctgctttgagaaagacaaaatctcaaatctttacaaacagttctgcttgtaaattgaaattaggtgatctacaaggagcgttactggattcagactttgcgatgcatgacggagataatgcgaaagctctgtttcgcaaaggccaggcatatatgttactcaacgacctagatgctgctgttgaaagtttcaagaaagcattagagttggagccgaatgatggagggattaaaaaagagtatgccactgccaggaggagggttgctgatagacgtgatcaagagaaaaaagcttattctagaatgttcaaatag

SEQ ID NO: 1407 - protein, 360 aa, Glycine max
MVNPRCFLDITIGGELEGRIVVELFHDVVPKTAENFRALCTGEKGIGPNTGVPLHYKGMCFHRVIKGFMIQGGDISAGDGTGGESIYGAKFEDENLEMKHERKGTLSMANAGPNTNGSQFFITTTRTPHLDGKHVVFGKVLKGMGIVRSVEHVVTGENDRPTQDVVVVDCGEIAEGEDDGVVNFFKDGDTYPDWPADLDVKPDELSWWMSAVDAIKTLGNEQYKKLDYKMALRKYRKALRYLDVCWEKEDIDQENSAALRKTKSQIFTNSSACKLKLGDLQGALLDSDFAMHDGDNAKALFRKGQAYMLLNDLDAAVESFKKALELEPNDGGIKKEYATARRRVADRRDQEKKAYSRMFK

SEQ ID NO: 1408 - DNA, 495 bp, Brassica napus
  CDS (1)..(495)
atgacggcgagacctgaaggaagtcccccggaggttacactggagacctccatgggtccgttcaccgtcgagatgtattacaaacactccccgagaacttgccgtaacttcgtggagctatcacggagaggttactatgacaacgttctctttcacagaatcatcaaggatttcatcgtgcaaggtggagatcctactggaactggaagaggtggccaatccatttatggttccaagtttgaggacgagataaagcctgagttgaagcacacaggagctgggattttgtcaatggcaaacgctggtcccaacaccaatgggagtcagttcttcatcactttagcaccagcaccctccttggatggaaagcacacgatatttggcagagtatgccgtggtatggaggtgatcaagaggctcggtagtgtccaaaccgataacaccgacgggccaatccatgaagtgaagattctgaggaccaaagtggttgattag

SEQ ID NO: 1409 - protein, 164 aa, Brassica napus
MTARPEGSPPEVTLETSMGPFTVEMYYKHSPRTCRNFVELSRRGYYDNVLFHRIIKDFIVQGGDPTGTGRGGQSIYGSKFEDEIKPELKHTGAGILSMANAGPNTNGSQFFITLAPAPSLDGKHTIFGRVCRGMEVIKRLGSVQTDNTDGPIHEVKILRTKVVD

SEQ ID NO: 1410 - DNA, 516 bp, Brassica napus
  CDS (1)..(516)
atggttaaccctaaagttttcttcgacatgagcgtcggcgacaaacccgccggccgcatcgtgatggagctttacgccgacacaacccccgaaaccgccgagaatttccgcgccctctgcaccggcgagaagggagtcggcaaatccggaaagccgctccactacaagggctcggccttccaccgcgtgatccccaagttcatgtgccagggaggagatttcaccgccgggaacgggaccggaggagagtcgatctacggcatgaagttcaaggacgagaactttgtcaagaaacacaccggtccgggcatcctgtccatggccaacgctggtccgaacacgaacggatctcagtttttcatctgcactgagaagacgtcgtggctcgatgggaagcatgttgtgttcggtcaggttgttgaagggatggatgtcgttaggaacattgagaaggttggatctgacagtggaaggacctctaagaaggttgtgatcgctgactgtggtcagctttag

SEQ ID NO: 1411 - protein, 171 aa, Brassica napus
MVNPKVFFDMSVGDKPAGRIVMELYADTTPETAENFRALCTGEKGVGKSGKPLHYKGSAFHRVIPKFMCQGGDFTAGNGTGGESIYGMKFKDENFVKKHTGPGILSMANAGPNTNGSQFFICTEKTSWLDGKHVVFGQVVEGMDVVRNIEKVGSDSGRTSKKVVIADCGQL

SEQ ID NO: 1412 - DNA, 483 bp, Glycine max
  CDS (1)..(483)
atgtcggtgactctgcacacaaacctaggcgacatcaagtgtgaaatcttctgcgacgaggtccctaaaacctccgagaattttttagcgctatgtgcaagtggttactatgatgggactatatttcaccgcaacattaagggttttatgattcaaggtggagatccaactggaactggcaaagggggaaccagtatatggggcaagaaatttaacgatgagataagagaatctctgaagcacaatgcaagaggaatattagcaatggccaatagtggtccaaatactaatggaagccaatttttcttgacttatgcaaagcagcctcatttaaatgggctatacaccgtgtttggcaaagtaattcatggatttgaagttcttgatctcatggagaagacacaaacaggggcaggggaccgaccgcttgcagagataaggctcaatcgtgtaacaatacatgctaatccacttgctggttag

SEQ ID NO: 1413 - protein, 160 aa, Glycine max
MSVTLHTNLGDIKCEIFCDEVPKTSENFLALCASGYYDGTIFHRNIKGFMIQGGDPTGTGKGGTSIWGKKFNDEIRESLKHNARGILAMANSGPNTNGSQFFLTYAKQPHLNGLYTVFGKVIHGFEVLDLMEKTQTGAGDRPLAEIRLNRVTIHANPLAG

SEQ ID NO: 1414 - DNA, 495 bp, Glycine max
  CDS (1)..(495)
atggcaaatccaaaagttttctttgatatttctaccaagagtggaagtttaggcagaatcacatttgaacttaggaatgacgtcgtcccaagaacagcggaaaattttagggccttatgtaccggagaaaaagggtacggatacaaaggttgcaaattccatcgaattatacctgaatttatgatccaaggaggtgattttaccgctggaaacggaactggtggaaagtctatctatggtaataaatttgctgatgaaaactttactttgaaacatactggaccaggtatcctttctatggctaatgctggccctaacaccaatgggtctcaattctttatttgtactgttaagaccccttggttagatggaaaacatgtcgtctttggacatgttgttgatggtcttgatgtagtctcagaattagagaaacttggttcaagctctggaaaaacttccaaggaagtttggattgaagattgtggtgaatgctga

SEQ ID NO: 1415 - protein, 164 aa, Glycine max
MANPKVFFDISTKSGSLGRITFELRNDVVPRTAENFRALCTGEKGYGYKGCKFHRIIPEFMIQGGDFTAGNGTGGKSIYGNKFADENFTLKHTGPGILSMANAGPNTNGSQFFICTVKTPWLDGKHVVFGHVVDGLDVVSELEKLGSSSGKTSKEVWIEDCGEC

SEQ ID NO: 1416 - DNA, 540 bp, Triticum aestivum
  CDS (1)..(540)
atggcggccaagaaccccaaggtcttcttcgacatcctcatcggccaggccaaggcggggcgggtcatcatggagctctacgccgacaaggtgcccaggacggcggccaacttccggcagctctgcacgggcgaggccggcctgggcaagagcggcaagccgctgcactacaaggggtcggccttccaccgcatcatcccgggcttcatgtgccagggcggcgacttcacccgcggcaacggcaccggcggcgagtcggtctacggcgaaaagttcgccgacgagaacttcctcctccgccacacgggccccggcgtgctctccatggccaacgccgggcccggcaccaacggctcccagttcttcatctgcaccgccaagacgccctggctggacggcaagcacgtcgtgttcgggcaggtcgtggatgggtacggcgtcgtggagaagatggaggccgtcgggtcgtccggcggcgccaccgccgagcccgtcgtcatcgaggactgcggccagctcgccgacggcgaccagagctga

SEQ ID NO: 1417 - protein, 179 aa, Triticum aestivum
MAAKNPKVFFDILIGQAKAGRVIMELYADKVPRTAANFRQLCTGEAGLGKSGKPLHYKGSAFHRIIPGFMCQGGDFTRGNGTGGESVYGEKFADENFLLRHTGPGVLSMANAGPGTNGSQFFICTAKTPWLDGKHVVFGQVVDGYGVVEKMEAVGSSGGATAEPVVIEDCGQLADGDQS

SEQ ID NO: 1418 - DNA, 723 bp, Triticum aestivum
  CDS (1)..(723)
atggcgtgcaggccggccgtgtccaacccctccgcactcacgccggcgccgcgccgatgcgtcgtccttggccgcagcagcactaggggacgcgttgactgctccctccgctccagctccgcgggtgcggtcagactcggtgcgcgccgcgcccctgccgccgccttcgtcgtccgcgcggcggctgccgagggtgacttggatctccaggctaaggtgacgagcaaatgcttctttgacgtcgagatcggcggggaacgcgcaggcaaggtggtaattggactcttcggcgaggtcgtccctaggactgttgataacttccgcgccttgtgcactggagacaaaggttatggatacaagggctgctccttccaccgaattatcaaggatttcatgattcagggcggtgatttccagaacaacaatggtactggtgggagaagtatgtatggtgaatgctttgatgatgaaaattttacattaaagcatgttggtcctggtgtactaagcatggccaacgctggccctgacacaaatggaagtcagtttttcatttgcactgtgaagacaccatggttggacgaccgtcatgttgtgtttggacatgtgttggagggcatggacgttgtgagggagcttgaatcgcaagaaaccagcaggtccgatattcccaagcagccctgtcgaattgtggattgtggtgagctgcccttggacggctga

SEQ ID NO: 1419 - protein, 240 aa, Triticum aestivum
MACRPAVSNPSALTPAPRRCVVLGRSSTRGRVDCSLRSSSAGAVRLGARRAPAAAFVVRAAAAEGDLDLQAKVTSKCFFDVEIGGERAGKVVIGLFGEVVPRTVDNFRALCTGDKGYGYKGCSFHRIIKDFMIQGGDFQNNNGTGGRSMYGECFDDENFTLKHVGPGVLSMANAGPDTNGSQFFICTVKTPWLDDRHVVFGHVLEGMDVVRELESQETSRSDIPKQPCRIVDCGELPLDG

SEQ ID NO: 1420 - DNA, 651 bp, Triticum aestivum
  CDS (1)..(651)
atgctgcggaaggcggccgtcgggttcctcgcctgcctcgtgctctacctcgccttctcctcctacctccgtagccagagggctgcatatgttcagttaccagcagttactcacagggtatacctggacgtggaaattgatggccaaaatataggtagaattgtcattggtctttatggggaagttgtgccaaagacagttgaaaattttagagccctttgtacaggtgaaaagggtgatgggcccaagggtaaacctcttcactataaaggaacaccatttcatcgaatcatcccaggtttcatgattcagggtggtgacatagttagaggtgatgggaaagcaagcgaatctatatatggaggcaccttcccagatgagaatttcagtgtgaaacatacacatccaggtgttgttgctatggcaaattctggaactgattccaacggatcccagttctacataaccacaatcaagacaggctggttggatggggagcatgtggtctttggcagggtgattcagggaatggattatgtctacgccattgaagggggcgcaggcacttacaacggcaagccgaggaagaaggtgctgatcactgactctggtgagatacccaaggagaaatggggcgaggaagcagactga

SEQ ID NO: 1421 - protein, 216 aa, Triticum aestivum
MLRKAAVGFLACLVLYLAFSSYLRSQRAAYVQLPAVTHRVYLDVEIDGQNIGRIVIGLYGEVVPKTVENFRALCTGEKGDGPKGKPLHYKGTPFHRIIPGFMIQGGDIVRGDGKASESIYGGTFPDENFSVKHTHPGVVAMANSGTDSNGSQFYITTIKTGWLDGEHVVFGRVIQGMDYVYAIEGGAGTYNGKPRKKVLITDSGEIPKEKWGEEAD

SEQ ID NO: 1422 - DNA, 543 bp, Triticum aestivum
  CDS (1)..(543)
atgggtaacaaggttttcttcgatatctcctgggagggtcccgtcttccagaacggcaagccgacttccgaggtcaagaagcagaccggtcgcatcaacttcaacctcttcgacgatgtggtccccaagaccgctgagaacttccgcgctctctgcactggcgagaagggtttcggctacgagggctcttctttccaccgaatcatccctgacttcatgcttcagggtggtgacttcacccgtggcaacggcactggtggcaagtccatctacggtgagaagttcgctgacgagaacttcaccttgaagcacgacaagcctggtctgctctccatggccaacgccggccccaacaccaacggctcccagttcttcgtcaccaccgtcgtcacctcttggctcaacggccgccacgttgtcttcggtgaggtcgctgatgaagagtcccttaacgtcgtcaaggctcttgaagctactggctccggcagcggtgccatcaagtacagcgagaagcccaagatcgtcaagtccggtgagctgtaa

SEQ ID NO: 1423 - protein, 180 aa, Triticum aestivum
MGNKVFFDISWEGPVFQNGKPTSEVKKQTGRINFNLFDDVVPKTAENFRALCTGEKGFGYEGSSFHRIIPDFMLQGGDFTRGNGTGGKSIYGEKFADENFTLKHDKPGLLSMANAGPNTNGSQFFVTTVVTSWLNGRHVVFGEVADEESLNVVKALEATGSGSGAIKYSEKPKIVKSGEL

SEQ ID NO: 1424 - DNA, 795 bp, Glycine max
  CDS (1)..(795)
atgggtagaggaagatgcttcttggacattagcataggggaagagcttgaagggagaatagtggtggagctttatgatgatgttgttcccaaaactgctgagaatttcagagccctatgcactggtgagaaaggcattggttcaaatactggagtgccccttcatttcaagggatcttgctttcatcgtgttattaaaggcttcatgattcaaggaggtgatatatctgctggggatggtactggaggagaatctatatatggacttaagtttgaagatgaaaatttcgagttgaagcatgaaaggaaagggatgttatcaatggcaaactctggtcctgatactaatgggtctcagttttttatcagcactacccgaacatctcacctagatggtaagcatgttgtatttgggaaagtagttaaaggaatgggagtggtccgatcagttgagcatgttgcgaccggagacaatgatcgtcccactctagatgttaaaattgtggactgtggagaaattcctgaaggagaagatgatgggatatctaactttttcaaagatggagacacctatcccgactggccagcagaccttgatgagagccctaatgaacttgagtggtggatgaaatctgttgactcgattaaagcttttggcaatgattattacaggaaacaagattacaaaatggctctaaggaagtatcggaaggctttacgctacctggatatttgttgggagaaggaaggcattgatgaaggtatgctgcctttcacaactatttatttcacttaa

SEQ ID NO: 1425 - protein, 264 aa, Glycine max
MGRGRCFLDISIGEELEGRIVVELYDDVVPKTAENFRALCTGEKGIGSNTGVPLHFKGSCFHRVIKGFMIQGGDISAGDGTGGESIYGLKFEDENFELKHERKGMLSMANSGPDTNGSQFFISTTRTSHLDGKHVVFGKVVKGMGVVRSVEHVATGDNDRPTLDVKIVDCGEIPEGEDDGISNFFKDGDTYPDWPADLDESPNELEWWMKSVDSIKAFGNDYYRKQDYKMALRKYRKALRYLDICWEKEGIDEGMLPFTTIYFT

SEQ ID NO: 1426 - DNA, 621 bp, Linum usitatissimum
  CDS (1)..(621)
atgaactcgaaatctttggccgtcgctctgttatggggtgctctacttttcggaaccctagcgctcatccaggctaagaaatcggacgagaagttgaaagagatcactcataaagtttatttcgatgtagagatcgacggcaagcccgccggtcgcattaccatgggtctctatggcaaggcagttcctaagacagcagagaatttcagagcattgtgcacaggtgaaaagggcgttggaaagagtgggaaacctctacactacaagggtagctcattccacaggatcattcctagctttatgctccaaggaggtgacttcacacatggtgatggaagaggaggggagtcaatatatggggagaagttcgctgacgagaacttcaagttgaagcacactggccctggacttctgtcaatggcgaacgccggtaaagacaccaatggttcacagttcttcatcacaactgttacaactagctggctggacggcaggcacgtcgtgttcggaaaggtgctatccggaatggatgttgtgtacaaagttgaagcggaaggcaagcaaagtgggacaccaaagagcaaggtcgtcattgttgacagcggcgaactacctctataa

SEQ ID NO: 1427 - protein, 206 aa, Linum usitatissimum
MNSKSLAVALLWGALLFGTLALIQAKKSDEKLKEITHKVYFDVEIDGKPAGRITMGLYGKAVPKTAENFRALCTGEKGVGKSGKPLHYKGSSFHRIIPSFMLQGGDFTHGDGRGGESIYGEKFADENFKLKHTGPGLLSMANAGKDTNGSQFFITTVTTSWLDGRHVVFGKVLSGMDVVYKVEAEGKQSGTPKSKVVIVDSGELPL

SEQ ID NO: 1428 - DNA, 648 bp, Zea mays
  CDS (1)..(648)
atggagacaagcgggtggaggaggagagcggcggcgcgggcctcctggagccccgccacggtgtacctgtggctcgcgctcgccgcagcagcactgacgctcgcccaggctaagaaggacctaacggaggttacccacaaggtctacttcgatgtcgagattgacggcaagcccgcaggtcggattgtcatggggctttttgggaagactgttcctaagacagcagagaacttccgagctctttgcacaggagagaaaggaattggcaagagtggcaaagctctccactacaagggaagtacattccacagaatcattcccagcttcatgctccaaggaggtgacttcactcttggggatgggaggggtggtgaatctatctatggcatgaagtttgctgatgagaacttcaagatcaagcacactggaccaggccttctgtccatggccaatgctgggagagatacaaacggatctcagtttttcatcaccaccgtgacaacaagctggttggacgggaagcatattgtgtttggcaaggtgttgtctggaatggatgttgtgtacaaggtggaagctgaaggccggcagagcgggcaaccaaagagcaaggttgtcatagcagatagcggcgagctgccgatgtga

SEQ ID NO: 1429 - protein, 215 aa, Zea mays
METSGWRRRAAARASWSPATVYLWLALAAAALTLAQAKKDLTEVTHKVYFDVEIDGKPAGRIVMGLFGKTVPKTAENFRALCTGEKGIGKSGKALHYKGSTFHRIIPSFMLQGGDFTLGDGRGGESIYGMKFADENFKIKHTGPGLLSMANAGRDTNGSQFFITTVTTSWLDGKHIVFGKVLSGMDVVYKVEAEGRQSGQPKSKVVIADSGELPM

SEQ ID NO: 1430 - DNA, 531 bp, Hordeum vulgare
  CDS (1)..(531)
atggcggccaagaaccccaaggtcttcttcgacatcctcatcggccaggccaaggcggggcgcgtcgtcatggagctctacgccgacaaggtgccccggacggcggccaacttccggcagctctgcacgggcgaggcgggcaagggcaagagcggcaagccgctgcactacaagggatcccccttccaccgcatcattccgggcttcatgtgccagggcggcgacttcacccgcggcaacggcaccggcggcgagtctgtctacggcgaaaagttcgccgacgagaacttcctgctgcgccacacgggccccggcgtcctctccatggccaacgccggccccggcaccaacggctcccagtttttcatctgcaccgccaagacgccatggctcgacggcaagcacgtcgtcttcggacaggtggttgatggatacggcgtcgtcgagaagatggaggccgtcggctcgtccggcggcgccaccgctcagcccgtcgtcatcgaggattgcggccagctcgccgacgagtaa

SEQ ID NO: 1431 - protein, 176 aa, Hordeum vulgare
MAAKNPKVFFDILIGQAKAGRVVMELYADKVPRTAANFRQLCTGEAGKGKSGKPLHYKGSPFHRIIPGFMCQGGDFTRGNGTGGESVYGEKFADENFLLRHTGPGVLSMANAGPGTNGSQFFICTAKTPWLDGKHVVFGQVVDGYGVVEKMEAVGSSGGATAQPVVIEDCGQLADE

SEQ ID NO: 1432 - DNA, 651 bp, Hordeum vulgare
  CDS (1)..(651)
atgctgcggaaggcggccgtcgggttcctcgcctgcgtcgtgctctacctcgccttctcctcctacctccgtagccagagggctgcatatgttctgttaccagcagttactcacagggtatacctggacgtggaaattgatggccaaaatataggtagaattgtcatcggtctttatggggaagttgtgccaaaaacagttgaaaatttcagagccctttgtacaggtgaaaagggtgatgggcccaagggtaaacctcttcactataaaggaacaccgtttcatcgaatcatcccaggtttcatgattcagggtggtgacatagttagaggtgatgggaaatcaagcgagtctatatatggaggcaccttcccagatgagaatttcagtgtgaaacacacacatccaggtgttgttgctatggcaaattctggaactgattccaacggatcccagttctacataaccacaatcaagacaggctggttggatggggagcatgtagtctttggcagggtgattcagggaatggattatgtctacgccatcgaagggggcgcagggacgtacagcggcaagcccaggaagaaggtgctgatcactgactctggtgagatacccaaggagaaatgggatgaggaaattcagtag

SEQ ID NO: 1433 - protein, 216 aa, Hordeum vulgare
MLRKAAVGFLACVVLYLAFSSYLRSQRAAYVLLPAVTHRVYLDVEIDGQNIGRIVIGLYGEVVPKTVENFRALCTGEKGDGPKGKPLHYKGTPFHRIIPGFMIQGGDIVRGDGKSSESIYGGTFPDENFSVKHTHPGVVAMANSGTDSNGSQFYITTIKTGWLDGEHVVFGRVIQGMDYVYAIEGGAGTYSGKPRKKVLITDSGEIPKEKWDEEIQ

SEQ ID NO: 1434 - DNA, 630 bp, Hordeum vulgare
  CDS (1)..(630)
atgtttataaactaccgatcaccgctatcaattatattagcccttgcaattgggctagtattctggtcccgatctgttaacgcactcaaaggacccaaaattactagcaaagtatattttgatattctccatggggaaaaagagctaggacgcatagttattggcctctacggcggtactgtcccgattacagcagagaactttcgagctttggcaaccggcgaaaaaggaggagacttaacatttgaaggatcaacctttcaccgtgtaatcaagaacttcatgatacaaggaggagattttacaaagggtgatggtacaggtggaaagtcaatatacggtgataaatttgccgacgagaacttcaagttgaaacactctcgaaagggtcttctctctatggccaacgcgggaaaagataccaatggctctcaattctttattaccacctccacacctggttatctcgacggcagacacgtcgtttttggagaagtcatggaaggctacgaaatagttgaaaaaatcgaggatgttcccaaaaatggtgaaaagccaaaagaagctgtcaagatagctaaatgtggagaattgcctgtagctgaagaaggtattcacgtcgaactctaa

SEQ ID NO: 1435 - protein, 209 aa, Hordeum vulgare
MFINYRSPLSIILALAIGLVFWSRSVNALKGPKITSKVYFDILHGEKELGRIVIGLYGGTVPITAENFRALATGEKGGDLTFEGSTFHRVIKNFMIQGGDFTKGDGTGGKSIYGDKFADENFKLKHSRKGLLSMANAGKDTNGSQFFITTSTPGYLDGRHVVFGEVMEGYEIVEKIEDVPKNGEKPKEAVKIAKCGELPVAEEGIHVEL

SEQ ID NO: 1436 - DNA, 483 bp, Hordeum vulgare
  CDS (1)..(483)
atgtcggtgacgctgcacacgaacctgggggacatcaaggtggaggttttctgcgaccaggtgccgcggacggcggagaacttcctggccctgtgcgccagcggctactacgacgggacggtgttccaccgcaacatcaaggggttcatggtgcagggcggcgacccgacggggacgggcaagggcggggcgtccatctggggcggcaagttcgcggacgagttccgggaggcgctcaagcacggggcgaggggcaccctgtccatggccaactcggggcccaacaccaacggcagccagttcttcatcacctacgccaagcagccccacctcaacggccactacaccgtgttcgccaaggtcatccacggcttcgacgtgctcgacctcatggagaagacccccaccggccccgccgaccgccccctcgccgagatccgcctcaaccgcgtcaccgtccacgccaacccgctcgccggataa

SEQ ID NO: 1437 - protein, 160 aa, Hordeum vulgare
MSVTLHTNLGDIKVEVFCDQVPRTAENFLALCASGYYDGTVFHRNIKGFMVQGGDPTGTGKGGASIWGGKFADEFREALKHGARGTLSMANSGPNTNGSQFFITYAKQPHLNGHYTVFAKVIHGFDVLDLMEKTPTGPADRPLAEIRLNRVTVHANPLAG

SEQ ID NO: 1438 - DNA, 1086 bp, Helianthus annuus
  CDS (1)..(1086)
atggcgaatccgagatgttatttggatattagcattggaggagagcttgaaggaaggttagttgtggaactatataaagatattgttccgaaaaccgctgagaattttagggctctatgtactggtgagaaggggattggacctaacactggtgttcctcttcatttgaagggttcatgctttcatcgtgttattaaaggctttatgatccaaggtggtgacatatccgctcgaaatggcactgggggagaatcaatctatggcttgaagtttgaagatgagaattttgaattgaagcatgaaagaaaagggatgctatccatggctaattctggtcctaacactaatggctctcaatttttcatcacaactactcgcactcctcatctagatgggaaacatgttgttttcgggagggttatcaaaggaatgggaatagttcgttcagtggagcatactactactggagaaaatgatgtacctactttagatgttattatcgaagattgtggggaaattcctgaaggagcagatgatggagtgtgtgactttttcaaggacggtgacacttatcctgattggccacttgatcttgatagtaagccagaggatgtttcttggtggatgaatgctgttgatgccattaaaattatggggaatgaacagttcaagaaacaagattacaaaagtgctcttagaaagtatcgcaaggctctccgatacttggatatctgctgggagaaggaagatattgatgaaggaaaaacggattctctaaggaaaacaaagtctcaaatatttaccaacagctctgcttgcaagttgaaattgggagatctgaaaggagcattattggatgcggactttgcacttcgtgagatagatgataatgtgaaagctctatatcgtcaaggacaggcaagcatggctctcaatgacatagattctgcagttgaaagtttcaagaaagcactggtcttggaacctaatgatgctggtataaagaaggagctagctgctgcaaagaaaaagattgctgatagacgtcaacaagaaaagaaggcgtttgcaaaaatgtttcagtag

SEQ ID NO: 1439 - protein, 361 aa, Helianthus annuus
MANPRCYLDISIGGELEGRLVVELYKDIVPKTAENFRALCTGEKGIGPNTGVPLHLKGSCFHRVIKGFMIQGGDISARNGTGGESIYGLKFEDENFELKHERKGMLSMANSGPNTNGSQFFITTTRTPHLDGKHVVFGRVIKGMGIVRSVEHTTTGENDVPTLDVIIEDCGEIPEGADDGVCDFFKDGDTYPDWPLDLDSKPEDVSWWMNAVDAIKIMGNEQFKKQDYKSALRKYRKALRYLDICWEKEDIDEGKTDSLRKTKSQIFTNSSACKLKLGDLKGALLDADFALREIDDNVKALYRQGQASMALNDIDSAVESFKKALVLEPNDAGIKKELAAAKKKIADRRQQEKKAFAKMFQ

SEQ ID NO: 1440 - DNA, 492 bp, Helianthus annuus
  CDS (1)..(492)
atgccaggcgcagaaggaggtccaccggaggtaactctcgaaacatccatgggctctttcaccgttgagatgtacgataagcacgcacctaggacttgcaaaaacttcattgaactgtctcgaaggggctactacaacaacgttaagtttcacagaatcattaaggattttattgttcaaggaggtgatcccactggcactggtagaggtggagaatctatttacggttcaaagtttgaggatgagatcaccccaaagttgaagcatacgggagctggtatcttatctatggctaatgctggtccgaatacaaatggaagtcagttctttatcacattggccccagcgcaatcgcttgatggaaagcacacgatatttggaagagtgtgcagaggaatggagattgtcaagagacttggtagtgttcagactgataataccgacaggccaattcatgacgtgaagatactacggacagcagttaaggattga

SEQ ID NO: 1441 - protein, 163 aa, Helianthus annuus
MPGAEGGPPEVTLETSMGSFTVEMYDKHAPRTCKNFIELSRRGYYNNVKFHRIIKDFIVQGGDPTGTGRGGESIYGSKFEDEITPKLKHTGAGILSMANAGPNTNGSQFFITLAPAQSLDGKHTIFGRVCRGMEIVKRLGSVQTDNTDRPIHDVKILRTAVKD

SEQ ID NO: 1442 - DNA, 483 bp, Brassica napus
  CDS (1)..(483)
atgtcagtaacattgcacacgaatctgggggatataaagtgcgagatcttctgtgacgaggttcccaagagtgccgagaactttctggcgctatgtgcaagtgagtattacgatgggacaatctttcacaggaatatcaaaggcttcatgattcaaggcggagacccaaccggaactgggaaaggaggaactagcatctggggaaagaaattcaatgacgagattcgtgactccctcaagcacaatgcaagagggatgctgtcgatggcaaacagtggcccaaacacaaacggaagccagttcttcattacctatgcaaaacaacctcatctcaatggactatacaccatctttggcaaagtcattcatggcttcgaagtacttgacatcatggaaaagactcaaacaggtgcgggagataggccgcttgctgagataaggctaaaccgtgtgacaatccacgccaatccacttgctggttaa

SEQ ID NO: 1443 - protein, 160 aa, Brassica napus
MSVTLHTNLGDIKCEIFCDEVPKSAENFLALCASEYYDGTIFHRNIKGFMIQGGDPTGTGKGGTSIWGKKFNDEIRDSLKHNARGMLSMANSGPNTNGSQFFITYAKQPHLNGLYTIFGKVIHGFEVLDIMEKTQTGAGDRPLAEIRLNRVTIHANPLAG

SEQ ID NO: 1444 - DNA, 519 bp, Brassica napus
  CDS (1)..(519)
atggcgtttcctaaagttttcttcgacatgaccgtcgacggcaagcccgcgggaaggatcgtgatggagctgtacaccgacaagactcccaagactgctgagaatttcagagctctctgcacgggtgagaagggagtcgggagcaaaggcaagcctcttcacttcaaggggtcttccttccaccgcgtgatccctaacttcatgtgtcagggaggagatttcacggccgggaacgggacgggaggcgagtccatctacggggagaagttcgccgacgagaatttcgagaggaagcacaccggtcctgggatcctctccatggccaacgctggtcccaacaccaacgggtctcagttctttatctgcactgttaagaccgattggcttgatggtaagcatgtggtgttcgggcaggtggtggaagggttagacgtggtgaaggcgatcgagaaggtggggtcggcttctggaaagccgtcgaagccggtggtcgtggccgactgtggtcagctctcttag

SEQ ID NO: 1445 - protein, 172 aa, Brassica napus
MAFPKVFFDMTVDGKPAGRIVMELYTDKTPKTAENFRALCTGEKGVGSKGKPLHFKGSSFHRVIPNFMCQGGDFTAGNGTGGESIYGEKFADENFERKHTGPGILSMANAGPNTNGSQFFICTVKTDWLDGKHVVFGQVVEGLDVVKAIEKVGSASGKPSKPVVVADCGQLS

SEQ ID NO: 1446 - DNA, 495 bp, Brassica napus
  CDS (1)..(495)
atgacggcgagacctgaaggaagtcccccggaggttacacttgaaacctccatgggtccgttcaccgtcgagatgtattacaaacactccccgagaacttgccggaacttcgtggagctatcaaggagaggttactatgacaacgttctctttcacaggatcatcaaggatttcatcgtgcaaggtggagatcctactggaactggaaggggtggccaatccatttacggttccaagtttgaggacgagataaagcctgagttgaagcacacaggagctgggattttgtcaatggcaaacgctggtcccaacaccaacgggagtcagttcttcatcactttagctccggcaccgtccttggatggaaagcacacgatatttggcagagtatgccgtggtatggaggtgatcaagaggctcggtagtgtccaaaccgataacaccgacaggccaatccatgaagtgaagattctgagggccaaagtggttgattag

SEQ ID NO: 1447 - protein, 164 aa, Brassica napus
MTARPEGSPPEVTLETSMGPFTVEMYYKHSPRTCRNFVELSRRGYYDNVLFHRIIKDFIVQGGDPTGTGRGGQSIYGSKFEDEIKPELKHTGAGILSMANAGPNTNGSQFFITLAPAPSLDGKHTIFGRVCRGMEVIKRLGSVQTDNTDRPIHEVKILRAKVVD

SEQ ID NO: 1448 - DNA, 606 bp, Brassica napus
  CDS (1)..(606)
atggcgaggtcagtgaagctgcttctatggagtcttcttcttctgggaaccctatgcactattcaggccaaaaagtcaaaggaaaagatcacacacaaggtttatttcgatgtcgaaattaatggcaaagaagccggtcgtattgtcatgggtctatttggcaagacagtccccaaaactgctgagaatttccgagctttgtgcacaggggagaaaggaatgggtaagaaagggaaggctctacattacaaggggagttccttccataggatcataccaagctttatgctccagggaggcgactttactgatggaaatggtatgggaggtgaatctatttatggcgagaagtttgctgatgagaacttcaaactcaagcatactggtccagggtatctatcaatggcaaacgctggtgaagacaccaacggatcacagtttttcatcacaacagtaacaacaagctggttggacgggaggcacgtagtgttcgggaaggtagttacaggaatggacgtggtgtacaagatcgaagctgaggagagtcagagtggaactcctaagagtaaagttgtgattgttgacagtggcgagcttcctctgtaa

SEQ ID NO: 1449 - protein, 201 aa, Brassica napus
MARSVKLLLWSLLLLGTLCTIQAKKSKEKITHKVYFDVEINGKEAGRIVMGLFGKTVPKTAENFRALCTGEKGMGKKGKALHYKGSSFHRIIPSFMLQGGDFTDGNGMGGESIYGEKFADENFKLKHTGPGYLSMANAGEDTNGSQFFITTVTTSWLDGRHVVFGKVVTGMDVVYKIEAEESQSGTPKSKVVIVDSGELPL

SEQ ID NO: 1450 - DNA, 519 bp, Brassica napus
  CDS (1)..(519)
atggcgttcccaaaggttttcttcgatataagcataaacggccaggcagcgggaaggatcgtgatggagttgtatacggataagactccgaagacggctgagaatttcagagctctgtgcactggagagaagggagtggggcgtaagggaaaaccccttcacttcaagggatcctccttccaccgagtgatccccaatttcatgtgccagggaggtgatttcaccgccgggaacgggacaggaggtgagtccatctacggtgataagttcgaggacgagaactttgagaggaagcacaccggtcccggtaacctttccatggcgaacgccggagctaacaccaacggatctcagttcttcatctgcaccgtaaaaacagattggcttgacggtaagcacgtggtgttcgggcaggtggtggaagggttagacgtggtgaaggcgatcgagaaggtgggatcgtcgtctggaaagccgtcgaagccggtggttatcgccgattgtggacagctctcttag

SEQ ID NO: 1451 - protein, 172 aa, Brassica napus
MAFPKVFFDISINGQAAGRIVMELYTDKTPKTAENFRALCTGEKGVGRKGKPLHFKGSSFHRVIPNFMCQGGDFTAGNGTGGESIYGDKFEDENFERKHTGPGNLSMANAGANTNGSQFFICTVKTDWLDGKHVVFGQVVEGLDVVKAIEKVGSSSGKPSKPVVIADCGQLS

SEQ ID NO: 1452 - DNA, 1086 bp, Brassica napus
  CDS (1)..(1086)
atgggcaagtcaaagtgtttcatggacattagcattggaggcgagctcgaaggcagaatcatcatcgagctctacgacgacctcgtccccaaaaccgccgagaatttccgatcgctttgcaccggcgacaaaggcatcggccccaacaccggcgtccctctccactacaaggggaatcgattccaccgtgtaatcaaggggtttatgattcaaggaggggacatatcagccaatgatggcactggtggtgaatctatctacgggttaaagtttcaagatgagaactttgacctcaaacatgagagaaaagggatgctctctatggctaactctggccccaacactaacggctctcagtttttcatcaccaccactcgcacttctcacctcgatgggaaacatgttgtctttggaagggttaccaaagggatgggagtggttcgttccattgagcatgtttcaaccgaggaaaacgcttgtccttctctggatgtcgtgattcatgactgtggggtgattcccgagggccaagatgatggcatctgtaacttcttcaacgacggtgatgtgttccctgactggcctgttgatcttaatgaaagccctcttgagttgtcttggtggatggagactgttgactctgtcaaggctagtggtaacgaccactttaagaaacaagactacaagatggctcttagaaagtaccgcaaggcttgccgttatctggatatttgctgggagaaagatggcattgaccaagagaccagcactgccttgcgtaagacaaagtcgcagatcttcactaacagtgctgcctgcaaactgaaatttggagatgctaagggagcattgttggacactgagtttgctatgcgtgatgaagataacaatgtcaaagcattgtttcgacagggccaggcatacatggctctcaataacatcgatgctgctgctgaaagcctggagaaagctcttcaattcgaacctaacgatgctggtctcaagaaagaatatgctgctgtaatgaaaaagattgccattagagacaataaagagaaaaagcagtaccgcaaaatgtttggatag

SEQ ID NO: 1453 - protein, 361 aa, Brassica napus
MGKSKCFMDISIGGELEGRIIIELYDDLVPKTAENFRSLCTGDKGIGPNTGVPLHYKGNRFHRVIKGFMIQGGDISANDGTGGESIYGLKFQDENFDLKHERKGMLSMANSGPNTNGSQFFITTTRTSHLDGKHVVFGRVTKGMGVVRSIEHVSTEENACPSLDVVIHDCGVIPEGQDDGICNFFNDGDVFPDWPVDLNESPLELSWWMETVDSVKASGNDHFKKQDYKMALRKYRKACRYLDICWEKDGIDQETSTALRKTKSQIFTNSAACKLKFGDAKGALLDTEFAMRDEDNNVKALFRQGQAYMALNNIDAAAESLEKALQFEPNDAGLKKEYAAVMKKIAIRDNKEKKQYRKMFG

SEQ ID NO: 1454 - DNA, 516 bp, Brassica napus
  CDS (1)..(516)
atggttaaccctaaagtttacttcgacatgaccgtcggcgacaaagccgccggacgcatcgtcatggagctttacgccgacacagtccccgagacggccgagaacttccgtgccctctgcaccggcgagaaaggaatcggcaaatccgggaagccgctccactacaagggctcggctttccaccgcgtgatccccaagttcatgtgccagggaggagatttcaccgccgggaacggaaccggaggagagtcgatctacggcatgaagttcaaagacgagaactttgtcaagaagcacaccggtccgggtattctctccatggccaacgctggttcgaacacgaacggatctcagtttttcatttgcactgagaagacatcgtggctcgacgggaagcatgttgtgttcggtcaagttgtcgaagggatggatgtcgttagagacattgagaaggttggatctgacagtggaaggacttctaagaaggttgtgatcgctgactgtggtcagctttag

SEQ ID NO: 1455 - protein, 171 aa, Brassica napus
MVNPKVYFDMTVGDKAAGRIVMELYADTVPETAENFRALCTGEKGIGKSGKPLHYKGSAFHRVIPKFMCQGGDFTAGNGTGGESIYGMKFKDENFVKKHTGPGILSMANAGSNTNGSQFFICTEKTSWLDGKHVVFGQVVEGMDVVRDIEKVGSDSGRTSKKVVIADCGQL

SEQ ID NO: 1456 - DNA, 675 bp, Brassica napus
  CDS (1)..(675)
atggcgataacggcgactagattggtatctctgactctcttgtggatcgtcgtcctcttcgtcacacttgctctcatccagattaaattgactgatgttgctgatcctatggtcaatgagaaggttgctgatcaggtaggagaggatttagaaggagttacccacaaagtttactttgatattcagatcaatggttcacctgcagggaggattctcattgggctttttgggaagatagttcctaaaactgcagagaactttcgagcgctttgcacgggagagaaaggagttgggaacatggggaagcctctttatttcaaaggaagtaccttccataggatcattcctagcttcatgattcagggtggagacttcacacgaggcgatgggagaggtggagagtcgatctatggggataaatttgcagatgaaaacttcaaactcaaacacaccgggccaggggtcttatcaatggcaaactctggaccagactccaacggttcacagttctttatcacaaccgtcaccacgggttggttggacggacatcacgttgtgtttgggaaggtattgtctggaatggaagtagtgcgcaagatcgaagctcaaggacaaagcagtggagagcccaaaggaaaagttatcattttggacagtggagaagtttctttgtaa

SEQ ID NO: 1457 - protein, 224 aa, Brassica napus
MAITATRLVSLTLLWIVVLFVTLALIQIKLTDVADPMVNEKVADQVGEDLEGVTHKVYFDIQINGSPAGRILIGLFGKIVPKTAENFRALCTGEKGVGNMGKPLYFKGSTFHRIIPSFMIQGGDFTRGDGRGGESIYGDKFADENFKLKHTGPGVLSMANSGPDSNGSQFFITTVTTGWLDGHHVVFGKVLSGMEVVRKIEAQGQSSGEPKGKVIILDSGEVSL

SEQ ID NO: 1458 - DNA, 1086 bp, Brassica napus
  CDS (1)..(1086)
atgggcaagtcaaagtgtttcatggacattagcattggaggcgagctcgaaggcagaatcatcatcgagctctacgacgacctcgtccccaaaaccgccgagaatttccgatcgctttgcaccggcgacaaaggcatcggccccaacaccggcgtccctctccactacaaggggagtcgattccatcgtgtaatcaaggggtttatgattcaaggtggggacatatcagccaatgatggcactggtggtgaatctatctacgggttaaagtttgaagatgagaactttgacctcaaacatgagagaaaagggatgctctctatggctaactctggccccaacactaatggctctcagtttttcatcaccaccactcgcacttctcatctcgatgggaaacatgttgtctttggaagggttaccaaagggatgggagtggttcgttccattgagcatgtttcaaccgaggaaaacgcttgtccttctctggatgtcgttattcatgactgtggggtgattcccgagggcgaagatgatgggatctgtaacttcttcaaggacggtgatgtgttccctgactggcctgttgatcttaatgaaagccctcttgagttgtcttggtggatggagactgttgactctgtcaaggctagtggtaacgagcactttaagaaacaagactacaagatggctcttagaaagtaccgcaaggctttgcgttatctggatatttgctgggagaaagatggcattgaccaagagaccagcactgccttgcgtaagacaaagtcgcagatcttcactaacagtgctgcctgcaaactgaaatttggagatgctaagggagcattgttggacactgagtttgctatgcgtgatgaagataacaatgtcaaagcattgtttcgacagggccaggcatacatggctctcaataacatcgatgctgctgctgaaagcctggagaaagctcttcaattcgaacctaacgatgctggtctcaagaaagaatatgctgctgtaatgaaaaagattgccattagagacaataaagagaaaaagcagtaccgcaaaatgtttggatag

SEQ ID NO: 1459 - protein, 361 aa, Brassica napus
MGKSKCFMDISIGGELEGRIIIELYDDLVPKTAENFRSLCTGDKGIGPNTGVPLHYKGSRFHRVIKGFMIQGGDISANDGTGGESIYGLKFEDENFDLKHERKGMLSMANSGPNTNGSQFFITTTRTSHLDGKHVVFGRVTKGMGVVRSIEHVSTEENACPSLDVVIHDCGVIPEGEDDGICNFFKDGDVFPDWPVDLNESPLELSWWMETVDSVKASGNEHFKKQDYKMALRKYRKALRYLDICWEKDGIDQETSTALRKTKSQIFTNSAACKLKFGDAKGALLDTEFAMRDEDNNVKALFRQGQAYMALNNIDAAAESLEKALQFEPNDAGLKKEYAAVMKKIAIRDNKEKKQYRKMFG

SEQ ID NO: 1460 - DNA, 675 bp, Brassica napus
  CDS (1)..(675)
atggcgataacggcgacaagattggtatctctgactctcttgtggatagtcgtcctcttcgtaacacttgctctcatccagattaaattgactgatgttgctgatcctatggtcagtgagaaggttgctgatcaggtaggagaggatttagaaggagttacccacaaagtttactttgatattcagatcaatggttcacctgcagggaggattctcattgggctttttgggaagatagttcctaaaactgcagagaactttcgagcgctttgcacgggagagaaaggagttgggaacatggggaagcctctttatttcaaaggaagtaccttccataggatcattcctagcttcatgattcagggtggagacttcacacgaggcgatgggagaggtggagagtcgatctatggggataaatttgcagatgaaaacttcaaactcaaacacaccgggccaggggtcttatcaatggcaaactctggaccagactccaacggttcacagttctttatcacaaccgtcaccacaaattggttggatggacatcacgttgtgtttgggaaggtaatgtcaggcatggaagtagtgcgcaagatcgaagctcaaggacaaagcagtggagagcccaaaggaaaagttatcattttggacagtggagaagtttctttgtaa

SEQ ID NO: 1461 - protein, 224 aa, Brassica napus
MAITATRLVSLTLLWIVVLFVTLALIQIKLTDVADPMVSEKVADQVGEDLEGVTHKVYFDIQINGSPAGRILIGLFGKIVPKTAENFRALCTGEKGVGNMGKPLYFKGSTFHRIIPSFMIQGGDFTRGDGRGGESIYGDKFADENFKLKHTGPGVLSMANSGPDSNGSQFFITTVTTNWLDGHHVVFGKVMSGMEVVRKIEAQGQSSGEPKGKVIILDSGEVSL

SEQ ID NO: 1462 - DNA, 519 bp, Brassica napus
  CDS (1)..(519)
atggctaacccaagagtcttcttcgacatgaccctcgacggcgcccccgccggccgcatcgtgatggagctttacaaagacacgaccccgaacaccgccgagaacttccgagccctctgcaccggcgagaaaggtgtcggaaagaaggggaagcctctccacttcaagggatcggccttccaccgcgtgatccccgggttcatgtgccagggaggcgatttcaccgccgggaacgggaccggcggggagtcgatctacggcgataagttcaaggacgagaacttcgcgaagaagcacaccggggcggggatcctctccatggcgaactctggtcccaacactaacggatctcagttttttatctgcaccgcggagacgtcgtggctcgatgggaagcacgtggtgtttgggaaggttgttgaaggtatggaggttgtgaaggcgatcgagaaggttggatcgtcttctgggacgacgaagaagaaggttgttgttgctgattgtggtcaggttgcttag

SEQ ID NO: 1463 - protein, 172 aa, Brassica napus
MANPRVFFDMTLDGAPAGRIVMELYKDTTPNTAENFRALCTGEKGVGKKGKPLHFKGSAFHRVIPGFMCQGGDFTAGNGTGGESIYGDKFKDENFAKKHTGAGILSMANSGPNTNGSQFFICTAETSWLDGKHVVFGKVVEGMEVVKAIEKVGSSSGTTKKKVVVADCGQVA

SEQ ID NO: 1464 - DNA, 777 bp, Brassica napus
  CDS (1)..(777)
atggcttctttgtcttcaatgcagatggttcacacttctcagattggtgttaagtcgcagttagtttcttctgcaaaccgaacatctcaatcagtttgtgtcggagctcgctcctctggttctgcattgtcttcgagactacactatgcagcaagtttccctctcaagaagcaattcccaggagcttatgcgaccatcaagaaccagagaacagcttgtgttaaatcaatggcagctgaggaagaggaagtgatagaacctcaggctaaagtgacgaacaaggttttctttgatgttgagattggtggtgaagtcgctggaaggattgagatgggtctgttcggtgacgtcgtgcctaaaaccgttgagaacttccgtgtcttgtgtactggtgagaagaagtatggatacaaaggttcttctttccatcgtattattaaagatttcatgatccaaggaggtgacttcaccgagggaaatggtactggaggaattagtatctatggtgccaagtttgaagatgaaaacttcactttgaagcatactggacctggaatcttgagtatggccaacgctggtcccaatactaatggaagccagttcttcatttgcactgtcaagactccatggttagacaacaagcatgttgtgtttggacaagtcattgaaggtatgaagcttgttaggacacttgaatctcaggagacacgcgccttcgatgttcccaagaaaggttgcagaatctatgcctgtggagagctccctctggatgcttga

SEQ ID NO: 1465 - protein, 258 aa, Brassica napus
MASLSSMQMVHTSQIGVKSQLVSSANRTSQSVCVGARSSGSALSSRLHYAASFPLKKQFPGAYATIKNQRTACVKSMAAEEEEVIEPQAKVTNKVFFDVEIGGEVAGRIEMGLFGDVVPKTVENFRVLCTGEKKYGYKGSSFHRIIKDFMIQGGDFTEGNGTGGISIYGAKFEDENFTLKHTGPGILSMANAGPNTNGSQFFICTVKTPWLDNKHVVFGQVIEGMKLVRTLESQETRAFDVPKKGCRIYACGELPLDA

SEQ ID NO: 1466 - DNA, 759 bp, Brassica napus
  CDS (1)..(759)
atgactctgtcaaatccgaaggctttctcagctgctccacgaagactttctccgatcaacgcctccgctccctcttccaccactttccgattgaacaccaaatctaccgtcaacttcatcaagtttccgtctttaaccgcatcatctctcctcctccatacatcttccaccaagagaaaccgccgcagctgcttatcggttcaatccagtgctgagcctttagcggagccacaatcgaagataacgcataaggtgtatttcgatataagtgttgggaacccagttgggaaattggctgggaggattgttattggtttgtttggtgatgatgttccccaaactgttgagaacttccgtgctctttgcacaggtgagaaggggtttggctacaagggctcaacattccaccgtgtcatccgagatttcatgattcagggtggagactttgacaagggcaatggaactggaggtaaaagtgtatatggtcggacatttaaggatgagaatttcaatttatcccatgtcggacccggagttgtgagtatggcaaatgctggccctaatacaaatggaagtcagttcttcatctgcactgttaagacttcatggttggacgggaggcatgtggtgttcgggcaagttatagaaggaatggatgtcgtgaggctgatagaggaacaagagacagatagaggagaccgtcccagaaagaaagtggtcattgcagactgtggtcaacttccaatgtctgaagcttaa

SEQ ID NO: 1467 - protein, 252 aa, Brassica napus
MTLSNPKAFSAAPRRLSPINASAPSSTTFRLNTKSTVNFIKFPSLTASSLLLHTSSTKRNRRSCLSVQSSAEPLAEPQSKITHKVYFDISVGNPVGKLAGRIVIGLFGDDVPQTVENFRALCTGEKGFGYKGSTFHRVIRDFMIQGGDFDKGNGTGGKSVYGRTFKDENFNLSHVGPGVVSMANAGPNTNGSQFFICTVKTSWLDGRHVVFGQVIEGMDVVRLIEEQETDRGDRPRKKVVIADCGQLPMSEA

SEQ ID NO: 1468 - DNA, 483 bp, Brassica napus
  CDS (1)..(483)
atgtcagtaacattgcacacgaatctgggggatataaagtgcgagatcttctgtgacgaggttcccaagagtgccgagaactttctggcgctatgtgcaagtgggtattacgatgggacaatctttcacaggaatatcaaaggcttcatgattcaaggcggagacccaaccggaactgggaaaggaggaactagcatctggggaaagaaattcaatgacgagattcgtgactcccttaagcacaatgcaagagggatgctgtcgatggcaaacagtggaccaaacacaaacggaagccagttcttcataacctatgcaaaacaacctcatctcaatggactatacaccatctttggcaaagtcattcatggcttcgaagtgcttgacatcatggaaaagactcaaacaggtgcgggagataggccgcttgctgagataaggctaaaccgtgtgacaatccacgccaatccacttgctggttaa

SEQ ID NO: 1469 - protein, 160 aa, Brassica napus
MSVTLHTNLGDIKCEIFCDEVPKSAENFLALCASGYYDGTIFHRNIKGFMIQGGDPTGTGKGGTSIWGKKFNDEIRDSLKHNARGMLSMANSGPNTNGSQFFITYAKQPHLNGLYTIFGKVIHGFEVLDIMEKTQTGAGDRPLAEIRLNRVTIHANPLAG

SEQ ID NO: 1470 - DNA, 534 bp, Brassica napus
  CDS (1)..(534)
atggcaaacccgaaggtcttctttgacatcttgataggaaagatgaaggcgggtcgtgttgtgatggagctattcgcagatgtgacaccgagaacagctgataacttccgtgctctgtgcacaggagagaagggtattgggcaagcagggaaggcactacactacaaaggctcagcctttcaccgtatcatcccagggttcatgtgccaaggaggagacttcacccgcgggaatggaaccggtggagaatcgatttacggggctaagtttcaggacgagaacttcaagttgaagcacactggtccggggattttgtctatggctaattcaggccccaacacgaacggttctcagttctttatctgcactgataagacagcttggctcgatgggaagcacgtggtgtttgggaaagtcgttgatgggtacgatgtggtgaaggcgatggagaatgttgggtctgagaggggagctacttctgaaccagttgtgattgaagattgtggtgagctcaagaaccaaacttcagaataa

SEQ ID NO: 1471 - protein, 177 aa, Brassica napus
MANPKVFFDILIGKMKAGRVVMELFADVTPRTADNFRALCTGEKGIGQAGKALHYKGSAFHRIIPGFMCQGGDFTRGNGTGGESIYGAKFQDENFKLKHTGPGILSMANSGPNTNGSQFFICTDKTAWLDGKHVVFGKVVDGYDVVKAMENVGSERGATSEPVVIEDCGELKNQTSE

SEQ ID NO: 1472 - DNA, 711 bp, Glycine max
  CDS (1)..(711)
atgcatagagcgatcgtgtttctcattcacccacgattcctcctcctcttccttgtcctctcaattttcctcattttcacattttctggttctactactaccagtggttttgctacacctcaacaggttgttgagatcattgaggagaaaccagaagaggagccagaaattacacacagagtattcttggatattgatattgataaacagcgtttaggtaggatagtgattggattatatggcaaagttgtaccgaaaactgtggaaaattttagagctttgtgtacaggggagaaaggaaagagtgaaaatggcataaagcttcattacaaaggaacaccatttcatcggataatatctggttttgtgattcagggtggagacattgttcatcatgatggtaaagggtctgaatctatttttggtggcacctttcctgatgagaatttcaagattaaacattctcatgccggagttgtttctatggcaaattcaggacctgattccaatggctcacagtttttccttaccacagtgaaggccagatggttggatggagagcatgttgtctttggcaaggttgttcaaggcatggatattgtgtatgtaattgaagggggagccggaacttacagtggaaaacccagaaagaaggtggtgatagcagactctggggagataccaaagatccactgggatgaggaaacttga

SEQ ID NO: 1473 - protein, 236 aa, Glycine max
MHRAIVFLIHPRFLLLFLVLSIFLIFTFSGSTTTSGFATPQQVVEIIEEKPEEEPEITHRVFLDIDIDKQRLGRIVIGLYGKVVPKTVENFRALCTGEKGKSENGIKLHYKGTPFHRIISGFVIQGGDIVHHDGKGSESIFGGTFPDENFKIKHSHAGVVSMANSGPDSNGSQFFLTTVKARWLDGEHVVFGKVVQGMDIVYVIEGGAGTYSGKPRKKVVIADSGEIPKIHWDEET

SEQ ID NO: 1474 - DNA, 732 bp, Glycine max
  CDS (1)..(732)
atggcgaaaacgacgtcgttgttgctctttacactgctcctcttcggaaccttagctctcacccacatcaacacacactctcatagctgtagcggcgacactaagatcggagaaagaatggcgaaaacgacgtcgttgctgctctttacactgctcctcttcggaaccctagctctcatccaggcgaagaaatcgaaggaggatttgaaggaggtgacccacaaggtttactttgatgttgagattaatggaaaagaagcaggtcgtattgtaatgggtctttatgggaaggctgttccaaaaactgcagaaaacttccgagcactttgcacaggggaaaagggaactggtaaaagtggaaagcctctccattacaaaggtagctcattccatagaattattcctagctttatgcttcaaggaggtgattttacacaaggaaatggaatgggtggagaatcaatttacggagagaagtttgctgatgagaacttcaagttaaagcatactggaccaggacttctatcaatggcaaatgctggtcctaataccaatggttcacaatttttcattacaactgtgacaactagctggttggacggaaggcatgttgtttttggtaaagttctttctggaatggatgttgtttacaagattgaagctgaaggaacacaaagtggcactcccaagagcaaggttgtgattgttgacagtggtgaactccctctataa

SEQ ID NO: 1475 - protein, 243 aa, Glycine max
MAKTTSLLLFTLLLFGTLALTHINTHSHSCSGDTKIGERMAKTTSLLLFTLLLFGTLALIQAKKSKEDLKEVTHKVYFDVEINGKEAGRIVMGLYGKAVPKTAENFRALCTGEKGTGKSGKPLHYKGSSFHRIIPSFMLQGGDFTQGNGMGGESIYGEKFADENFKLKHTGPGLLSMANAGPNTNGSQFFITTVTTSWLDGRHVVFGKVLSGMDVVYKIEAEGTQSGTPKSKVVIVDSGELPL

SEQ ID NO: 1476 - DNA, 783 bp, Glycine max
  CDS (1)..(783)
atggcgtctccattatcagctcaattggttcaatgtcagaactcacttccacctcttcagggtaattttagccaagatgtgtctaaggttcaaaggtcgcgtgtggtatgttacggtaccagatcaccgcttggttattatggtaaagcattgacatcaagatcacataacgccctgaggttttctgtcacgcgacaatctgaagcacggtcaattggatataggagaatgacatgtgtcaatgctgcagacaatgttgtagagcttcaagccaaggtgacaaccaagtgtttctttgatgtagaagttgggggtgaacctgtgggcaggattgttttgggcctatttggagaggttgttcctaaaaccgttgaaaatttccgtgctttgtgcacaggtgagaaaggatatggttacaaaggaagctccttccatcgtataatcaaagatttcatgattcagggaggagactttacagaaggaaatggaactggtggaattagtatctatggtcctagttttaaagatgagagttttgccttaaagcatgtcggtcctggagttctgagcatggcaaatgctggtcctaatactaatgggagtcaatttttcatttgcactgtaaagactccatggctagacaatcgtcacgttgtatttggacatatcattgatggaatggatgttgtgaagacacttgaatcccaggagacgagtaggttagatgtccctcgaaagccttgcagaattgttaattgcggagaactgcctatagagggttga

SEQ ID NO: 1477 - protein, 260 aa, Glycine max
MASPLSAQLVQCQNSLPPLQGNFSQDVSKVQRSRVVCYGTRSPLGYYGKALTSRSHNALRFSVTRQSEARSIGYRRMTCVNAADNVVELQAKVTTKCFFDVEVGGEPVGRIVLGLFGEVVPKTVENFRALCTGEKGYGYKGSSFHRIIKDFMIQGGDFTEGNGTGGISIYGPSFKDESFALKHVGPGVLSMANAGPNTNGSQFFICTVKTPWLDNRHVVFGHIIDGMDVVKTLESQETSRLDVPRKPCRIVNCGELPIEG

SEQ ID NO: 1478 - DNA, 519 bp, Helianthus annuus
  CDS (1)..(519)
atgtcaaaccctaaggtcttcttcgacatgaccgtcggcggagctccggccggccggatcgtcatggaactcttcgccgacaccacaccgcgaaccgccgagaacttccgcgcactctgcaccggcgaaaaaggcgtcggaagctccggcaaaccgttacacttcaaaggctctacgttccaccgtgtgatccctaacttcatgtgtcagggcggcgatttcaccagaggcaacggcacaggcggtgagtcgatctacggcaacaagtttgctgacgagaatttcgttaagaagcatacaggtcctggaattctgtcgatggcgaacgccggtccgaacacgaacggatctcagttttttatatgtactgctaagactgagtggctggacggtaagcatgtggtgtttggacaggttgttgaaggtatggatgttgttaaggcgatcgagaaggtcggatctggaagcggaactacttctaagcctgtagttattgcagattgtggtcaactttcttag

SEQ ID NO: 1479 - protein, 172 aa, Helianthus annuus
MSNPKVFFDMTVGGAPAGRIVMELFADTTPRTAENFRALCTGEKGVGSSGKPLHFKGSTFHRVIPNFMCQGGDFTRGNGTGGESIYGNKFADENFVKKHTGPGILSMANAGPNTNGSQFFICTAKTEWLDGKHVVFGQVVEGMDVVKAIEKVGSGSGTTSKPVVIADCGQLS

SEQ ID NO: 1480 - DNA, 582 bp, Helianthus annuus
  CDS (1)..(582)
atggcaagtggaatggtgggtggaggaggaaacgggggagtggagtggcaccagaggcctccaaaccctaaaaaccccatcgtctttttcgacataaccatcggcaccatccccgccggtcgtattaagatggagcttttcgccgacatcgcccccaaaaccgccgagaacttccgccagttctgtaccggagagtttagaaaagctggactacctgttggatacaagggatgtcaatttcataggataatcaaggattttatgatacaggctggtgattttctaaagggagatggcagtggatgcgtatccatatatggaagtaagttcgaggatgaaaatttcattgctaagcatactggacccggtcttttgtcaatggctaacagcggaccaaatacaaacgggtgtcagttttttattacttgtgccaagtgtgattggctcgacaacaagcacgtggtattcgggagagttcttggtgatggtcttttggtgatgaggaagatcgagaacgtggccactggaccgaacaaccgtcctaaattcggcgcattatggcccgaatgcggggagatgtga

SEQ ID NO: 1481 - protein, 193 aa, Helianthus annuus
MASGMVGGGGNGGVEWHQRPPNPKNPIVFFDITIGTIPAGRIKMELFADIAPKTAENFRQFCTGEFRKAGLPVGYKGCQFHRIIKDFMIQAGDFLKGDGSGCVSIYGSKFEDENFIAKHTGPGLLSMANSGPNTNGCQFFITCAKCDWLDNKHVVFGRVLGDGLLVMRKIENVATGPNNRPKFGALWPECGEM

SEQ ID NO: 1482 - DNA, 537 bp, Helianthus annuus
  CDS (1)..(537)
atgagcttcgcaaacttcccaacatctccgctactgcaatcgaccatgccaggcgcagaaggaggtccaccggaggtaactctcgaaacatccatgggctctttcaccgttgagatgtacgataagcacgcacctaggacttgcaaaaacttcattgaactgtctcgaaggggctactacaacaacgttaagtttcacagaatcattaaggattttattgttcaaggaggggatcccactggcactggtagaggtggagaatctatttacggctcaaagtttgaggatgagatcaccccaaagttgaagcatacgggagctggtatcttatctatggctaatgctggcccgaatacaaatggaagtcagttctttatcacattggccccagcgcaatcgcttgatggaaagcacacgatatttggaagagtgtgcagaggaatggagattgtcaagagacttggtagtgttcagactgataataccgacaggccaattcatgacgtgaagatactacggacagcagttaaggattga

SEQ ID NO: 1483 - protein, 178 aa, Helianthus annuus
MSFANFPTSPLLQSTMPGAEGGPPEVTLETSMGSFTVEMYDKHAPRTCKNFIELSRRGYYNNVKFHRIIKDFIVQGGDPTGTGRGGESIYGSKFEDEITPKLKHTGAGILSMANAGPNTNGSQFFITLAPAQSLDGKHTIFGRVCRGMEIVKRLGSVQTDNTDRPIHDVKILRTAVKD

SEQ ID NO: 1484 - DNA, 486 bp, Helianthus annuus
  CDS (1)..(486)
atgtcggttactcttcacactaatctcggagacatcaagtgcgaaatcgcctgtgatgaagtgcctaaggcatcagagaattttcttgcattatgtgcaagcggatactatgatggcaccattttccacagaaacataaagggatttatgatccaaggcggagatcccactgggactggcaaaggagggacaagtatttggggcaaaaagttcaatgatgagatacgtgagtctctcaagcacaatgccagaggggtgctatcaatggctaatagtgggcccaacaccaatgggagccaattcttcattacttatgctaaacaaccacatctcaatggggtatatactatctttggcaaagtaattcatgggtttgaagttcttgatctcatggaaaagactccaacagcaggagctggggaccggccactggcggagattaggattaaccgtataacaattcattctaatccactagctggctag

SEQ ID NO: 1485 - protein, 161 aa, Helianthus annuus
MSVTLHTNLGDIKCEIACDEVPKASENFLALCASGYYDGTIFHRNIKGFMIQGGDPTGTGKGGTSIWGKKFNDEIRESLKHNARGVLSMANSGPNTNGSQFFITYAKQPHLNGVYTIFGKVIHGFEVLDLMEKTPTAGAGDRPLAEIRINRITIHSNPLAG

SEQ ID NO: 1486 - DNA, 516 bp, Helianthus annuus
  CDS (1)..(516)
atggcaaaccctaaggtcttcttcgacatgaccgtcggcggagctccggccggccgcatcgtcatggagctttacgcggacaccactcctcgcaccgccgagaacttccgcgctctctgcaccggcgaaaaaggccgtggaacctccggcaagccgctccacttcaaaggctccagtttccaccgtgtgatccctaacttcatgtgccagggaggcgacttcacccgaggcaacggcaccggcggcgagtcgatctacggtgctaagttcgccgatgagaacttcgtgaagaagcacaccggtccaggtattctgtccatggctaacgccggtccgaacacgaacggatctcagttttttatctgtactgcgaagactgagtggcttgatggaaagcatgtggtgtttggaaaggttgtggaaggtatggatgttgtgaaggcgattgagaaggttggatctggatccggaacctgctcgaagccggttgtgattgcggattgcggtcagctctag

SEQ ID NO: 1487 - protein, 171 aa, Helianthus annuus
MANPKVFFDMTVGGAPAGRIVMELYADTTPRTAENFRALCTGEKGRGTSGKPLHFKGSSFHRVIPNFMCQGGDFTRGNGTGGESIYGAKFADENFVKKHTGPGILSMANAGPNTNGSQFFICTAKTEWLDGKHVVFGKVVEGMDVVKAIEKVGSGSGTCSKPVVIADCGQL

SEQ ID NO: 1488 - DNA, 528 bp, Helianthus annuus
  CDS (1)..(528)
atgacgaacccaaaagtattctttgacattctagtcggaacaaagaaagcgggccgaatcgtcatggaactattcgctgacgtcaccccaaaaaccgccgagaatttccgtgctctttgcaccggtgaaaaggggatcgggatttccgggaaacccctacactacaaaggatcagcgttccaccgaatcatccctaacttcatgtgtcaaggtggtgatttcactaggggtaacgggaccggtggtgagtcaatctacggtgccaaatttgccgatgagaactttaaactaaagcacatgggccccgggactctttctatggctaatgcgggcccgaacacaaacgggtcgcagttttttatatgcaccgcggcaacttcatggctcgatgggaagcatgtggtgtttggcaaggttgttgatgggtatagcgttgtgaaagagatggaatcggttggatccgatagcggttcgactaaagcaaaggttgttattgaagattgtggtgaggttaaggagaattgttga

SEQ ID NO: 1489 - protein, 175 aa, Helianthus annuus
MTNPKVFFDILVGTKKAGRIVMELFADVTPKTAENFRALCTGEKGIGISGKPLHYKGSAFHRIIPNFMCQGGDFTRGNGTGGESIYGAKFADENFKLKHMGPGTLSMANAGPNTNGSQFFICTAATSWLDGKHVVFGKVVDGYSVVKEMESVGSDSGSTKAKVVIEDCGEVKENC

SEQ ID NO: 1490 - DNA, 597 bp, Hordeum vulgare
  CDS (1)..(597)
atggcgtcagccatctccgcggggcctacgccgccggccccggcgccggcgtcggtggagtggcaccagcggccgccgaacccgaagaacccggtggtgttcttcgacgtgaccatcggctccatcccggccggccgcatcaagatggagctcttcgccgacctcgtccccaagaccgccgagaacttcaggcagttctgcactggcgagtacaggaagtcagctattccacaggggtataagggttgtcagttccatcgagtgatcaaagatttcatgattcagggaggtgacttcgtaaagggtgatggtagtggatgcatatcaatatatggtaccaaatttgatgatgaaaatttcattgcgaagcatactggtcctggcctgctctccatggcgaacagtggagctaactctaatggatctcagttctttttaacttgtgcaaagtgtgaatggctggacaacaagcacgtggttttcgggagggtgctgggagatggtctgctcgtgctgcggaagattgagaacgtggcgactgggccaaacaaccgtccgaagcttgcctgcgtcataagtgagtgcggcgagatgtag

SEQ ID NO: 1491 - protein, 198 aa, Hordeum vulgare
MASAISAGPTPPAPAPASVEWHQRPPNPKNPVVFFDVTIGSIPAGRIKMELFADLVPKTAENFRQFCTGEYRKSAIPQGYKGCQFHRVIKDFMIQGGDFVKGDGSGCISIYGTKFDDENFIAKHTGPGLLSMANSGANSNGSQFFLTCAKCEWLDNKHVVFGRVLGDGLLVLRKIENVATGPNNRPKLACVISECGEM

SEQ ID NO: 1492 - DNA, 732 bp, Hordeum vulgare
  CDS (1)..(732)
atggcggccgcgacctcctccttcgccacgctcgccgtcgctcgcccggcggcggcggcgcagagggcgctgctcgccgcaaaggccccctcgtcggccctctccctccgcggcgtcggccgcgtcgcgtccccggccctctccgtctccctgcagacccgcgcgcgcttcgtcgcctccgccagcgccgaaccctatgcacctgagcttcagtccaaagttacaaacaaggtgtactttgacataaacattggcaaccctgttgggaagaatgtcgggaggattgtcatcgggctgtatggggatgacgttccgcaaaccgtcgagaacttccgtgcactttgcactggggagaaagggtttggatacaagggatcaagtttccaccgtgtcatcaaggacttcatgattcagggaggagactttgacaagggcaacggtactggagggaaaagcatatatggccgtaccttcaaggatgagaacttccaattggttcatactggacctggagtgctcagcatggctaatgctggaccgaacaccaacggcagccaattcttcatctgcacagtcaagactccgtggctggacgggagacacgttgtctttggccaggttcttgaaggcatggacatcgtaaggatgatagagtcatctgagactgacagaggtgaccgcccgaagaagaaggtggtcattagtgagtgcggggagcttccagtggtctga

SEQ ID NO: 1493 - protein, 243 aa, Hordeum vulgare
MAAATSSFATLAVARPAAAAQRALLAAKAPSSALSLRGVGRVASPALSVSLQTRARFVASASAEPYAPELQSKVTNKVYFDINIGNPVGKNVGRIVIGLYGDDVPQTVENFRALCTGEKGFGYKGSSFHRVIKDFMIQGGDFDKGNGTGGKSIYGRTFKDENFQLVHTGPGVLSMANAGPNTNGSQFFICTVKTPWLDGRHVVFGQVLEGMDIVRMIESSETDRGDRPKKKVVISECGELPVV

SEQ ID NO: 1494 - DNA, 495 bp, Linum usitatissimum
  CDS (1)..(495)
atgtggaaagccgccgatggaggagcacctgaggtgactctggagacttccatgggagctttcaccgttgagttgtactacaagcacgctccaaagacttgcaggaacttcattgagctgtccaggagaggatactacgacaatgtgaaattccaccggattatcaaggatttcatagtgcaaggtggggatccgacggggacaggaagaggtggagagtctatattcggaaagaagtttgaggacgagataaagaaggagttgaagcacactggggctgggattctatccatggcaaatgctggtcctgatacaaatggaagccagttcttcattacattggcgccatgcctttcactagatgggaaacatactattttcggaagagtatgctcagggatggagataatcaaaagacttgggagcgtccaaactgataacagtgacaggcccattcatgacgtgaagatactaaggacgtctgtcaaagattaa

SEQ ID NO: 1495 - protein, 164 aa, Linum usitatissimum
MWKAADGGAPEVTLETSMGAFTVELYYKHAPKTCRNFIELSRRGYYDNVKFHRIIKDFIVQGGDPTGTGRGGESIFGKKFEDEIKKELKHTGAGILSMANAGPDTNGSQFFITLAPCLSLDGKHTIFGRVCSGMEIIKRLGSVQTDNSDRPIHDVKILRTSVKD

SEQ ID NO: 1496 - DNA, 663 bp, Oryza sativa
  CDS (1)..(663)
atggcggggagcgggtggaggaggatcccggcggtgaggaggccgcccatgtcgcgcccggcctcggtctgcctctggatcgtgctcgtcgccgccaccctggcgctcgcccaggcgaagaaatcgaaggcggatttgactgaggtcacccacaaggtctacttcgacgtcgagattgatggcaagcccgcaggacgggttgtcatgggacttttcgggaagactgttcctaaaacggcagagaacttccgagcactttgcacaggagagaaaggaactggaaagagtggcaaagcactccacttcaagggaagtgcattccacagaattatacccagctttatgatccaaggaggtgacttcacacttggtgatggaaggggtggtgaatatatctatgggacgaagttcgccgatgaaaacttcaagatcaagcacaccggaccaggcctcctgtccatggccaatgctgggagagacacaaacgggtcccagtttttcatcaccactgtaaccaccagctggttggacgggaagcacgtcgtgttcggtaaggtgctgtctggaatggatgtggtttacaagattgaagctgagggccagcagagtgggtcaccgaagagcaaagttgtcatcgcggacagcggcgaactgccgatgtaa

SEQ ID NO: 1497 - protein, 220 aa, Oryza sativa
MAGSGWRRIPAVRRPPMSRPASVCLWIVLVAATLALAQAKKSKADLTEVTHKVYFDVEIDGKPAGRVVMGLFGKTVPKTAENFRALCTGEKGTGKSGKALHFKGSAFHRIIPSFMIQGGDFTLGDGRGGEYIYGTKFADENFKIKHTGPGLLSMANAGRDTNGSQFFITTVTTSWLDGKHVVFGKVLSGMDVVYKIEAEGQQSGSPKSKVVIADSGELPM

SEQ ID NO: 1498 - DNA, 546 bp, Oryza sativa
  CDS (1)..(546)
atggcgccggcggcgtcctccaagtccaacccaagggtgttccttgacatcgccatcggcggcgagtgggttggccgcgtggtgatcgagctgctcgccgacaaggtgcccgacacggcggagaacttccggcggctgtgcaccggcgagcgcgccgggcgctccggcaagagcaggctccactacaaggggtcggcgttccaccgcgtggtgcccgggttcatgtgccagggcggcgacatcacggccgggaacggcaccggcggcgagtcggcgctggacggcgccgcgaggcacttccccgacgaggggttcgcggtgaagcacgacgggcccggggtggtgtccatggcgaacgccgggcccaacaccaacggctcccagttcttcatcaccgtcgacaaggcgccgtggctggacggccgccacgtcgcgttcggccgcgtcgtcgccgggatggacgccgtccgcgccatcgacaggacgggaacctggagcggcaagacggtgaagcccgtcgtcatcaccgactgcggcgtgctctag

SEQ ID NO: 1499 - protein, 181 aa, Oryza sativa
MAPAASSKSNPRVFLDIAIGGEWVGRVVIELLADKVPDTAENFRRLCTGERAGRSGKSRLHYKGSAFHRVVPGFMCQGGDITAGNGTGGESALDGAARHFPDEGFAVKHDGPGVVSMANAGPNTNGSQFFITVDKAPWLDGRHVAFGRVVAGMDAVRAIDRTGTWSGKTVKPVVITDCGVL

SEQ ID NO: 1500 - DNA, 495 bp, Oryza sativa
  CDS (1)..(495)
atgtggggcagcgccgacggcggcacgccggaggtcaccctggagacatccatgggcgccttcaccatcgagatgtactacaagcacgcgcccaagacctgcaggaacttcctcgagctctcgcgccgcggctactacgacaacgtcatcttccatcgcatcatcaaggatttcatcgtgcaaggtggggatcctactggcaccggaagaggcggcgaatccatctacggagcaaagttcgaggatgagattaggccagaactgaagcacaccggcgctggaattctgtcgatggccaacgctggtccaaatacaaatggaagccagttctttattactcttgcgccttgtcagtcacttgatggaaagcatacaatttttgggagagtatcaaaaggaatggaaattgtcaagcgccttggaagtgtccagacagacaaaagtgataggcccatccatgaagtgaaaatcctgcggactgtggtcaaagattga

SEQ ID NO: 1501 - protein, 164 aa, Oryza sativa
MWGSADGGTPEVTLETSMGAFTIEMYYKHAPKTCRNFLELSRRGYYDNVIFHRIIKDFIVQGGDPTGTGRGGESIYGAKFEDEIRPELKHTGAGILSMANAGPNTNGSQFFITLAPCQSLDGKHTIFGRVSKGMEIVKRLGSVQTDKSDRPIHEVKILRTVVKD

SEQ ID NO: 1502 - DNA, 483 bp, Oryza sativa
  CDS (1)..(483)
atgtcggtgacgctgcacacgaatctcggggacatcaagtgcgaggtgttctgcgaccaggcgccgcggacggcggagaacttcctggcgctgtgcgcgagcggctactacgacggcaccatcttccaccgcaacatcaaggggttcatgatccagggcggcgacccgacgggcacggggaaggggggcacctcgatctgggggaagaagttcgccgacgagttcagggagtcgctcaagcacaacgcccgcggggtgatgtcgatggcgaacagcgggcccaacaccaacgggagccagttcttcatcacctacgccaagcagcctcacctcaacggccactacaccgtgttcgccaaggtcatccatggattcgaggtgctcgacctcatggagaaggcgcagacggggcccggcgaccgccccctcgccgagatcaggctcaaccgcgtcaccatccacgccaaccctctcgccaactaa

SEQ ID NO: 1503 - protein, 160 aa, Oryza sativa
MSVTLHTNLGDIKCEVFCDQAPRTAENFLALCASGYYDGTIFHRNIKGFMIQGGDPTGTGKGGTSIWGKKFADEFRESLKHNARGVMSMANSGPNTNGSQFFITYAKQPHLNGHYTVFAKVIHGFEVLDLMEKAQTGPGDRPLAEIRLNRVTIHANPLAN

SEQ ID NO: 1504 - DNA, 612 bp, Oryza sativa
  CDS (1)..(612)
atggcgtcctcggggggagcggcgatctcggcggggcccacgccgccgtcggcggcggcggcgtcgtcggtggactggcacctgcggccgccgaacccgaagaacccggtggtgttcttcgacgtgaccatcgggtccatccccgccggccgcatcaagatggagctcttcgccgacatcgtccccaagacggcggagaacttccggcagttctgcaccggagagcacaggaaatcaggtttaccacagggatataagggttgtcagttccatcgagtgatcaaagatttcatgattcagggaggtgactatatgaagggggatggtactggatgcacgtcaatctatggtaccaaatttgatgatgaaaacttcattgcaaagcatactggtcctggcctactttctatggcaaatagtggggtgaactctaatggatctcagttctttataacttgtgcaaaatgtgaatggctggacaacaagcatgtggtttttgggagggtgctaggggatggtatgcttgctgtgcggaagatcgagaatgttgcaactggaccaaacaaccgaccgaagctcgcatgtgtcataagcgagtgtggtgagatgtag

SEQ ID NO: 1505 - protein, 203 aa, Oryza sativa
MASSGGAAISAGPTPPSAAAASSVDWHLRPPNPKNPVVFFDVTIGSIPAGRIKMELFADIVPKTAENFRQFCTGEHRKSGLPQGYKGCQFHRVIKDFMIQGGDYMKGDGTGCTSIYGTKFDDENFIAKHTGPGLLSMANSGVNSNGSQFFITCAKCEWLDNKHVVFGRVLGDGMLAVRKIENVATGPNNRPKLACVISECGEM

SEQ ID NO: 1506 - DNA, 552 bp, Zea mays
  CDS (1)..(552)
atggcgcggccccagaacaaccagaaccccagggtgttcctggtcctcaacatcggcggcgtgacggttggccgcgtcgtcatcgagctgttcgccgacaaggtgcccaagacggcggagaacttccggctgctgtgcaccggagagcgcggcgtgggaaagtggtccggcaagcgcctgcactacaagggcgcggcgttccaccgcgtggtgcccgggttcatgtgccagggcggcgacatcacggcgggcaacggcacgggcggcgagtccgcgatcggtgacgcccggtacttcgccgacgaggcgttcggagccgtccggcacgatggcgccggcgtggtgtccatggccaacgccgggcccaacaccaacggatctcagttcttcatcaccttcgccgacgcgtcgtggctggacggccgccacgtcgcgttcggccgcgtcgtggatggcatggacgctctgcgtgctatcgaaaaggccgggtccatcagtggcaggactatgaggcatgtcgtcatcgccgactgcggcgagctcaagcactaa

SEQ ID NO: 1507 - protein, 183 aa, Zea mays
MARPQNNQNPRVFLVLNIGGVTVGRVVIELFADKVPKTAENFRLLCTGERGVGKWSGKRLHYKGAAFHRVVPGFMCQGGDITAGNGTGGESAIGDARYFADEAFGAVRHDGAGVVSMANAGPNTNGSQFFITFADASWLDGRHVAFGRVVDGMDALRAIEKAGSISGRTMRHVVIADCGELKH

SEQ ID NO: 1508 - DNA, 642 bp, Triticum aestivum
  CDS (1)..(642)
atggcgatgagggcgtggaggcggagcgcggcggcgagggccccggcgcacctgtgcctgtggctggcgctcgtcgccgccaccctggtgctcgcccagggcaagaaatccaacctttctgaggtgacgcacaaggtctacttcgacatcgagatcgacggcaagcccgcaggtcgggttgtcatgggacttttcggcaaggctgttcctaaaaccgcagagaacttcagagcactctgcacaggagagaaaggtatgggcaacagcggcaaacctctccactacaaggggagttcgttccacagaattatccccagcttcatgatccaaggaggcgacttcactcttggtgatggaaggggtggtgaatcaatctacggcacaaagttcggcgatgagaacttcaagctcaagcacactggaccaggctacctttccatggccaatgctgggagagataccaacggatcccagttcttcatcaccactgtaactacgagctggttggatggcaagcacgtcgtgttcggcaaggtgttgtctggaatggacgtggtctacaaggtcgaggccgagggcaagcagaacgggacaccaaagagcaaagttgtcattgctgacagcggggaagtgccgctgtga

SEQ ID NO: 1509 - protein, 213 aa, Triticum aestivum
MAMRAWRRSAAARAPAHLCLWLALVAATLVLAQGKKSNLSEVTHKVYFDIEIDGKPAGRVVMGLFGKAVPKTAENFRALCTGEKGMGNSGKPLHYKGSSFHRIIPSFMIQGGDFTLGDGRGGESIYGTKFGDENFKLKHTGPGYLSMANAGRDTNGSQFFITTVTTSWLDGKHVVFGKVLSGMDVVYKVEAEGKQNGTPKSKVVIADSGEVPL

SEQ ID NO: 1510 - DNA, 495 bp, Triticum aestivum
  CDS (1)..(495)
atgtggggcggcgacgacggagggactccggaggtcaccctggagacctccatgggatccttcaccgtcgagatgtaccacaagcacgcgcccaagacctgcaggaacttcgtcgagctcgcgcgccgcaaatactacgacaacgtcgtcttccaccgcatcatcaaggatttcatcgtgcaaggtggggatcctagtggaacaggcaggggcggcgaatccatctacggagcaaaatttgaggacgagataaggccagagctgaagcacaccggggctgggattctatcaatggcaaatgctggtccgaatacaaacggaagccagttcttcatcactcttgcaccttgtcaatcactggatggtaagcacacaatttttgggagagtatgcagaggaatggaaattgttaagcgccttggaagtattcagaccgacaaaaatgataggcccattcatgaagtgaaaattctgcggactgttgttaaagattga

SEQ ID NO: 1511 - protein, 164 aa, Triticum aestivum
MWGGDDGGTPEVTLETSMGSFTVEMYHKHAPKTCRNFVELARRKYYDNVVFHRIIKDFIVQGGDPSGTGRGGESIYGAKFEDEIRPELKHTGAGILSMANAGPNTNGSQFFITLAPCQSLDGKHTIFGRVCRGMEIVKRLGSIQTDKNDRPIHEVKILRTVVKD

SEQ ID NO: 1512 - DNA, 642 bp, Triticum aestivum
  CDS (1)..(642)
atggcgatgagggcgtggaggaggagcgcggcggcgagggccccggcgcacctgtgcctgtggctggcgctcgtcgccgccaccctggtgctcgcccagggcaagaaatccaacctgtctgaggtgacgcacaaggtctacttcgacatcgagatcgacggcaagcccgcaggtcgggttgtcatgggacttttcggcaaggctgttcctaaaaccgcagagaacttcagagcactctgcacaggtgagaaaggcatgggcaacagcggcaaacctctccactacaaggggagttcgttccacagaattatccccagcttcatgatccaaggaggggacttcactcttggcgatggaaggggcggtgaatcaatctatggcacaaagttcgccgatgagaacttcaagctcaagcacactggaccaggctacctttccatggccaatgctgggagagataccaatggatcccagttcttcatcaccactgtaaccacgagctggttggacggcaagcacgtcgtgttcggcaaggtgttgtctggaatggacgtggtctacaaggttgaggccgagggcaagcagaacgggacgccaaagagcaaggttgtcattgccgacagcggtgaagtgccgctgtga

SEQ ID NO: 1513 - protein, 213 aa, Triticum aestivum
MAMRAWRRSAAARAPAHLCLWLALVAATLVLAQGKKSNLSEVTHKVYFDIEIDGKPAGRVVMGLFGKAVPKTAENFRALCTGEKGMGNSGKPLHYKGSSFHRIIPSFMIQGGDFTLGDGRGGESIYGTKFADENFKLKHTGPGYLSMANAGRDTNGSQFFITTVTTSWLDGKHVVFGKVLSGMDVVYKVEAEGKQNGTPKSKVVIADSGEVPL

SEQ ID NO: 1514 - DNA, 516 bp, Triticum aestivum
  CDS (1)..(516)
atggccaacccgagggtgtttttcgacatgaccgtcggcggcgcgccggcggggcgcatcgtgatggagctgtacaaggacccggtgccgcggacggtggagaacttccgcgcgctctgcaccggcgagaagggcgtcggcaagagcggcaagccgctgcactacaagggcagcgccttccaccgcgtgatccccgacttcatgtgccagggcggcgacttcaccaggggcaacggcaccggaggcgagtccatctacggcgagaagttcgccgacgagaagttcgtccacaagcacaccaagcccgggatcctctccatggccaacgccgggccctacaccaacggctcccagttcttcatctgcaccgtcccctgcaattggctcgacggcaagcacgtggtcttcggcgaggtcgtcgagggcatggacgtcgtcaagaacatcgagaaggtgggctcccgcagcggcacctgctccaagcaggtcgtcatcgccgaatgcggccagctctag

SEQ ID NO: 1515 - protein, 171 aa, Triticum aestivum
MANPRVFFDMTVGGAPAGRIVMELYKDPVPRTVENFRALCTGEKGVGKSGKPLHYKGSAFHRVIPDFMCQGGDFTRGNGTGGESIYGEKFADEKFVHKHTKPGILSMANAGPYTNGSQFFICTVPCNWLDGKHVVFGEVVEGMDVVKNIEKVGSRSGTCSKQVVIAECGQL

SEQ ID NO: 1516 - DNA, 516 bp, Triticum aestivum
  CDS (1)..(516)
atggcccacccgagggtgttcttcgacatgaccgtcggcggcgcgccggccgggcgcatcgtgatggagctgtacaaggacgcggtgccgcggacggtggagaatttccgcgcgctctgcaccggcgagaagggcgtcggcaagagcggcaagccactgcactacaagggcagctcgttccaccgcgtgatccccgacttcatgtgccagggcggcgacttcaccaagggcaacggcaccggcggcgagtccatctacggcgagaagttcgccgacgagaagttcgtccacaagcacaccaagcccgggatcctctccatggccaacgcgggccccaacaccaacggctcccagttcttcatctgcaccgtcccctgcaattggctcgacggcaagcacgtggtcttcggcgaggtcgtcgagggcatggacgtcgtcaagaacatcgagaaggtgggctcccgcagcggcacctgctccaagcaagtcgtcatcgccgactgcggccagctctag

SEQ ID NO: 1517 - protein, 171 aa, Triticum aestivum
MAHPRVFFDMTVGGAPAGRIVMELYKDAVPRTVENFRALCTGEKGVGKSGKPLHYKGSSFHRVIPDFMCQGGDFTKGNGTGGESIYGEKFADEKFVHKHTKPGILSMANAGPNTNGSQFFICTVPCNWLDGKHVVFGEVVEGMDVVKNIEKVGSRSGTCSKQVVIADCGQL

SEQ ID NO: 1518 - DNA, 756 bp, Zea mays
  CDS (1)..(756)
atggcggcggcggcggctgctgccacctccttcaccaccctcgccgtcgcgcgttcggcggggcagcggtccctccttgcctccaaggccgcaccttcgccgctcctctccctccgtggcgcccgcatcccctcgcaggccgtctccttctccgggggccttgcggcgtcgccctctcacagccgcgcgcgcttcgctacatccgccagcgccgagcccaaggaagcagatcttcagtctaaaatcaccaataaggtgtattttgacataagcattgggaaccctgtggggaagaatgttgggaggattgtcatcggcttgtatggggatgatgttccacaaacagcagagaactttcgtgctctttgcactggagagaaagggtttggatacaagggatccagtttccaccgtgtcatcagcgactttatgatccagggcggagattttgacaagggcaatggtaccggtgggaaaagcatatatggacgcactttcaaagatgagaacttcaaattggttcacactggacctggagtggtcagcatggctaatgctggaccgaacaccaacggcagccagtttttcatttgcactgtcaagacgccttggttggatggaaggcatgtcgtgtttggccaggtcgtggaagggatggatattgtaaggctgatcgagtcacaggagactgacagaggtgaccgtccgaagaagaaagtagtcatcagcgagtgcggggagtttccagtggtctaa

SEQ ID NO: 1519 - protein, 251 aa, Zea mays
MAAAAAAATSFTTLAVARSAGQRSLLASKAAPSPLLSLRGARIPSQAVSFSGGLAASPSHSRARFATSASAEPKEADLQSKITNKVYFDISIGNPVGKNVGRIVIGLYGDDVPQTAENFRALCTGEKGFGYKGSSFHRVISDFMIQGGDFDKGNGTGGKSIYGRTFKDENFKLVHTGPGVVSMANAGPNTNGSQFFICTVKTPWLDGRHVVFGQVVEGMDIVRLIESQETDRGDRPKKKVVISECGEFPVV

SEQ ID NO: 1520 - DNA, 483 bp, Zea mays
  CDS (1)..(483)
atgtcggtgacgctgcacacgaacctgggcgacatcaagtgcgaggtgttctgcgaccaggtgccgcgcacggcggagaacttcctggcgctctgcggcagcggctactacgacggcaccgtgttccaccgcaacatcaagggcttcatggtccagggcggcgaccccaccggcaccggcaagggcgggtcgtccatctggggcgccaagttcgcggacgagttgagggagtcgctcaagcacaacgcgcgcgggatcatgtcgatggccaacagcgggcccaacaccaacggcagccagttcttcatcacctacgccaagcagccgcacctcaacggtcactacaccgtgttcgccaaggtcatccacggcttcgaggtgctggacctcatggagaaggcgcagacgggacccggggacaggccgctcgccgagatcaggctcaaccgcgtcaccatccacgccaacccgctcgccgtctga

SEQ ID NO: 1521 - protein, 160 aa, Zea mays
MSVTLHTNLGDIKCEVFCDQVPRTAENFLALCGSGYYDGTVFHRNIKGFMVQGGDPTGTGKGGSSIWGAKFADELRESLKHNARGIMSMANSGPNTNGSQFFITYAKQPHLNGHYTVFAKVIHGFEVLDLMEKAQTGPGDRPLAEIRLNRVTIHANPLAV

SEQ ID NO: 1522 - DNA, 651 bp, Zea mays
  CDS (1)..(651)
atgctgcggaaggccgtcgtcgccttcatcgcctgcaccgccttcttcctcgccttctctgcctactcccgtcgccagggcgttgcagaggttcaattaccagcagttactcacagggtctacctagatgtagaaattgatggccaacacataggtagaattgttattggtctctatggggaggtcgttccaaaaacagttgaaaactttagggctctttgtacaggtgaaaaaggtgtcgggtccaatggcaaacctcttcactataagggaacaccattccatcgtattatccctggcttcatgattcagggcggtgacatagttagaggcgacggtaaagggagtgagtctatatatggaggcatcttcccagatgagaatttcactgtaaaacatacacatccaggggttgttgctatggcgaattctggacttgattctaatggatctcagttttacataactactatcaagacaagctggttggatggggagcatgttgtcttcggcagggtgatccaaggaatggataccgtgtacgccatagaagggggcgctgggacttacaatggcaagccaaggaagaaggcggtgatcaccgacgctggtgagatacccaaggagaaatggggtgatcaggaagcgtag

SEQ ID NO: 1523 - protein, 216 aa, Zea mays
MLRKAVVAFIACTAFFLAFSAYSRRQGVAEVQLPAVTHRVYLDVEIDGQHIGRIVIGLYGEVVPKTVENFRALCTGEKGVGSNGKPLHYKGTPFHRIIPGFMIQGGDIVRGDGKGSESIYGGIFPDENFTVKHTHPGVVAMANSGLDSNGSQFYITTIKTSWLDGEHVVFGRVIQGMDTVYAIEGGAGTYNGKPRKKAVITDAGEIPKEKWGDQEA

SEQ ID NO: 1524 - DNA, 747 bp, Zea mays
  CDS (1)..(747)
atggcggcgactgccacgtccttcgccactctcgccgtcgcgcgctcggcagggcagcggtccctccttgcctccaaggccgccccctcgccgctcctctccctccgcggcgcccgcctcccctcgcagggcgtctccttatctgggggcctcgcggcgtcgccctctcatagccgcgcgcgcttcgccacatcagccagcgccgaacccaaggaagcagaacttcagtctaaaatcacaaacaaggtgtactttgacataagcattgggaaccctgtgggcaagaatgttgggaggatcgtcatcggcttgtacggggatgatgttccacagacaacagagaacttccgtgctctttgcactggagagaaagggtttggatacaagggatccagtttccatcgtgtcatcagcgactttatgattcagggcggagattttgacaagggcaatggtaccggtgggaagagcatatatggacgcaccttcaaagatgagaacttcaaattggttcacactggacctggagtggtcagcatggctaatgctgggccgaacaccaatggcagccagttctttatttgcactgtcaagacaccttggttggacggaaggcatgtcgtgtttggccaggtcctggaagggatggatgtcgtaagtctgatcgagtcgcaggagaccgacagaggtgaccgcccgaagaagaaagtagtcatcagcgagtgtggggagcttccagtggtctaa

SEQ ID NO: 1525 - protein, 248 aa, Zea mays
MAATATSFATLAVARSAGQRSLLASKAAPSPLLSLRGARLPSQGVSLSGGLAASPSHSRARFATSASAEPKEAELQSKITNKVYFDISIGNPVGKNVGRIVIGLYGDDVPQTTENFRALCTGEKGFGYKGSSFHRVISDFMIQGGDFDKGNGTGGKSIYGRTFKDENFKLVHTGPGVVSMANAGPNTNGSQFFICTVKTPWLDGRHVVFGQVLEGMDVVSLIESQETDRGDRPKKKVVISECGELPVV

SEQ ID NO: 1526 - DNA, 552 bp, Zea mays
  CDS (1)..(552)
atggcgcggccccagaacaaccagaaccccagggtgttcctggtcctcaacatcggcggcgtgacggttggccgcgtcgtcatcgagctgttcgccgacaaggtgcccaagacggcggagaacttccggctgctgtgcaccggaaagcgcagcgtgggaaagtggtccggcaagcgcctgcactacaagggcgcggcgttccaccgcgtggtgcccgggttcatgtgccagggcggcgacatcacggcgggcaacggcacgggcggcgagtctgcgatcggtgacgcccggtacttcgccgacgaggcgttcggagccgtccggcacgatggcgccggcgtggtgtccatggccaacgccgggcccaacaccaacggatctcagttcttcatcaccttcgccgacgcgccgtggctggacggccgccacgtcgcgttcggccgcgtcgtggatggcatggacgctctgcgtgccatcgaaaaggccgggtccatcagtggcaggactatgaggcatgtcgtcatcgccgactgcggcgagctcaagcactaa

SEQ ID NO: 1527 - protein, 183 aa, Zea mays
MARPQNNQNPRVFLVLNIGGVTVGRVVIELFADKVPKTAENFRLLCTGKRSVGKWSGKRLHYKGAAFHRVVPGFMCQGGDITAGNGTGGESAIGDARYFADEAFGAVRHDGAGVVSMANAGPNTNGSQFFITFADAPWLDGRHVAFGRVVDGMDALRAIEKAGSISGRTMRHVVIADCGELKH

SEQ ID NO: 1528 - DNA, 789 bp, Zea mays
  CDS (1)..(789)
atgcctcgtgccgaattcggcacgaaggagcgaagagagagagagacgcaggaccgccggcgacgatcgaggagggaggaaccagatacccggcggcggcgatcgatggctccgcgcagctcatcggcggcgacgtgcctgtgcctcgctctcgccgcggccacgctggcgctggcccacggggcgcaaggaggaggaccatcggcatcggcggcggacctggacaaggtcacggccgagaccttcttggacatcgagatcgacggcaagcctgcaggccggatcgtgctgggactgtttggggacaccgttcctaaaacagcagagaacttccgagcactttgcacaggggagaaaggaattgccaagtccggcaagcctctgtggtacaaggggtcgacgttccacaggatcatcccggggttcatgatccagggaggcgacttcaccaacggcaacggcacggggggcgagtccatctacggcagcaccatcttctccgacgagaacttcaagcacacccacgctaaagccggtacgctgtccatggctaactacgggcccgactccaatggctcccagttcttcatcaccaccgtagacgaaaaccggttgcccaagaagctggacgggcgccacgtggtgttcggcaaggtggtgaaagggatggacgtcgtgcgcaagatcgaagccgagggccagctcaccggcgtgcccaaggccaaggtcgtcatagccaacagcggccagctgccagcgcccgccgccgccggccatcgtgacctctga

SEQ ID NO: 1529 - protein, 262 aa, Zea mays
MPRAEFGTKERRERETQDRRRRSRREEPDTRRRRSMAPRSSSAATCLCLALAAATLALAHGAQGGGPSASAADLDKVTAETFLDIEIDGKPAGRIVLGLFGDTVPKTAENFRALCTGEKGIAKSGKPLWYKGSTFHRIIPGFMIQGGDFTNGNGTGGESIYGSTIFSDENFKHTHAKAGTLSMANYGPDSNGSQFFITTVDENRLPKKLDGRHVVFGKVVKGMDVVRKIEAEGQLTGVPKAKVVIANSGQLPAPAAAGHRDL

SEQ ID NO: 1530 - DNA, 495 bp, Zea mays
  CDS (1)..(495)
atgtggggtagcaccgacggcggaacgccggaggtcaccctcgagacctccatgggcgctgtctctgttgagatgtactacaggcacgcgcccaagacttgccggaacttcgtcgagctcgcgcgacgtggctactacgacaacgttatcttccaccgcatcatcaaagatttcattgtgcaaggtggggatcctacaggaaccggcagaggtggcgagtccatctatggagcaaagtttgaggatgagataaagactgagttaaagcacactggggctggaattctgtccatggcaaacgctggcccaaacacgaatggaagccagttcttcataactcttgccccttgtcagtcacttgatgggaaacatacaatttttgggagggtatgcagaggaatggaaattgttaagcgccttggaagtgtgcagactgacaaaaatgataggcctatccatgaagtgaaaatcttgcgtgccgttgtcaaagactga

SEQ ID NO: 1531 - protein, 164 aa, Zea mays
MWGSTDGGTPEVTLETSMGAVSVEMYYRHAPKTCRNFVELARRGYYDNVIFHRIIKDFIVQGGDPTGTGRGGESIYGAKFEDEIKTELKHTGAGILSMANAGPNTNGSQFFITLAPCQSLDGKHTIFGRVCRGMEIVKRLGSVQTDKNDRPIHEVKILRAVVKD

SEQ ID NO: 1532 - DNA, 483 bp, Zea mays
  CDS (1)..(483)
atgtcggtgacgctgcacacgaacctgggcgacatcaagtgcgaggtgttctgcgaccaggtgccgcgcacggcggagaacttcctggcgctctgcggcagcggctactacgacggcaccgtgttccaccgcaacatcaagggcttcatggtccagggcggcgaccccaccggcaccggcaagggcgggtcgtccatctggggcggcaagttcgcggacgagttgagggagtcgctcaagcacaacgcgcgcgggatcatgtcgatggccaacagcgggcccaacaccaacggcagccagttcttcatcacctacgccaagcagccgcacctcaacggccactacaccgtgttcgccaaggtcatccacggcttcgaggtgctggacctcatggagaaggcgcagacgggacccggggacaggccgctcgccgagatcaggctcaaccgcgtcaccatccacgccaacccgctcgccgtctga

SEQ ID NO: 1533 - protein, 160 aa, Zea mays
MSVTLHTNLGDIKCEVFCDQVPRTAENFLALCGSGYYDGTVFHRNIKGFMVQGGDPTGTGKGGSSIWGGKFADELRESLKHNARGIMSMANSGPNTNGSQFFITYAKQPHLNGHYTVFAKVIHGFEVLDLMEKAQTGPGDRPLAEIRLNRVTIHANPLAV

SEQ ID NO: 1534 - DNA, 552 bp, Zea mays
  CDS (1)..(552)
atggcgcgcccccaaaacaaccagaaccccagggtgttcctggtcctcaacatcggcggcgtgacggttggccgcgtcgtcatcgagctgttcgccgacaaggtgcccaagacggcggagaacttccggctgctgtgcaccggagagcgcagcgtggggaagtggtccggcaagcgcctgcactacaagggcgcggcgttccaccgcgtggtgcccgggttcatgtgccagggcggcgacatcacggcgggcaacggcacgggcggcgagtccgcgatcggtgacgcccggtacttcgccgacgaggcgttcggagccgtccggcacgatggcgccggcgtggtgtccatggccaacgccgggcccaacaccaacggatctcagttcttcatcaccttcgccgacgcgtcgtggctggacggccgccacgtcgcgttcggccgcgtcgtggatggcatggacgctctgcgtgctatcgaaaaggccgggtccatcagtggcaggactatgaggcatgtcgtcatcgccgactgcggcgagctcaagcactaa

SEQ ID NO: 1535 - protein, 183 aa, Zea mays
MARPQNNQNPRVFLVLNIGGVTVGRVVIELFADKVPKTAENFRLLCTGERSVGKWSGKRLHYKGAAFHRVVPGFMCQGGDITAGNGTGGESAIGDARYFADEAFGAVRHDGAGVVSMANAGPNTNGSQFFITFADASWLDGRHVAFGRVVDGMDALRAIEKAGSISGRTMRHVVIADCGELKH

SEQ ID NO: 1536 - DNA, 747 bp, Zea mays
  CDS (1)..(747)
atggcggcgactgccacgtccttcgccactctcgccgtcgcgcgctcggcagggcagcggttcctccttgcctccaaggccgccccctcgccgctcctctccctccgcggcgcccgcctcccctcgcagggcgtctccttatctgggggcctcgcggcgtcgccctctcatagccgcgcgcgcttcgccacatcagccagcgccgaacccaaggaagcagaacttcagtctaaaatcacaaacaaggtgtactttgacataagcattgggaaccctgtgggcaagaatgttgggaggatcgtcatcggcttgtacggggatgatgttccacagacaacagagaacttccgtgctctttgcactggagagaaagggtttggatacaagggatccagtttccatcgtgtcatcagcgactttatgattcagggtggagattttgacaagggcaatggtaccggtgggaagagcatatatggacgcaccttcaaagatgagaacttcaaattggttcacactggacctggagtggtcagcatggctaatgctgggccgaacaccaatggcagccagttctttatttgcactgtcaagacaccttggttggacggaaggcatgtcgtgtttggccaggtcctggaagggatggatgtcgtaagtctgatcgagtcgcaggagaccgacagaggtgaccgcccgaagaagaaagtagtcatcagcgagtgtggggagcttccagtggtctaa

SEQ ID NO: 1537 - protein, 248 aa, Zea mays
MAATATSFATLAVARSAGQRFLLASKAAPSPLLSLRGARLPSQGVSLSGGLAASPSHSRARFATSASAEPKEAELQSKITNKVYFDISIGNPVGKNVGRIVIGLYGDDVPQTTENFRALCTGEKGFGYKGSSFHRVISDFMIQGGDFDKGNGTGGKSIYGRTFKDENFKLVHTGPGVVSMANAGPNTNGSQFFICTVKTPWLDGRHVVFGQVLEGMDVVSLIESQETDRGDRPKKKVVISECGELPVV

SEQ ID NO: 1538 - DNA, 648 bp, Zea mays
  CDS (1)..(648)
atggcgccgagcgggtggaggaggagcgcggcggcgcgggtcgcctggcgcccggccacggtttgcctgtggctcgcgctcgccgccgccgcactgacgctcgcccaggctaagaaggacctgacggaggttacccacaaggtctacttcgacatcgagatcgacggcaagcccgcaggccggattgtcatggggctttttgggaagactgttcctaagacggcagagaacttccgagctctttgcacaggagagaaaggggttggcaagagtggcaaagccctccactacaagggaagtaagttccacagaatcatccccagcttcatgctccaaggaggtgacttcactctcggggacgggaggggtggtgaatctatctacggcttgaagtttgcggatgagaacttcaagatcaagcacactggtccaggccttctgtccatggccaatgccgggagagatacaaacggatcccagtttttcatcaccacagtgacaacaagttggttggacgggaagcatgtggtgtttggcaaggtgttgtctggaatggatgttgtgtacaaggtcgaagctgaaggccggcagagtggggagccgaagagcaaggttgtgatagcagatagcggcgagctgccgatgtga

SEQ ID NO: 1539 - protein, 215 aa, Zea mays
MAPSGWRRSAAARVAWRPATVCLWLALAAAALTLAQAKKDLTEVTHKVYFDIEIDGKPAGRIVMGLFGKTVPKTAENFRALCTGEKGVGKSGKALHYKGSKFHRIIPSFMLQGGDFTLGDGRGGESIYGLKFADENFKIKHTGPGLLSMANAGRDTNGSQFFITTVTTSWLDGKHVVFGKVLSGMDVVYKVEAEGRQSGEPKSKVVIADSGELPM

SEQ ID NO: 1540 - DNA, 1170 bp, Zea mays
  CDS (1)..(1170)
atggagggccgcggcgcggaacaagcacccgaggcggcggcggaggtgaaaaatccgaggtgcttcatggacgtcaccatcggcggcgagatggaggggaggatcgttgtagagctctacgcttccgtggtaccgcggacggcggagaacttccgcgcgctctgcacaggggagaaaggcatcggcgccgccagcggcaagccgcttcactttaagggctcatgcttccaccgtgttattaaagggtttatgattcaagggggagacacaactgctggagacggaactgggggagagtcaatttatgggtccaaatttgaggacgagaattttgttttaaagcatgagaggaaaggaatgctttcaatggctaattctggtcccaacacaaatggttctcagtttttcatcactactacacggacacctcatttagacgggaaacatgttgtttttggtagagtgatgaaaggaatgggggtagttcgctctattgagcatgtttctgtcggagaagctgactgccccactcttgaagttaaaattgttgattgtggggagcttcctgaaggtgctgatgatggagttgtaaactttttcaaagatggtgatacgtacccagattggcccaatgatcttgaagagaagcctgctgaggtttcatggtggatggatgctgtggagtctgctaaagcttatgggaatgacaatttcaagaaacaggactacaaggcagctctcagaaagtacaggaaagctctgcgctacttggatctttgctgggagaaagaagagatagatgaagataagagcacagcactgcggaagaccaagtcaataatactcactaatagctccgcatgcaaattaaagttaggagattcaagtggggctttattagacgcagattttgcactgcgtgaaagggagggaaatgctaaagcttttttccgacaaggacaggcacacattgcacttaatgacattgatgcagccgtggagagctttaaacaggcattggagttggagccaaatgatgctggaatcaaaagagagctggctgctgcaaagaagaagattgctgacagaagagatcaggagcggaaggcatttgctaggattttccaatcttctggaaagtctgacaagagcaacgaagagaataattga

SEQ ID NO: 1541 - protein, 389 aa, Zea mays
MEGRGAEQAPEAAAEVKNPRCFMDVTIGGEMEGRIVVELYASVVPRTAENFRALCTGEKGIGAASGKPLHFKGSCFHRVIKGFMIQGGDTTAGDGTGGESIYGSKFEDENFVLKHERKGMLSMANSGPNTNGSQFFITTTRTPHLDGKHVVFGRVMKGMGVVRSIEHVSVGEADCPTLEVKIVDCGELPEGADDGVVNFFKDGDTYPDWPNDLEEKPAEVSWWMDAVESAKAYGNDNFKKQDYKAALRKYRKALRYLDLCWEKEEIDEDKSTALRKTKSIILTNSSACKLKLGDSSGALLDADFALREREGNAKAFFRQGQAHIALNDIDAAVESFKQALELEPNDAGIKRELAAAKKKIADRRDQERKAFARIFQSSGKSDKSNEENN

SEQ ID NO: 1542 - DNA, 483 bp, Zea mays
  CDS (1)..(483)
atgtcggtgacgctgcacacgaacctgggcgacatcaagtgcgaggtgttctgcgaccaggtgccccgcacggcggagaacttcctggccctctgcgccagcggctactacgacggcaccgtgttccaccgaaacatcaagggcttcatgatccagggcggcgaccccaccggctccggcaagggcggctcctccatctggggcaccaagttcgcggacgagttcagggagtccctcaagcacaacgcacgggggatcatgtcgatggccaacaacgggcccaacaccaacggcagccagttcttcatcacctacgccaagcagccgcacctcaacggccactacaccgtgttcgccaaggtcatccacggcttcgaggtgctggacctcatggagaaggcgcagacgggacccggggacaggccgctcgccgagatcaggctcaaccgcgtcaccatccacgccaacccgctagccgtctga

SEQ ID NO: 1543 - protein, 160 aa, Zea mays
MSVTLHTNLGDIKCEVFCDQVPRTAENFLALCASGYYDGTVFHRNIKGFMIQGGDPTGSGKGGSSIWGTKFADEFRESLKHNARGIMSMANNGPNTNGSQFFITYAKQPHLNGHYTVFAKVIHGFEVLDLMEKAQTGPGDRPLAEIRLNRVTIHANPLAV

SEQ ID NO: 1544 - DNA, 21 bp, Artificial sequence
  primer
atgaattcaggaggtggaatc

SEQ ID NO: 1545 - DNA, 20 bp, Artificial sequence
  primer
tcacatctccccacactcag

SEQ ID NO: 1546 - protein, 257 aa, Artificial sequence
  consensus sequence
  Variant (2)..(3): Xaa in position 2 to 3 is any amino acid
  Variant (5)..(8): Xaa in position 5 to 8 is any amino acid
  Variant (9)..(26): Xaa in position 9 to 26 is any or no amino acid
  Variant (29)..(29): Xaa in position 29 is any amino acid
  Variant (30)..(32): Xaa in position 30 to 32 is any or no amino acid
  Variant (34)..(36): Xaa in position 34 to 36 is any amino acid
  Variant (37)..(42): Xaa in position 37 to 42 is any or no amino acid
  Variant (44)..(44): Xaa in position 44 is any amino acid
  Variant (46)..(46): Xaa in position 46 is any amino acid
  Variant (50)..(50): Xaa in position 50 is any amino acid
  Variant (51)..(51): Xaa in position 51 is any or no amino acid
  Variant (53)..(57): Xaa in position 53 to 57 is any amino acid
  Variant (58)..(84): Xaa in position 58 to 84 is any or no amino acid
  Variant (86)..(86): Xaa in position 86 is any amino acid
  Variant (88)..(89): Xaa in position 88 to 89 is any amino acid
  Variant (93)..(93): Xaa in position 93 is any amino acid
  Variant (95)..(95): Xaa in position 95 is any amino acid
  Variant (96)..(96): Xaa in position 96 is any or no amino acid
  Variant (99)..(99): Xaa in position 99 is any amino acid
  Variant (104)..(107): Xaa in position 104 to 107 is any amino acid
  Variant (108)..(114): Xaa in position 108 to 114 is any or no amino acid
  Variant (116)..(116): Xaa in position 116 is any amino acid
  Variant (119)..(119): Xaa in position 119 is any amino acid
  Variant (120)..(121): Xaa in position 120 to 121 is any or no amino acid
  Variant (126)..(127): Xaa in position 126 to 127 is any amino acid
  Variant (128)..(130): Xaa in position 128 to 130 is any or no amino acid
  Variant (132)..(132): Xaa in position 132 is any amino acid
  Variant (135)..(139): Xaa in position 135 to 139 is any amino acid
  Variant (140)..(144): Xaa in position 140 to 144 is any or no amino acid
  Variant (146)..(148): Xaa in position 146 to 148 is any amino acid
  Variant (150)..(150): Xaa in position 150 is any amino acid
  Variant (156)..(156): Xaa in position 156 is any amino acid
  Variant (157)..(160): Xaa in position 157 to 160 is any or no amino acid
  Variant (162)..(163): Xaa in position 162 to 163 is any amino acid
  Variant (172)..(176): Xaa in position 172 to 176 is any amino acid
  Variant (177)..(206): Xaa in position 177 to 206 is any or no amino acid
  Variant (209)..(209): Xaa in position 209 is any amino acid
  Variant (210)..(210): Xaa in position 210 is any or no amino acid
  Variant (216)..(216): Xaa in position 216 is any amino acid
  Variant (218)..(219): Xaa in position 218 to 219 is any amino acid
  Variant (220)..(221): Xaa in position 220 to 221 is any or no amino acid
  Variant (223)..(225): Xaa in position 223 to 225 is any amino acid
  Variant (227)..(229): Xaa in position 227 to 229 is any amino acid
  Variant (231)..(238): Xaa in position 231 to 238 is any amino acid
  Variant (239)..(252): Xaa in position 239 to 252 is any or no amino acid
  Variant (254)..(255): Xaa in position 254 to 255 is any amino acid
  Variant (256)..(256): Xaa in position 256 is any or no amino acid
VXXDXXXXXXXXXXXXXXXXXXXXXXGRXXXXLXXXXXXXXXPXTXENFXXLXXXXXXXXXXXXXXXXXXXXXXXXXXXXXXXXYXGXXFHRXIXXFMXQGGDXXXXXXXXXXXGXGGXXXSIYGXXXXXFXDEXXXXXXXXXXHXXXGXLSMANXXXXXGXXTNGSQFFIXXXXXXXXXXXXXXXXXXXXXXXXXXXXXXXXXXXLDXXHVVFGXVXXXXGXXXVXXXEXXXXXXXXXXXXXXXXXXXXXXIXXXG

SEQ ID NO: 1547 - protein, 11 aa, Artificial sequence
  protein pattern
  Variant (4)..(4): Xaa in position 4 is Ile or Val
  Variant (6)..(6): Xaa in position 6 is any amino acid
  Variant (7)..(7): Xaa in position 7 is Asp, Gly, Asn, Gln or Ser
  Variant (10)..(10): Xaa in position 10 is any amino acid
FHRXIXXFMXQ

SEQ ID NO: 1548 - protein, 11 aa, Artificial sequence
  protein pattern
  Variant (6)..(6): Xaa in position 6 is Ala or Ser
  Variant (8)..(8): Xaa in position 8 is any amino acid
  Variant (9)..(10): Xaa in position 9 to 10 is any or no amino acid
LSMANXGXXXN

SEQ ID NO: 1549 - protein, 9 aa, Artificial sequence
  protein pattern
  Variant (2)..(2): Xaa in position 2 is Asp or Asn
  Variant (3)..(3): Xaa in position 3 is Asp, Gly or Asn
  Variant (4)..(4): Xaa in position 4 is any amino acid
LXXXHVVFG

SEQ ID NO: 1550 - protein, 15 aa, Artificial sequence
  protein pattern
  Variant (2)..(2): Xaa in position 2 is Asp or Gly
  Variant (3)..(6): Xaa in position 3 to 6 is any amino acid
  Variant (7)..(7): Xaa in position 7 is Asp, Asn or Thr
  Variant (9)..(9): Xaa in position 9 is any amino acid
  Variant (11)..(11): Xaa in position 11 is Ala, Cys, Gly, Ser or Val
  Variant (12)..(12): Xaa in position 12 is any amino acid
GXXXXXXGXGXXSIY

SEQ ID NO: 1551 - DNA, 414 bp, Arabidopsis thaliana
  CDS (1)..(414)
atgtcgagctcaggccaaactcagttccgttatacacagacgccgtcgaaggtggttcatctgcggaatcttccatgggaatgcgtcgaagaggagctcatcgacctttgcaaacgattcggcaagatcgtcaataccaagagcaatgtcggcgccaatcgcaatcaagctttcgtcgaatttgctgacttgaatcaagctatatcaatggtttcgtattatgcttcatcttcagagcccgcacagattcgtgggaaaactgtctatattcagtactctaatcgccatgagattgttaacaatcagagtcctggagatgtccctggaaatgtcctcttggttacctttgaaggagtggaatctcacgaagtcagcatcgatgttatccatctgatgttgatgcctctttattaa

SEQ ID NO: 1552 - protein, 137 aa, Arabidopsis thaliana
MSSSGQTQFRYTQTPSKVVHLRNLPWECVEEELIDLCKRFGKIVNTKSNVGANRNQAFVEFADLNQAISMVSYYASSSEPAQIRGKTVYIQYSNRHEIVNNQSPGDVPGNVLLVTFEGVESHEVSIDVIHLMLMPLY

SEQ ID NO: 1553 - DNA, 1483 bp, Arabidopsis thaliana
  CDS (1)..(1326)
atggctgtatggttttggttccgatcacaaagagcatcgaatcgagctacttcctccgccggctttgctgtgtgtgtgatcgttcgtttactaaatctgaaacaagtatctaacgccttgccggagatgtcgagctcaggccaaactcagttccgttatacacagacgccgtcgaaggtggttcatctgcggaatcttccatgggaatgcgtcgaagaggagctcatcgacctttgcaaacgattcggcaagatcgtcaataccaagagcaatgtcggcgccaatcgcaatcaagctttcgtcgaatttgctgacttgaatcaagctatatcaatggtttcgtattatgcttcatcttcagagcccgcacagattcgtgggaaaactgtctatattcagtactctaatcgccatgagattgttaacaatcagagtcctggagatgtccctggaaatgtcctcttggttacctttgaaggagtggaatctcacgaagtcagcatcgatgttatccatctggtattttctgcttttggatttgtgcataaaattgccacatttgagaaagctgctggtttccaggcactagttcaatttactgatgtggagactgcatccgcggcaaggagtgcgttggatggcagaagtatacccaggtatctgctttccgcacatgttggttcgtgcagtttgcgaatgtcttattcagctcatactgatctcaacatcaagtttcagtcccaccggagcagagattacacaaatccataccttccagtgaatcagaccgcaatggatgggtctatgcagcctgctttaggtgctgacggcaagaaagttgaatctcagagcaacgtccttctcggtttgattgagaatatgcagtatgctgtcactgtggatgttcttcacacggtgttttctgcatatggaactgtccagaagattgctatatttgagaagaatggttcaacgcaagcattaattcaatactctgatataccaacagcagcaatggccaaagaagcactggaaggacactgcatttatgacggtggctactgtaagcttcgactatcatactctcgtcatactgatctgaatgttaaggcttttagcgacaaaagcagagactatacacttcctgatctaagcctacttgtggcacaaaaaggtcccgcggtgtcgggttctgcaccaccagcaggttggcagaacccgcaagcgcaaagtcaatactcaggttatggcggaagcccatatatgtacccatcatctgatcccaacggggcttcaccctcaggtcaacctccttactatggatgagatatttgtttactaaaaatttcggattttgctgccaatggggagtatttccatgtttaggttgtttgaggttaaaagtgtgattgttctttcttttttgttgttgacataatttaagtggggagaccaataataaatcgaatatgttgcgcttgct

SEQ ID NO: 1554 - protein, 441 aa, Arabidopsis thaliana
MAVWFWFRSQRASNRATSSAGFAVCVIVRLLNLKQVSNALPEMSSSGQTQFRYTQTPSKVVHLRNLPWECVEEELIDLCKRFGKIVNTKSNVGANRNQAFVEFADLNQAISMVSYYASSSEPAQIRGKTVYIQYSNRHEIVNNQSPGDVPGNVLLVTFEGVESHEVSIDVIHLVFSAFGFVHKIATFEKAAGFQALVQFTDVETASAARSALDGRSIPRYLLSAHVGSCSLRMSYSAHTDLNIKFQSHRSRDYTNPYLPVNQTAMDGSMQPALGADGKKVESQSNVLLGLIENMQYAVTVDVLHTVFSAYGTVQKIAIFEKNGSTQALIQYSDIPTAAMAKEALEGHCIYDGGYCKLRLSYSRHTDLNVKAFSDKSRDYTLPDLSLLVAQKGPAVSGSAPPAGWQNPQAQSQYSGYGGSPYMYPSSDPNGASPSGQPPYYG

SEQ ID NO: 1555 - DNA, 1395 bp, Oryza sativa
  CDS (1)..(1395)
atgtcgtcgtcggtcggcggcggcggcgggcagcagttccggtacacgcagacgccgtccaaggtgctgcacctgcggaacctgccgtgggagtgcgcggaggaggagctcgtcgagctctgcaaccccttcggccgcatcgtcaacaccaagtgcggcgtcggcgccaaccgcaaccaggccttcgtcgagttcactgacattaatcaagctatttcgatggtttcttactttgcatcatcttcggaaccagcgcaaatccgaggcaaaactgtttacattcagtattcaaacagacaagaaatagttaacaacaagagccctggagagactgctggaaatgtgttgctagttactatagaaggtgttcaagcaaacgatgtcaccatcgatgtgatccatctggttttctcagcttttggatttgttcacaaaatagccacttttgagaaggctgcaggttttcaggcactgattcaatacacagatgcagccacagcttctgcagcaagagaagccttagatggaagaagcatcccaaggtacttgcttccagagcatgtaacatcttgttgtttgcgtatttcgttctctgcgcataaggatctgaatatcaagttccagtcacatcgcagcagggattacaccaacccttaccttccggttaattcatctgcaatagatacgttacagcctgctgttggtgccgatggaaggaaagtggaagctgaaggcaatgttcttctcgcatcaattgaaaatatgcaatatgcagtcacggtggatgttctccatactgtgttctctgcatttggtacagtccagaaaatagctatttttgagaagaacggtggaacacaagctttgattcagtaccctgatgtaactacagcttcagttgcgaaggaagcattggaagggcattgcatctacgatggtggctactgtaagctccacctgtcatattctcgtcatactgatctcaatgtaaaggcacacagtgacaagagcagggattacacaatccctcaaggtgcgatgcaagcagtaccacaaccgcctggtgtaccaacaacatctgctgggtggcaaggtaatccacaagccggtggtgcatatgcaccacctggagctgctgctccaaaccacggcacaacagggcaagtgccaaattggaatcccgggaactctgggtatgctccagctccaggagcatatccaggtcaaatgtactcgtcaccaatgcagtatggcgcatcagggggcttctctgctcctgctgccccaccacaagagttgcatacttcgcagcagatgccgccgcctcaatatggaaatcagcctggaccagcaggtgcaccaggaaccgggcaaccacatccatattatcgctaa

SEQ ID NO: 1556 - protein, 464 aa, Oryza sativa
MSSSVGGGGGQQFRYTQTPSKVLHLRNLPWECAEEELVELCNPFGRIVNTKCGVGANRNQAFVEFTDINQAISMVSYFASSSEPAQIRGKTVYIQYSNRQEIVNNKSPGETAGNVLLVTIEGVQANDVTIDVIHLVFSAFGFVHKIATFEKAAGFQALIQYTDAATASAAREALDGRSIPRYLLPEHVTSCCLRISFSAHKDLNIKFQSHRSRDYTNPYLPVNSSAIDTLQPAVGADGRKVEAEGNVLLASIENMQYAVTVDVLHTVFSAFGTVQKIAIFEKNGGTQALIQYPDVTTASVAKEALEGHCIYDGGYCKLHLSYSRHTDLNVKAHSDKSRDYTIPQGAMQAVPQPPGVPTTSAGWQGNPQAGGAYAPPGAAAPNHGTTGQVPNWNPGNSGYAPAPGAYPGQMYSSPMQYGASGGFSAPAAPPQELHTSQQMPPPQYGNQPGPAGAPGTGQPHPYYR

SEQ ID NO: 1557 - DNA, 957 bp, Oryza sativa
  CDS (1)..(957)
atgtcgtcgtcggtcggcggcggcggcgggcagcagttccggtacacgcagacgccgtccaaggtgctgcacctgcggaacctgccgtgggagtgcgcggaggaggagctcgtcgagctctgcaaccccttcggccgcatcgtcaacaccaagtgcggcgtcggcgccaaccgcaaccaggccttcgtcgagttcactgacattaatcaagctatttcgatggtttcttactttgcatcatcttcggaaccagcgcaaatccgaggcaaaactgtttacattcagtattcaaacagacaagaaatagttaacaacaagagccctggagagactgctggaaatgtgttgctagttactatagaaggtgttcaagcaaacgatgtcaccatcgatgtgatccatctggttttctcagcttttggatttgttcacaaaatagccacttttgagaaggctgcaggttttcaggcactgattcaatacacagatgcagccacagcttctgcagcaagagaagccttagatggaagaagcatcccaaggtacttgcttccagagcatgtaacatcttgttgtttgcgtatttcgttctctgcgcataaggatctgaatatcaagttccagtcacatcgcagcagggattacaccaacccttaccttccggttaattcatctgcaatagatacgttacagcctgctgttggtgccgatggaaggaaagtggaagctgaaggcaatgttcttctcgcatcaattgaaaatatgcaatatgcagtcacggtggatgttctccatactgtgttctctgcatttggtacagtccagaaaatagctatttttgagaagaacggtggaacacaagctttgattcagtaccctgatgtaactacagcttcagttgcgaaggaagcattggaagggcattgcatctacgatggtggctactgcacacagtga

SEQ ID NO: 1558 - protein, 318 aa, Oryza sativa
MSSSVGGGGGQQFRYTQTPSKVLHLRNLPWECAEEELVELCNPFGRIVNTKCGVGANRNQAFVEFTDINQAISMVSYFASSSEPAQIRGKTVYIQYSNRQEIVNNKSPGETAGNVLLVTIEGVQANDVTIDVIHLVFSAFGFVHKIATFEKAAGFQALIQYTDAATASAAREALDGRSIPRYLLPEHVTSCCLRISFSAHKDLNIKFQSHRSRDYTNPYLPVNSSAIDTLQPAVGADGRKVEAEGNVLLASIENMQYAVTVDVLHTVFSAFGTVQKIAIFEKNGGTQALIQYPDVTTASVAKEALEGHCIYDGGYCTQ

SEQ ID NO: 1559 - DNA, 903 bp, Oryza sativa
  CDS (1)..(903)
atgtcgtcgtcggtcggcggcggcggcgggcagcagttccggtacacgcagacgccgtccaaggtgctgcacctgcggaacctgccgtgggagtgcgcggaggaggagctcgtcgagctctgcaaccccttcggccgcatcgtcaacaccaagtgcggcgtcggcgccaaccgcaaccaggccttcgtcgagttcactgacattaatcaagctatttcgatggtttcttactttgcatcatcttcggaaccagcgcaaatccgaggcaaaactgtttacattcagtattcaaacagacaagaaatagttaacaacaagagccctggagagactgctggaaatgtgttgctagttactatagaaggtgttcaagcaaacgatgtcaccatcgatgtgatccatctggttttctcagcttttggatttgttcacaaaatagccacttttgagaaggctgcaggttttcaggcactgattcaatacacagatgcagccacagcttctgcagcaagagaagccttagatggaagaagcatcccaaggtacttgcttccagagcatgtaacatcttgttgtttgcgtatttcgttctctgcgcataaggatctgaatatcaagttccagtcacatcgcagcagggattacaccaacccttaccttccggttaattcatctgcaatagatacgttacagcctgctgttggtgccgatggaaggaaagtggaagctgaaggcaatgttcttctcgcatcaattgaaaatatgcaatatgcagtcacggtggatgttctccatactgtgttctctgcatttggtacagtccagaaaatagctatttttgagaagaacggtggaacacaagctttgattcagtaccctgaaattattttcctatttttgtaa

SEQ ID NO: 1560 - protein, 300 aa, Oryza sativa
MSSSVGGGGGQQFRYTQTPSKVLHLRNLPWECAEEELVELCNPFGRIVNTKCGVGANRNQAFVEFTDINQAISMVSYFASSSEPAQIRGKTVYIQYSNRQEIVNNKSPGETAGNVLLVTIEGVQANDVTIDVIHLVFSAFGFVHKIATFEKAAGFQALIQYTDAATASAAREALDGRSIPRYLLPEHVTSCCLRISFSAHKDLNIKFQSHRSRDYTNPYLPVNSSAIDTLQPAVGADGRKVEAEGNVLLASIENMQYAVTVDVLHTVFSAFGTVQKIAIFEKNGGTQALIQYPEIIFLFL

SEQ ID NO: 1561 - DNA, 1386 bp, Oryza sativa
  CDS (1)..(1386)
atgccgtcggggtcggcgacgcagttccggtacacgcagacgccgtccaaggtgctccacctccggaacatgccgtgggagtgcaccgaggaggagctcgtcgagctctgcaagcccttcggcagggtcgtcaacaccatgtgcaacgtcggcgccaaccgcaaccaggccttcgtcgagttcgcagatcaaaaccaggcaatttcaatggtttcatattatgcttcttcttcagaacctgctcaagttcgtggcaaaactgtatatatccagtactcaaacagacaagaaattaccaacaataaaggaactggtgattcctctggcaatgttcttcttgtcacttttgaaggtgtccagcctaatgatattagcatagatgtcattcatttggtattttccgcatttgggtttgtccacaagatagcaacctttgagaaggctgctggtttccaggcacttatccaatatactgatgctccaactgcactagaagcaaaaaattcgttggatggaagaagcatcccgagatatttacttcctgaacatgtccccacctgtcacctgcgcataaccttttctgcgcacaaggatttgaatatcaagtttcaatcacatcgtagcagggattacacgaatccatatcttcctgtgaatccaacagcaatcgagggaatcgcacagcccactttaggccctgatgggaagataaaggagcctgagagcaatgtgcttttggcttcaatagagaacatgcagtatgctgtgacggtggatgttctacatactgtgttctctgcttttggtactgttcaaaagattgcaatgtttgagaagaatggtggaatgcaggccttaattcaatatccagacatcacaacggcagcagttgctaaacaagctttggaagggcactgcatatatgatggaggttactgtaagcttcatctgtcatactctcgtcatactgatctcaatgtaaaggcacatgatgagagaagcagagactacactgtttcatcagatcctagtgcacaaatgcaagctgcagcgcaagccccaggtcctagcactccaggagtggcatggcaaaacaccgcacccagtgcttccttttatggcagcactgcggcagcgactcctgttggacaagtgccagcttggaatccaaacatgcaggcaggtgcttttggatcggcatcgtctgcatacccaacccaaccaatgatgccaggatcagttccacactatccaggaattggatccagttccggagcactgccagtatcgttccaggcctcacatcagatgccacagtatggtgtacccccagctgctccacaccatgctccaccggctggccaaccaatgtatttcccgaaataa

SEQ ID NO: 1562 - protein, 461 aa, Oryza sativa
MPSGSATQFRYTQTPSKVLHLRNMPWECTEEELVELCKPFGRVVNTMCNVGANRNQAFVEFADQNQAISMVSYYASSSEPAQVRGKTVYIQYSNRQEITNNKGTGDSSGNVLLVTFEGVQPNDISIDVIHLVFSAFGFVHKIATFEKAAGFQALIQYTDAPTALEAKNSLDGRSIPRYLLPEHVPTCHLRITFSAHKDLNIKFQSHRSRDYTNPYLPVNPTAIEGIAQPTLGPDGKIKEPESNVLLASIENMQYAVTVDVLHTVFSAFGTVQKIAMFEKNGGMQALIQYPDITTAAVAKQALEGHCIYDGGYCKLHLSYSRHTDLNVKAHDERSRDYTVSSDPSAQMQAAAQAPGPSTPGVAWQNTAPSASFYGSTAAATPVGQVPAWNPNMQAGAFGSASSAYPTQPMMPGSVPHYPGIGSSSGALPVSFQASHQMPQYGVPPAAPHHAPPAGQPMYFPK

SEQ ID NO: 1563 - DNA, 945 bp, Oryza sativa
  CDS (1)..(945)
atgccgtcggggtcggcgacgcagttccggtacacgcagacgccgtccaaggtgctccacctccggaacatgccgtgggagtgcaccgaggaggagctcgtcgagctctgcaagcccttcggcagggtcgtcaacaccatgtgcaacgtcggcgccaaccgcaaccaggccttcgtcgagttcgcagatcaaaaccaggcaatttcaatggtttcatattatgcttcttcttcagaacctgctcaagttcgtggcaaaactgtatatatccagtactcaaacagacaagaaattaccaacaataaaggaactggtgattcctctggcaatgttcttcttgtcacttttgaaggtgtccagcctaatgatattagcatagatgtcattcatttggtattttccgcatttgggtttgtccacaagatagcaacctttgagaaggctgctggtttccaggcacttatccaatatactgatgctccaactgcactagaagcaaaaaattcgttggatggaagaagcatcccgagatatttacttcctgaacatgtccccacctgtcacctgcgcataaccttttctgcgcacaaggatttgaatatcaagtttcaatcacatcgtagcagggattacacgaatccatatcttcctgtgaatccaacagcaatcgagggaatcgcacagcccactttaggccctgatgggaagataaaggagcctgagagcaatgtgcttttggcttcaatagagaacatgcagtatgctgtgacggtggatgttctacatactgtgttctctgcttttggtactgttcaaaagattgcaatgtttgagaagaatggtggaatgcaggccttaattcaatatccagacatcacaacggcagcagttgctaaacaagctttggaagggcactgcatatatgatggaggttactgcacatga

SEQ ID NO: 1564 - protein, 314 aa, Oryza sativa
MPSGSATQFRYTQTPSKVLHLRNMPWECTEEELVELCKPFGRVVNTMCNVGANRNQAFVEFADQNQAISMVSYYASSSEPAQVRGKTVYIQYSNRQEITNNKGTGDSSGNVLLVTFEGVQPNDISIDVIHLVFSAFGFVHKIATFEKAAGFQALIQYTDAPTALEAKNSLDGRSIPRYLLPEHVPTCHLRITFSAHKDLNIKFQSHRSRDYTNPYLPVNPTAIEGIAQPTLGPDGKIKEPESNVLLASIENMQYAVTVDVLHTVFSAFGTVQKIAMFEKNGGMQALIQYPDITTAAVAKQALEGHCIYDGGYCT

SEQ ID NO: 1565 - DNA, 1224 bp, Glycine max
  CDS (1)..(1224)
atggcatcggtgtctactcagcaacagttccgttacacgcagccaccatcaaaggtgcttcatttgagaaatttgccgtgggagtgcacagaggacgaactaattgaacttgggaagctatttgggaaagttgtgaacacaaagtgcaatgtcggagcaaatcggaatcaagcttttatagaatttgcagatttaaatcaggcgatcgcaatgatatcatattatgcctcatcgtcggagcctgctcaagtacgagggaaaactgtgtatcttcagtattccaataggcaagaaatagtgaataacaaaactgcagcagatgttgctggaaatgtactgttggtaacaatcgagggtgaagatgcaaggcttgtcagcattgatgttttacacttggcattggtgcaattttcagatgcagaaactgctacctccgcaaaggatgctttggatggaagaagcatacctaggtacctgcttcctgaacatataggaccatgtggccttaagatcacatattctggacattcagacttaagtgtcaagtttcaaagtcacagaagcagagactacactaatccttaccttcctgttgctcaatctgccatggagggaagtggacagcccatggtgggtttggatgggaagagactggaggccgagagtaatgttcttcttgcatctattgagaacatgcagtatactgtaaccttggatgtcttacacatggttttctctgcctttggacctgtccaaaagattgcaatgtttgacaagaatggtggtttacaggctctgattcaatatccagatatccaaacagctgttgtggccaaggaaaccttggaaggacactgcatatatgatggaggtttttgcaagcttcacatctcgtattcacgtcatactgatcttagtataaaggtgaataatgagagaagtagagactataccattcctaatgtacctccacctgtagtgaatgctcagccctcaattttagggcaacatccagttccgatgacgggccctcctcctcaacattacaatggagctcagtacgcaccagttactgagcaaactctgatgtctcattctcaggctggatgggggacaggtccacctcagtctatgcaacagatgcataaccatccttacacgccatccgccatggtgccaccgcaaacaacccctggaatgcagtttccaagtcacattcaatag

SEQ ID NO: 1566 - protein, 407 aa, Glycine max
MASVSTQQQFRYTQPPSKVLHLRNLPWECTEDELIELGKLFGKVVNTKCNVGANRNQAFIEFADLNQAIAMISYYASSSEPAQVRGKTVYLQYSNRQEIVNNKTAADVAGNVLLVTIEGEDARLVSIDVLHLALVQFSDAETATSAKDALDGRSIPRYLLPEHIGPCGLKITYSGHSDLSVKFQSHRSRDYTNPYLPVAQSAMEGSGQPMVGLDGKRLEAESNVLLASIENMQYTVTLDVLHMVFSAFGPVQKIAMFDKNGGLQALIQYPDIQTAVVAKETLEGHCIYDGGFCKLHISYSRHTDLSIKVNNERSRDYTIPNVPPPVVNAQPSILGQHPVPMTGPPPQHYNGAQYAPVTEQTLMSHSQAGWGTGPPQSMQQMHNHPYTPSAMVPPQTTPGMQFPSHIQ

SEQ ID NO: 1567 - DNA, 1491 bp, Glycine max
  CDS (1)..(1491)
atgtcaacctcgagccagcaccagttccgatatacacaaaccccttccaaggtcctgcaccttcgcaacctcccctgggaatgctccgaggaggagctcagagagctctgcagacccttcggtaagatcgtcaacaccaagtgcaatgtcggcgccaatcgcaaccaggcttttgtcgaattcgtggatctaaatcaagccatttcgatggtttcatattatgcttcatcttcagaaccagctatggttcgtggtaaaactgtttacattcagtattctaatagacatgaaattgtcaacaacaaaagccctggagatattcctggaaatgtcttgctggtaactattgaaggtgtggaagctggggatgtgagcattgatgttatccatttggtgttttctgcttttggctttgttcacaaaattgctacattcgaaaagactgcaggtttccaggctctgattcagttcactgatgctgagaccgcttcttcagctagggatgcactggatggaagaagtataccaagatacctgcttccagcccatgttggttcttgtaacttgcgaatttcatattccgcacataaagatctgaatatcaaatttcagtcaaatcgcagcagggactacacaaatcccatgcttcctgttaattatactgctattgagggggcagtacagactgctgtaggccctgatgggaagaggaaagaacctgacagcaatgtgcttttggcttccattgaaaatatgcagtatgctgttactgttgatgtcctccacacggtgttctctgcatttggtactgtccagaaaattgctatatttgaaaagaacggtcaaactcaggcactgattcagtaccctgatatcataacggcatcagctgctagagaagctctagaggggcattgcatatatgatggtggctattgtaagcttcatctatcatactctcgtcatactgatctcaatgtaaaggctttcagtgacaaaagtagagactatacagtgccagatcctagtctgctagcagcacaaggtcctgcaacagcttggcaaaatcctcaggctgcacctatgtaccctggcagtgcccctgcttatcatactcaagttcctggcggacaagtgccagcatgggatccaaacctgcaggcagttagaccgagttatgtatcagcacctggtacttttcatgttcaatctggtgcagctcctccaatgccagcctatgcgccagccgcagctatgcctgctgcttcctcacctcatgcacaaagcagccccatggctcataatgcaaatccaatgggaatcgcccagcccagggttccacccaatgcaaatttacagtccagtggtgcttcactttcagctcctggttcctcacctctcatgcaaaccagccaagctgctcaaggattggttcagccaaatgcaagacctggtggtgcttcacctccaggtcaacattattatggttag

SEQ ID NO: 1568 - protein, 496 aa, Glycine max
MSTSSQHQFRYTQTPSKVLHLRNLPWECSEEELRELCRPFGKIVNTKCNVGANRNQAFVEFVDLNQAISMVSYYASSSEPAMVRGKTVYIQYSNRHEIVNNKSPGDIPGNVLLVTIEGVEAGDVSIDVIHLVFSAFGFVHKIATFEKTAGFQALIQFTDAETASSARDALDGRSIPRYLLPAHVGSCNLRISYSAHKDLNIKFQSNRSRDYTNPMLPVNYTAIEGAVQTAVGPDGKRKEPDSNVLLASIENMQYAVTVDVLHTVFSAFGTVQKIAIFEKNGQTQALIQYPDIITASAAREALEGHCIYDGGYCKLHLSYSRHTDLNVKAFSDKSRDYTVPDPSLLAAQGPATAWQNPQAAPMYPGSAPAYHTQVPGGQVPAWDPNLQAVRPSYVSAPGTFHVQSGAAPPMPAYAPAAAMPAASSPHAQSSPMAHNANPMGIAQPRVPPNANLQSSGASLSAPGSSPLMQTSQAAQGLVQPNARPGGASPPGQHYYG

SEQ ID NO: 1569 - DNA, 1302 bp, Glycine max
  CDS (1)..(1302)
atggcatcggtatctagtcagccacagttccgttacactcagccgccgtcaaaggtgcttcatttgaggaacttgccgtgggagtgcacagaggaggaactgattgagcttgggaagccgtttggcaaagttgttaacacaaaatgcaatgttggggcaaatagaaatcaagcttttattgaatttgcagatttgaatcaagccattgcaatgatatcatactatgcctcatcatcagagcctgctcaagtacgagggaaaactgtatacctacaatattcaaataggcaagaaatagtgaataacaaaactgctgcagatgttcctgggaatgtattgttggtaacgattgagggtgcagatgcacgtcttgtcagcattgatgtcttgcacttggttttttcagcctttggatttgtgcataagattactactttcgagaagacagcaggatttcaggcactggtgcaattctcagatgcagagactgccacctctgcgaaggatgctttggatggaagaagcatacctaggtatctgctgcctgagcatatgggaccatgtacccttaggatcacttattctggacattcagatttaagtgtaaagtttcaaagccacaggagcagagactatactaatccttaccttcctgttgctccatcagctgtggagggaagtggacaggctatggttggcttggatgggaaaagactggaggctgagagtaatgttctccttgcatctattgaaaacatgcaatatgccgtaacactggatgtcttacacatggttttctctgcttttggtcctgtccaaaaaattgcaatgttcgataagaatggtggtttgcaggctctgattcaatttccagatactcagacagctgttgtggccaaggaggccttggaaggacattgcatatatgatggaggtttttgcaagcttcacatttcatattcacgacatactgatctaagtataaaggtcaataatgataggagcagagactataccattcctaatacccctgctgtgaacgtccaaccctcaattttagggcaacaatctgttcccatgatgggccctccacaacaaccatacaatgggtctcaggctggatgggggacagctccaccagcaacaacggttcagtctatgccaatgcagatgcacaataatgtttacatgccatctggaactatgccacaacaaatggcccctggaatgcaatttccaagttacaacacagcacaacctacaacaacattgccctcatatcgatctgatcgtactcaatag

SEQ ID NO: 1570 - protein, 433 aa, Glycine max
MASVSSQPQFRYTQPPSKVLHLRNLPWECTEEELIELGKPFGKVVNTKCNVGANRNQAFIEFADLNQAIAMISYYASSSEPAQVRGKTVYLQYSNRQEIVNNKTAADVPGNVLLVTIEGADARLVSIDVLHLVFSAFGFVHKITTFEKTAGFQALVQFSDAETATSAKDALDGRSIPRYLLPEHMGPCTLRITYSGHSDLSVKFQSHRSRDYTNPYLPVAPSAVEGSGQAMVGLDGKRLEAESNVLLASIENMQYAVTLDVLHMVFSAFGPVQKIAMFDKNGGLQALIQFPDTQTAVVAKEALEGHCIYDGGFCKLHISYSRHTDLSIKVNNDRSRDYTIPNTPAVNVQPSILGQQSVPMMGPPQQPYNGSQAGWGTAPPATTVQSMPMQMHNNVYMPSGTMPQQMAPGMQFPSYNTAQPTTTLPSYRSDRTQ

SEQ ID NO: 1571 - DNA, 1491 bp, Glycine max
  CDS (1)..(1491)
atgtcaacctcgaaccagcaccagttccgatacactcaaaccccttccaaggtgctccaccttcgcaaccttccctgggaatgctccgaagaggaactcagagagctctgcaaacccttcggtaagatcatcaacaccaagtgcaatgtcggcgccaatcgcaaccaggcttttgtcgaattcgcggatctaaatcaagccatttcgatggtttcatattatgcttcatcttcagaaccagctatggttcgtggtaaaactgtttacattcagtattctaatagacatgaaattgtcaacaacaaaagccctggagatattcctggaaatgtcttgctggtaactattgaaggtgtggaagctggggatgtgagcattgatgttatccatttggcttgtgttttctgcttttggctttgttcacaaaattgctacattcgaaaagactgcaggttttcaggttattcactgatgctgagactgcttcttcagctcgggatgcactggatggaagaagtataccaaggcaaatacctgcttccagcccatgttggttcttgtaacttgcgaatttcatattccgcacataaagatctgaatatcaaatttcagtcaaatcgcagcagggactatacaaatcccatgcttcctgttaattataccgctattgagggggcagtacagactgctgtaggccctgatgggaagaggaaagaacctgagagcaatgtgcttttggcttccattgaaaatatgcagtatgctgttactgttgatgtcctccacacggtgttctctgcatttggtactgtccagaaaattgctatatttgaaaagaatggtcaaactcaggcactaattcagtaccctgatatcataacggcatcagctgctagagaagctctagaggggcattgcatatatgatggtggctattgtaagcttcatctatcatactctcgtcatactgatctcaatgtaaaggctttcagtgacaaaagtagagattatacagtgccggatcctagtctgcttgcagcacaaggtccaccaacagcttggcaaaatcctcaggctgcatctatgtaccctggtagtgcccctgcttatcatactcaagttcccggcggacaagtgccatcatgggatccatccctgcaggcagttagaccgagttatgcatcggcacctggtacttttcctgttcaaactggtgcagctcctccaatgccgtcctatgcgccagcatcagctatgcctgttgcttcctcacctcatgcacaaagcagccccatggctcataatgcaaatccaatgggaattgctcagctcggggttccacccaatgtaaatttacagtccagtggtgcttcactttcagcgcctggttcctcacctctcatgcaaaccagtcaggctgctcaaggattgcttcagccaaatgcaagacctggtggtgcttcaccttcaggtcaacattattatggttag

SEQ ID NO: 1572 - protein, 496 aa, Glycine max
MSTSNQHQFRYTQTPSKVLHLRNLPWECSEEELRELCKPFGKIINTKCNVGANRNQAFVEFADLNQAISMVSYYASSSEPAMVRGKTVYIQYSNRHEIVNNKSPGDIPGNVLLVTIEGVEAGDVSIDVIHLACVFCFWLCSQNCYIRKDCRFSGYSLMLRLLLQLGMHWMEEVYQGKYLLPAHVGSCNLRISYSAHKDLNIKFQSNRSRDYTNPMLPVNYTAIEGAVQTAVGPDGKRKEPESNVLLASIENMQYAVTVDVLHTVFSAFGTVQKIAIFEKNGQTQALIQYPDIITASAAREALEGHCIYDGGYCKLHLSYSRHTDLNVKAFSDKSRDYTVPDPSLLAAQGPPTAWQNPQAASMYPGSAPAYHTQVPGGQVPSWDPSLQAVRPSYASAPGTFPVQTGAAPPMPSYAPASAMPVASSPHAQSSPMAHNANPMGIAQLGVPPNVNLQSSGASLSAPGSSPLMQTSQAAQGLLQPNARPGGASPSGQHYYG

SEQ ID NO: 1573 - DNA, 1299 bp, Glycine max
  CDS (1)..(1299)
atggcatcggtatccagtcaaccacagttccgttacactcagccaccgtcaaaggttctccatttgaggaacttgccatgggagtgcacagaggaggaactgattgagcttgggaagccgtttggcaaagttgttaacacaaaatgcaatgttggggcgaatagaaatcaagcttttattgaatttgcagatttgaatcaagccattgcaatgatatcgtactatgcctcatcatcagagcctgctcaagtacgtgggaaaactgtatacctacaatattcaaataggcaagaaatagtgaataacaaaactactgcagatgttcccgggaatgtattgttggtaacgattgagggtgcagatgcacgtcttgtcagcattgatgtcttgcacttggttttttcagcctttggatttgtgcataagattactactttcgagaagacagcaggatttcaggcactggtgcaattctcagatgcagagactgccacctctgcgaaggatgctttggatggaagaagcatacctaggtatctgctgcctgagcatgtgggaccatgtacccttaggatcacttattccggacattcagatttaagtgtaaagtttcaaagccacaggagcagagactatactaatccttaccttcctgttgctccatcagctgtcgagggaagtggacaggctatggttggtttggatgggaaaagattggagactgagagtaatgttctccttgcatctattgagaacatgcaatatgctgtaacattggatgtcttacacatggttttctctgcttttggccctgtccaaaaaattgcaatgttcgataagaatggtggtttgcaggctctgattcagtatccagatactcagacagctgttgtggccaaggaagccttggaaggacattgcatatatgatgggggtttttgcaagcttcacctttcatattcacgacatactgatctaagtataaaggtcaataatgataggagcagagactataccattcctaatacccctattgtgaacgcccaaccctcaattttcgggcaacaatctgtttccatgatgggcccttcacaacaaccattctatgggtctcaggctggatgggggacagctccaccagcagcggttcagtctatgccaatgcagatgcacaataatgtttacatgccacctggaactatgccacaacaaatggcccctggaatgcaatttcctagtcacaacacagcacaacctacaacaacaatgccctcatatggatctgatcgtactcaatag

SEQ ID NO: 1574 - protein, 432 aa, Glycine max
MASVSSQPQFRYTQPPSKVLHLRNLPWECTEEELIELGKPFGKVVNTKCNVGANRNQAFIEFADLNQAIAMISYYASSSEPAQVRGKTVYLQYSNRQEIVNNKTTADVPGNVLLVTIEGADARLVSIDVLHLVFSAFGFVHKITTFEKTAGFQALVQFSDAETATSAKDALDGRSIPRYLLPEHVGPCTLRITYSGHSDLSVKFQSHRSRDYTNPYLPVAPSAVEGSGQAMVGLDGKRLETESNVLLASIENMQYAVTLDVLHMVFSAFGPVQKIAMFDKNGGLQALIQYPDTQTAVVAKEALEGHCIYDGGFCKLHLSYSRHTDLSIKVNNDRSRDYTIPNTPIVNAQPSIFGQQSVSMMGPSQQPFYGSQAGWGTAPPAAVQSMPMQMHNNVYMPPGTMPQQMAPGMQFPSHNTAQPTTTMPSYGSDRTQ

SEQ ID NO: 1575 - DNA, 710 bp, Glycine max
  CDS (203)..(634)
  misc_feature (67)..(67): n is a, g, c or t
  misc_feature (68)..(68): n is a, g, c or t
  misc_feature (683)..(683): n is a, g, c or t
  misc_feature (690)..(690): n is a, g, c or t
  misc_feature (691)..(691): n is a, g, c or t
  misc_feature (697)..(697): n is a, g, c or t
tcgagtgtgttgcccgcgtgtgccaataaaccaattactctgtgttgataacccggtgatagctccnnttctttaccttttcccttttgttgtgagaacgcctaaggtccgttaattcccgggtcgacccacgcgtccgcgtaaaaaaaaccacgctcttctctttctctcaattctctcagattttgggttatcgtttgaaatggcatcggtatccagtcaaccacagttccgttacactcagccaccgtcaaaggttctccatttgaggaacttgccatgggagtgcacagaggaggaactgattgagcttgggaagccgtttggcaaagttgttaacacaaaatgcaatgttggggcgaatagaaatcaagcttttattgaatttgcagatttgaatcaagccattgcaatgatatcgtactatgcctcatcatcagagcctgctcaagtacgtgggaaaactgtatacctacaatattcaaataggcaagaaatagtgaataacaaaactactgcagatgttcccgggaatgtattgttggtaacgattgagggtgcagatgcacgtcttgtcagcattgatgtcttgcacttggtaagcagttgcacgtgtgtattagttatgtgctaacactgtaatcaagaggatgctggccatttagttttggaattaggtttgngtttggnnggctgnggaaaaatggggg

SEQ ID NO: 1576 - protein, 143 aa, Glycine max
MASVSSQPQFRYTQPPSKVLHLRNLPWECTEEELIELGKPFGKVVNTKCNVGANRNQAFIEFADLNQAIAMISYYASSSEPAQVRGKTVYLQYSNRQEIVNNKTTADVPGNVLLVTIEGADARLVSIDVLHLVSSCTCVLVMC

SEQ ID NO: 1577 - DNA, 1678 bp, Zea mays subsp. mays
  CDS (74)..(1468)
ccaaaccctaaccctagcagcggtgccacaaccgcccgcgttcccggccggagaggaagccgagccagcaaggatgccgcccgggtcggcgacgcaatttcggtacacgcagacgccgtccaaggtgctgcatcttcggaacatgccatgggagtgcaccgaggaggagctcgtcgacctctgcaaaccctttggccgggtcgtaaacaccatgtgcaacgtcggcgctaaccgcaaccaggcattcgtcgagtttgcagatcaaaaccaggcaatttcaatggtgtcctattatgcttcatcttcagaacctgctcaagttcgtggtaaaactgtatatatccaatattcaaacaggcaagaaattactaacaataaaggcactggggattcttctggcaatgttctacttgtcacttttgaaggtgttcagcctaatgatgttaccatagaagttattcatttggttttttcggcatttgggtttgttcacaagatagctacttttgagaaagcagctggtttccaggcacttatccagtatactgatgccccaactgctcttgaagctaaaaactcattggatggaagaagcatcccaaaatatttacttccagaacatatcggtgcctgccacatgcgcataaccttttctgcgcataaggatttgaatatcaaatttcagtcgcatcgcagcagggattacaccaatccttaccttcctgtgaaccaaacagcaattgaggggattgtgcagcccacggtgggccctgatgggaaggtaaaggagcctgagagcaatgtacttttagcatcaattgagaacatgcaatatgctgtgacggtggatgttctgcacactgtgttttctgcttttggagctgttcaaaaaattgcaatgtttgagaagaatggtggaatgcaggctctaatccaatatccagatataactaccgcagccgttgctaaacaagctttggagggacactgcatatatgatggcggttactgtaagcttcatctgtcatactctcgtcatactgatctcaatgtaaaggcacatgatgagagaagcagggactacactctttcagaccctaacgtgcagctgcaagctgctgcacaaacgccagttctaaggtctccgggagtggcatggcagaacactgcatcagtaccagctgctcctttttatgcaagcacagcgacttcaactcctattggagttggacaggtggctgcttggaatcctaacatgcaggcagggagttttgcatctgcatcgactgcataccccaaccaaccattaatggccaactccatgcctcactatcctgctattggatcgagttccggtgccccaccagtatcatttcaggcttcgcagcagatgacacagtatagcatgccccctggtgctccgccgcacgcaccaccagctggccaatcaatttacttcccgaagtaagcggttttggttcaatattatcagagagcaatcaggcattgttacctgcgacaattgtggtccgcaaatgcaatcttgcgaattttgcaagtgcgctgtagtacttgtaacttgcgagcgcccttcgcaagaatgcatcagcgtttgctgtgtctgtaaaactgtcaaaaatagtgtttacctattagcctgcatggtatattgttggtg

SEQ ID NO: 1578 - protein, 464 aa, Zea mays subsp. mays
MPPGSATQFRYTQTPSKVLHLRNMPWECTEEELVDLCKPFGRVVNTMCNVGANRNQAFVEFADQNQAISMVSYYASSSEPAQVRGKTVYIQYSNRQEITNNKGTGDSSGNVLLVTFEGVQPNDVTIEVIHLVFSAFGFVHKIATFEKAAGFQALIQYTDAPTALEAKNSLDGRSIPKYLLPEHIGACHMRITFSAHKDLNIKFQSHRSRDYTNPYLPVNQTAIEGIVQPTVGPDGKVKEPESNVLLASIENMQYAVTVDVLHTVFSAFGAVQKIAMFEKNGGMQALIQYPDITTAAVAKQALEGHCIYDGGYCKLHLSYSRHTDLNVKAHDERSRDYTLSDPNVQLQAAAQTPVLRSPGVAWQNTASVPAAPFYASTATSTPIGVGQVAAWNPNMQAGSFASASTAYPNQPLMANSMPHYPAIGSSSGAPPVSFQASQQMTQYSMPPGAPPHAPPAGQSIYFPK

SEQ ID NO: 1579 - DNA, 730 bp, Zea mays
  CDS (118)..(603)
gaatcaaaaaggggcgaaccgctacctcctttacacactttcgtggctccgccgcagcacgaaaccctagcttctgcatctccgccccctccacctcccctccgcgaagcaggcgagatgtcgtcgggcggcggtggggggcagcagttccgctacacgcagacgccgtccaaggtgctgcacctgcggaaccttccgtgggagtgcgcggaagaggagctcgttgagctctgcaagcccttcggccgcatcgtcaacacaaagagcggcgtcggcgccaaccgcaaccaggcctttgtcgagttcactgacgttaatcaggcaatctcgatggtttcttatttcgcatcatcttcagaaccagcacaaatacgaggcaagactgtttatataattaacaacaagagtcctggagagactgctggaaatgtcttgcttgttactatagagggtgttcaatctagtgatgtcaccattgatgtgatccatatggtgagttctaaaatcctttccttttcctgtcttctaaagtacttagatggttgtgttagtatggtaatgacaaacctcaagtatgcctgttattttcttgattgccgttgactgaaggaatccaagggagtctacctgacccgatccttgtaaatcaaagattttacatagattttaattttcgtagtaacatattctgcatgaatcagcaggcccatgataactggagaaaatatca

SEQ ID NO: 1580 - protein, 161 aa, Zea mays
MSSGGGGGQQFRYTQTPSKVLHLRNLPWECAEEELVELCKPFGRIVNTKSGVGANRNQAFVEFTDVNQAISMVSYFASSSEPAQIRGKTVYIINNKSPGETAGNVLLVTIEGVQSSDVTIDVIHMVSSKILSFSCLLKYLDGCVSMVMTNLKYACYFLDCR

SEQ ID NO: 1581 - DNA, 905 bp, Zea mays
  CDS (159)..(893)
ccggccgggaggcgtctatccattagaaaattggactgattgaccgcaccgattccgcgatacgttcccgaatccaacccatcttcgtccgctccggccactcgtttcgccgccgtcggtcgccacccgcaaggtttggaggataagattcgggagggatggcttccggtgggcagccgcagttccggtacacgcagccgccgtcgaaggtgctccacctgcggaatctgccgtgggactgcactccagaggagctggtcgagctggggacccccttcggcaaggtcgtcaacaccaagtgcggcgtcggcgccaaccgcaatcaggcattcatcgaattcggcgaccaaaatcaagctattgccatgatatcatattacgcatcgtcaacagagccagcacaggtaagagggaaaaatgtgtaccttcagtactcaaatagacaggagattgtcaacaacaaggcaactggggaaggttcaggcaacgttttgcttgtgggaatggagggtgttgcaccagattctgtcagcattgatgttctacacgtggtattttctgctttcggatttgttcataagatcgctacctttgagaaagcatctggttatcaggctttgattcagttttctgatgctgaaactgcaacatctgcaaaagctgcactggatggtagatgcattcctagctatttgctaccagaactggatgtggcctgcactttgagaataacctattcagcacacagtgttctcaacgtcaagtatcagagccacaggagtagggacttcactaatccttaccttccttttctggactctgctaaagatggctctggaccggatggaaaaaaacaggaagcagagagcaatatactgcttgcttctatttgaaacatgcaatat

SEQ ID NO: 1582 - protein, 244 aa, Zea mays
MASGGQPQFRYTQPPSKVLHLRNLPWDCTPEELVELGTPFGKVVNTKCGVGANRNQAFIEFGDQNQAIAMISYYASSTEPAQVRGKNVYLQYSNRQEIVNNKATGEGSGNVLLVGMEGVAPDSVSIDVLHVVFSAFGFVHKIATFEKASGYQALIQFSDAETATSAKAALDGRCIPSYLLPELDVACTLRITYSAHSVLNVKYQSHRSRDFTNPYLPFLDSAKDGSGPDGKKQEAESNILLASI

SEQ ID NO: 1583 - DNA, 959 bp, Zea mays
  CDS (127)..(618)
acagcacacaactcgtcctcggtcctccgtacccttccgcgctccgccccagcacgaaacgccgaaaccctaccctttggcttctccgtcctcgtcctcgcccccgcccatccgcgcaccagccgaatgtcgtcgggaggcggtggggggcagcagttccgctacacgcagacgccgtccaaggtgctgcacctgcggaaccttccgtgggagtgcgcggaagaggagctcgtcgagctctgcaagcctttcggccgcatcgtcaacaccaagagcggcgtcggcgccaaccacaaccaggcctttgtcgagttcactgacgttaatcaggcaatctcgatggtttcttatttcgcatcatcttcagaaccagcacaaatacgaggcaagactgtttatattcagtattcaaataggcaagaaataattaacaacaagagtcctggagagactgctggaaatgtcttgcttgttaccatagagggtgttcaatctagtgatgtcaccattgatgtgatccatatggttttctcggcttttgggtatgttcataaaatagccacctttgaaaaggctgcaggttttcaggcattgatccagtacactgatgcgaaataagaaacaggacgatttgcccagacttggtgtttttggtgctgttgaaatctccgatccctttggggtgtgacccactggacatggccaatttgtcacaatttattattttgacccatgtcatgtgaaactcctttcgttgaagtctggtatctagattgacttgtatcagagctgtggtttacgcagactggattctggagtactggactgtgtgtgtgtttttcggaactgtgcatctgacttttagctgttcgttgactttgtttttcttttttcagataaagagctgtttcttgatttgatgcaagtaggcttggtactcttcaaaaaaaaaaaaaaaa

SEQ ID NO: 1584 - protein, 163 aa, Zea mays
MSSGGGGGQQFRYTQTPSKVLHLRNLPWECAEEELVELCKPFGRIVNTKSGVGANHNQAFVEFTDVNQAISMVSYFASSSEPAQIRGKTVYIQYSNRQEIINNKSPGETAGNVLLVTIEGVQSSDVTIDVIHMVFSAFGYVHKIATFEKAAGFQALIQYTDAK

SEQ ID NO: 1585 - DNA, 1113 bp, Arabidopsis thaliana
  CDS (1)..(1113)
atgtcgagctcaggccaaactcagttccgttatacacagacgccgtcgaaggtggttcatctgcggaatcttccatgggaatgcgtcgaagaggagctcatcgacctttgcaaacgattcggcaagatcgtcaataccaagagcaatgtcggcgccaatcgcaatcaagctttcgtcgaatttgctgacttgaatcaagctatatcaatggtttcgtattatgcttcatcttcagagcccgcacagattcgtgggaaaactgtctatattcagtactctaatcgccatgagattgttaacaatcagagtcctggagatgtccctggaaatgtcctcttggttacctttgaaggagtggaatctcacgaagcactagttcaatttactgatgtggagactgcatccgcggcaaggagtgcgttggatggcagaagtatacccaggtatctgctttccgcacatgttggttcgtgcagtttgcgaatgtcttattcagctcatactgatctcaacatcaagtttcagtcccaccggagcagagattacacaaatccataccttccagtgaatcagaccgcaatggatgggtctatgcagcctgctttaggtgctgacggcaagaaagttgaatctcagagcaacgtccttctcggtttgattgagaatatgcagtatgctgtcactgtggatgttcttcacacggtgttttctgcatatggaactgtccagaagattgctatatttgagaagaatggttcaacgcaagcattaattcaatactctgatataccaacagcagcaatggccaaagaagcactggaaggacactgcatttatgacggtggctactgtaagcttcgactatcatactctcgtcatactgatctgaatgttaaggcttttagcgacaaaagcagagactatacacttcctgatctaagcctacttgtggcacaaaaaggtcccgcggtgtcgggttctgcaccaccagcaggttggcagaacccgcaagcgcaaagtcaatactcaggttatggcggaagcccatatatgtacccatcatctgatcccaacggggcttcaccctcaggtcaacctccttactatggatga

SEQ ID NO: 1586 - protein, 370 aa, Arabidopsis thaliana
MSSSGQTQFRYTQTPSKVVHLRNLPWECVEEELIDLCKRFGKIVNTKSNVGANRNQAFVEFADLNQAISMVSYYASSSEPAQIRGKTVYIQYSNRHEIVNNQSPGDVPGNVLLVTFEGVESHEALVQFTDVETASAARSALDGRSIPRYLLSAHVGSCSLRMSYSAHTDLNIKFQSHRSRDYTNPYLPVNQTAMDGSMQPALGADGKKVESQSNVLLGLIENMQYAVTVDVLHTVFSAYGTVQKIAIFEKNGSTQALIQYSDIPTAAMAKEALEGHCIYDGGYCKLRLSYSRHTDLNVKAFSDKSRDYTLPDLSLLVAQKGPAVSGSAPPAGWQNPQAQSQYSGYGGSPYMYPSSDPNGASPSGQPPYYG

SEQ ID NO: 1587 - DNA, 891 bp, Zea mays
  CDS (1)..(891)
atgccgcccgggtcggcgacgcaatttcggtacacgcagacgccgtccaaggtgctgcatcttcggaacatgccatgggagtgcaccgaggaggagctcgtcgacctctgcaaacccttcggccgggtcgtaaacaccatgtgcaacgtcggcgctaaccgcaaccaggcattcgtcgagtttgcagatcaaaaccaggcaatttcaatggtgtcctattatgcttcatcttcagaacctgctcaagttcgtggtaaaactgtatatatccaatattcaaacaggcaagaaattactaacaataaaggcactggggattcttctggcaatgttctacttgtcacttttgaaggtgttcagcctaatgatgttaccatagaagttattcatttggttttttcggcatttgggtttgttcacaagatagctacttttgagaaagcagctggtttccaggcacttatccagtatactgatgccccaactgctcttgaagctaaaaactcattggatggaagaagcatcccaaaatatttacttccagaacatatcggtgcctgccacatgcgcataaccttttctgcgcataaggatttgaatatcaaatttcagtcgcatcgcagcagggattacaccaatccttaccttcctgtgaaccaaacagcaattgaggggattgtgcagcccacggtgggccctgatgggaaggtaaaggagcctgagagcaatgtacttttagcatcaattgagaacatgcaatatgctgtgacagtggatgttctgcacactgtgttttctgcttttggagctgttcaaaaaattgcaatgtttgagaagaatggtggaatgcaggctctaatccaatatccagagaggtgtcggagttcgtga

SEQ ID NO: 1588 - protein, 296 aa, Zea mays
MPPGSATQFRYTQTPSKVLHLRNMPWECTEEELVDLCKPFGRVVNTMCNVGANRNQAFVEFADQNQAISMVSYYASSSEPAQVRGKTVYIQYSNRQEITNNKGTGDSSGNVLLVTFEGVQPNDVTIEVIHLVFSAFGFVHKIATFEKAAGFQALIQYTDAPTALEAKNSLDGRSIPKYLLPEHIGACHMRITFSAHKDLNIKFQSHRSRDYTNPYLPVNQTAIEGIVQPTVGPDGKVKEPESNVLLASIENMQYAVTVDVLHTVFSAFGAVQKIAMFEKNGGMQALIQYPERCRSS

SEQ ID NO: 1589 - DNA, 1464 bp, Zea mays
  CDS (1)..(1464)
atgtcgtcgggaggcggtggggggcagcagttccgctacacgcagacgccgtccaaggtgctgcacctgcggaaccttccgtgggagtgcgcggaagaggagctcgtcgagctctgcaagcctttcggccgcatcgtcaacaccaagagcggcgtcggcgccaaccacaaccaggcctttgtcgagttcactgacgttaatcaggcaatctcgatggtttcttatttcgcatcatcttcagaaccagcacagatacgaggcaagactgtttatattcagtattcaaataggcaagaaataattaacaacaagagtcctggagagactgctggaaatgtcttgcttgttaccatagagggtgttcaatctagtgatgtcaccattgatgtgatccatatggttttctcggcttttgggtatgttcataaaatagccacctttgaaaaggctgcaggttttcaggcattgatccagtacactgatgcggctactgcttcagctgctaaagaatccttagatggaaggagcatcccaagttacttgcttccggagcatgtaacatcctgctgcctgcgaatttctttttccgcacataaggatttgaacatcaagtttcagtcgaaccgcagcagggattataataatccgtatcttccaatcaattattctgccatggatggtacattacagcctgctgttggagctgacggaaggcaagtggaggctcaaggcaatgttcttcttgcatcaattgagaatatgcaatatgctgttactgtagatgttcttcatactgtgttctcatcatttggttcagtccaaaaaattgctatttttgagaagaatggggggacacaagctttgattcagtaccctgatgtatctacagctgctgtagcgaaggaatcattggaagggcattgcatctacgatggtggctactgtaagcttcacctgtcatactctcgtcatactgatctgaatgtgaaggcacatggtgacaagagcagagactatacaattccagctggcgtaatccaaggggtgccacctggtgtacaagctacatcctctgggtggcaaggtaacgttcaagcagctggggcatatgctgccccacccggtgccccttcgcaaagccacggtgccaatggacatgtgcagaactggaatcccggcaactcagtctatcccccagccccaggaccaggaacatatccaggccagatgtactcatctccctcacagtatgcagcgtcagggggcttccctaataccccatccactgctccgccacactatgcagcatcagggggcttccctaacaccccactcccagctcttcctggtgctcctacacaacagttgcacgcttcgcagcagatgctgcctcagcatggaaatcagtcgggaggcgcatccggaactagccaaccggcgccaccagcatcatactaccgttga

SEQ ID NO: 1590 - protein, 487 aa, Zea mays
MSSGGGGGQQFRYTQTPSKVLHLRNLPWECAEEELVELCKPFGRIVNTKSGVGANHNQAFVEFTDVNQAISMVSYFASSSEPAQIRGKTVYIQYSNRQEIINNKSPGETAGNVLLVTIEGVQSSDVTIDVIHMVFSAFGYVHKIATFEKAAGFQALIQYTDAATASAAKESLDGRSIPSYLLPEHVTSCCLRISFSAHKDLNIKFQSNRSRDYNNPYLPINYSAMDGTLQPAVGADGRQVEAQGNVLLASIENMQYAVTVDVLHTVFSSFGSVQKIAIFEKNGGTQALIQYPDVSTAAVAKESLEGHCIYDGGYCKLHLSYSRHTDLNVKAHGDKSRDYTIPAGVIQGVPPGVQATSSGWQGNVQAAGAYAAPPGAPSQSHGANGHVQNWNPGNSVYPPAPGPGTYPGQMYSSPSQYAASGGFPNTPSTAPPHYAASGGFPNTPLPALPGAPTQQLHASQQMLPQHGNQSGGASGTSQPAPPASYYR

SEQ ID NO: 1591 - DNA, 1200 bp, Arabidopsis thaliana
  CDS (1)..(1200)
atgtcgagctcaggccaaactcagttccgttatacacagacgccgtcgaaggtggttcatctgcggaatcttccatgggaatgcgtcgaagaggagctcatcgacctttgcaaacgattcggcaagatcgtcaataccaagagcaatgtcggcgccaatcgcaatcaagctttcgtcgaatttgctgacttgaatcaagctatatcaatggtttcgtattatgcttcatcttcagagcccgcacagattcgtgggaaaactgtctatattcagtactctaatcgccatgagattgttaacaatcagagtcctggagatgtccctggaaatgtcctcttggttacctttgaaggagtggaatctcacgaagtcagcatcgatgttatccatctggtattttctgcttttggatttgtgcataaaattgccacatttgagaaagctgctggtttccaggcactagttcaatttactgatgtggagactgcatccgcggcaaggagtgcgttggatggcagaagtatacccaggtatctgctttccgcacatgttggttcgtgcagtttgcgaatgtcttattcagctcatactgatctcaacatcaagtttcagtcccaccggagcagagattacacaaatccataccttccagtgaatcagaccgcaatggatgggtctatgcagcctgctttaggtgctgacggcaagaaagttgaatctcagagcaacgtccttctcggtttgattgagaatatgcagtatgctgtcactgtggatgttcttcacacggtgttttctgcatatggaactgtccagaagattgctatatttgagaagaatggttcaacgcaagcattaattcaatactctgatataccaacagcagcaatggccaaagaagcactggaaggacactgcatttatgacggtggctactgtaagcttcgactatcatactctcgtcatactgatctgaatgttaaggcttttagcgacaaaagcagagactatacacttcctgatctaagcctacttgtggcacaaaaaggtcccgcggtgtcgggttctgcaccaccagcaggttggcagaacccgcaagcgcaaagtcaatactcaggttatggcggaagcccatatatgtacccatcatctgatcccaacggggcttcaccctcaggtcaacctccttactatggatga

SEQ ID NO: 1592 - protein, 399 aa, Arabidopsis thaliana
MSSSGQTQFRYTQTPSKVVHLRNLPWECVEEELIDLCKRFGKIVNTKSNVGANRNQAFVEFADLNQAISMVSYYASSSEPAQIRGKTVYIQYSNRHEIVNNQSPGDVPGNVLLVTFEGVESHEVSIDVIHLVFSAFGFVHKIATFEKAAGFQALVQFTDVETASAARSALDGRSIPRYLLSAHVGSCSLRMSYSAHTDLNIKFQSHRSRDYTNPYLPVNQTAMDGSMQPALGADGKKVESQSNVLLGLIENMQYAVTVDVLHTVFSAYGTVQKIAIFEKNGSTQALIQYSDIPTAAMAKEALEGHCIYDGGYCKLRLSYSRHTDLNVKAFSDKSRDYTLPDLSLLVAQKGPAVSGSAPPAGWQNPQAQSQYSGYGGSPYMYPSSDPNGASPSGQPPYYG

SEQ ID NO: 1593 - DNA, 1290 bp, Arabidopsis thaliana
  CDS (1)..(1290)
atgtcttctgtttcaagccagccacagtttcgttacacgcaacctccttcaaaggttcttcatttgagaaacttgccatgggaatgcactgaagaggagttaattgaactcggaaagccttttggtactgttgttaatacaaaatgcaatgttggagctaatcgaaatcaagctttcattgagtttgaagatttgaatcaagctatacaaatgatatcttactatgcttcttcttcggagcctgctcaagttcgtggtaaaactgtctacctccagtactccaacaggcaagagatagtgaacaacaaaacgacagcggatgttgtggggaatgttcttctggtgactatcgaaggcgatgatgctcgtatggtcagcattgatgtcttgcatctggtattctcagcatttgggtttgtccacaagattactactttcgagaagacagccggataccaagcactggttcaatttactgatgcagaaactgcaaccgctgcaaaacttgccctcgatggaagaagcatccctaggtatctactcgctgagaccgtgggacaatgctcacttaaaatcacatattcagctcatacagatctgactgtcaaatttcagagtcatcggagcagggactatactaatccttaccttcccgttgctccatcagccattgatagtactggtcaggtggctgtgggtgtagacgggaagaagatggaacctgaaagtaatgttcttctcgcatctattgaaaacatgcagtatgcagtaaccttggatgttttacacatggtttttgcggcttttggggaagttcaaaagattgcaatgtttgacaagaatggtggggtacaggcactgatccaatactcagatgttcaaacggctgtggtggcgaaggaagcattggaaggacattgtatctacgatggtggtttttgtaagctccacattacttattcacgccacaccgacctcagcataaaggtgaacaacgatagaagcagagactacacaatgcccaacccaccggttccaatgcctcaacaacccgttcagaatccatacgccggcaatccacagcaataccacgcagcaggtgggagccaccaccagcagcagcagcagccacaaggtggatgggtccaaccaggagggcaaggctctatgggaatgggtggtggtggtcacaatcattacatggcaccaccatcttcaagctcaatgcatcaaggtccgggtggtcatatgcctccacagcattatggtggtcctggtccaatgcattag

SEQ ID NO: 1594 - protein, 429 aa, Arabidopsis thaliana
MSSVSSQPQFRYTQPPSKVLHLRNLPWECTEEELIELGKPFGTVVNTKCNVGANRNQAFIEFEDLNQAIQMISYYASSSEPAQVRGKTVYLQYSNRQEIVNNKTTADVVGNVLLVTIEGDDARMVSIDVLHLVFSAFGFVHKITTFEKTAGYQALVQFTDAETATAAKLALDGRSIPRYLLAETVGQCSLKITYSAHTDLTVKFQSHRSRDYTNPYLPVAPSAIDSTGQVAVGVDGKKMEPESNVLLASIENMQYAVTLDVLHMVFAAFGEVQKIAMFDKNGGVQALIQYSDVQTAVVAKEALEGHCIYDGGFCKLHITYSRHTDLSIKVNNDRSRDYTMPNPPVPMPQQPVQNPYAGNPQQYHAAGGSHHQQQQQPQGGWVQPGGQGSMGMGGGGHNHYMAPPSSSSMHQGPGGHMPPQHYGGPGPMH

SEQ ID NO: 1595 - DNA, 1467 bp, Physcomitrella patens subsp. patens
  CDS (1)..(1467)
atgacgtccaccgccggtcaaccccagttccgctacacgcagcctccgtccaaggtgctgcacgtgcgcaacttgccgtgggagtgcagcgaggaggagctcatcgagctgtgcaagcccttcggcaaggtggtcaacaccaaggtcaatgtcggggccaaccacaaccaggcgttcgtggagttcgccgacttaaatcaagctattgcaatggtgtcatattatgcatcatcatcagagccggctcaggtgcgaggaaagacggtgtacttgcagtactctaacaggcaagaaattgtcaccagtaaaaactctggggatgttgcgagcaatgtcctactcgtaaccattgagggcgtagaggctggcgatgtcagcattgacgtcttacaccttgtgttttctgcctttggctttgttcataagattgcgacttttgagaaaagcgctggcttccaggcactagtacaattcagtgatgctaatactgcttctgctgccaaatcggcccttgaaggacggagcatacccagatatttgctgcctgaccacgttggtccctgccacttacgaatatcattctctgcacacaacgacctcaatgtgaagtttcaaagtcatcgaagccgggattacaccaatccgtatcttccggtggccccatcagcaattgatggaagtggtcagtttagcgttggacctgatggaaagaggagggagcctgagagcaatgtgctgcttgtttcaattgaaaacatgcagtacgccgtaacgattgacgtaatacacactgttttctctgcttttggattcgttcagaaaatcgcaattttcgagaaaagtgctggttttcaagctttagttcaatatccagatattcctactgcagttggagcaaaggaggcacttgaaggtcactgcatttacgatggaggcttctgcaagcttcacctatcttactctcggcatactgatttaaatgtaaaggcactctccctcttgtatgtcaataacgacagaagcagagattacactaaccctggccttcctgcaactcaacctcctgttttgagccaagcaccaggggttgctcaacagcagtcatgggatactgaagggagtggtaaagcacaacaggtttctggtccaatgccaggacaacccatgtctggtcctatgtacatgagtcatcaacatggtggagctgtgggacaccatggtcctcctggtgcatcaggctcctatcagggtccccctggtccagttacttcaatgggcccaatgtcggggccagggccatcaatggcaccacctgggtacatgggacctggaatgcatcaacaaggtcaacagagccatcacttgggacctcctggtcattctatgccaccttaccaacaaatgcacgggccaggccatcaaggcatgccccctgcaaacggaggccctggtggatattacatgtga

SEQ ID NO: 1596 - protein, 488 aa, Physcomitrella patens subsp. patens
MTSTAGQPQFRYTQPPSKVLHVRNLPWECSEEELIELCKPFGKVVNTKVNVGANHNQAFVEFADLNQAIAMVSYYASSSEPAQVRGKTVYLQYSNRQEIVTSKNSGDVASNVLLVTIEGVEAGDVSIDVLHLVFSAFGFVHKIATFEKSAGFQALVQFSDANTASAAKSALEGRSIPRYLLPDHVGPCHLRISFSAHNDLNVKFQSHRSRDYTNPYLPVAPSAIDGSGQFSVGPDGKRREPESNVLLVSIENMQYAVTIDVIHTVFSAFGFVQKIAIFEKSAGFQALVQYPDIPTAVGAKEALEGHCIYDGGFCKLHLSYSRHTDLNVKALSLLYVNNDRSRDYTNPGLPATQPPVLSQAPGVAQQQSWDTEGSGKAQQVSGPMPGQPMSGPMYMSHQHGGAVGHHGPPGASGSYQGPPGPVTSMGPMSGPGPSMAPPGYMGPGMHQQGQQSHHLGPPGHSMPPYQQMHGPGHQGMPPANGGPGGYYM

SEQ ID NO: 1597 - DNA, 1350 bp, Vitis vinifera
  CDS (1)..(1350)
atgtccacctcggggcagccgcagttccgatacactcagaccccgtcgaaggtcctccaccttcgcaatcttccatgggagtgcaccgaggaggagcttgtggagctctgtaaacccttcggcaagatcgtcaacaccaagtgcaatgtcggcgccaatcgcaaccaggccttcgtggaattcttggaccttaatcaggccatttctatggtttcatattatgcttcatcttcggaacctgcacaggttcgtggtaagactgtgtatatccaatactctaacagacatgaaattgtcaataacaagagtccgggagatgttcctggaaatgtcttgctggtaacaatcgagggtgtagaagctggcgatgtgagcatagatgttattcacttggtgttctctgcttttggatttgtgcacaaaattgctacatttgaaaaggctgcaggtttccaggccttaatccaattcaccgacgctgagactgcttcttcagcaaggaatgcattggatggaagaagtattcccaggtatttactgccagaacatgttggttcatgtcacttgcgtatctcatattctgcacacacagatctgaatatcaagttccagtctcatcgaagcagggactacacaaatccataccttcctgtgaatcctactgcaattgagggaatagcacagcctgctttaggtcctgatggcaagaaaaaagaacctgagagtaatgttcttcttgcttcaattgagaatatgcaatatgctgttacagtagatgttcttcacacggtattctctgcatttggtactgtccagaaaattgccatatttgagaagaatggtgggatgcaggctctaattcaatatcctgatgtcacaactgcagcagttgccaaagaagctctagagggacactgcatatatgatggtggctattgtaagcttcatctatcatactctcgtcatactgatctcaatgtaaaggcacatagtgatagaagtagagattatacaatcccagattcaggtctgcttgcagtgcaacaagcacctggtcacccaggtgctacaactgtatggcagaatcctcaggctgctccattgtatactgggcatgatgccgctgctgcagctgctgtgcaagtgccatcatgggacccaaacatgcaggcaggtagatcaacctttgcttcggctgctagcgcatttcccagtcaaccatttgcatcatcttctatttctgcttatccggctccccctggttcatcacccttgacaccagctgttccgccaaatgtgcgacctggtggtgcttcacctccaggccgtcctccttactttggtcagtaa

SEQ ID NO: 1598 - protein, 449 aa, Vitis vinifera
MSTSGQPQFRYTQTPSKVLHLRNLPWECTEEELVELCKPFGKIVNTKCNVGANRNQAFVEFLDLNQAISMVSYYASSSEPAQVRGKTVYIQYSNRHEIVNNKSPGDVPGNVLLVTIEGVEAGDVSIDVIHLVFSAFGFVHKIATFEKAAGFQALIQFTDAETASSARNALDGRSIPRYLLPEHVGSCHLRISYSAHTDLNIKFQSHRSRDYTNPYLPVNPTAIEGIAQPALGPDGKKKEPESNVLLASIENMQYAVTVDVLHTVFSAFGTVQKIAIFEKNGGMQALIQYPDVTTAAVAKEALEGHCIYDGGYCKLHLSYSRHTDLNVKAHSDRSRDYTIPDSGLLAVQQAPGHPGATTVWQNPQAAPLYTGHDAAAAAAVQVPSWDPNMQAGRSTFASAASAFPSQPFASSSISAYPAPPGSSPLTPAVPPNVRPGGASPPGRPPYFGQ

SEQ ID NO: 1599 - DNA, 1263 bp, Vitis vinifera
  CDS (1)..(1263)
atgtccacctcggggcagccgcagttccgatacactcagaccccgtcgaaggtcctccaccttcgcaatcttccatgggagtgcaccgaggaggagcttgtggagctctgtaaacccttcggcaagatcgtcaacaccaagtgcaatgtcggcgccaatcgcaaccaggccttcgtggaattcttggaccttaatcaggccatttctatggtttcatattatgcttcatcttcggaacctgcacaggttcgtggtaagactgtgtatatccaatactctaacagacatgaaattgtcaataacaagagtccgggagatgttcctggaaatgtcttgctggtaacaatcgagggtgtagaagctggcgatgccttaatccaattcaccgacgctgagactgcttcttcagcaaggaatgcattggatggaagaagtattcccaggtatttactgccagaacatgttggttcatgtcacttgcgtatctcatattctgcacacacagatctgaatatcaagttccagtctcatcgaagcagggactacacaaatccataccttcctgtgaatcctactgcaattgagggaatagcacagcctgctttaggtcctgatggcaagaaaaaagaacctgagagtaatgttcttcttgcttcaattgagaatatgcaatatgctgttacagtagatgttcttcacacggtattctctgcatttggtactgtccagaaaattgccatatttgagaagaatggtgggatgcaggctctaattcaatatcctgatgtcacaactgcagcagttgccaaagaagctctagagggacactgcatatatgatggtggctattgtaagcttcatctatcatactctcgtcatactgatctcaatgtaaaggcacatagtgatagaagtagagattatacaatcccagattcaggtctgcttgcagtgcaacaagcacctggtcacccaggtgctacaactgtatggcagaatcctcaggctgctccattgtatactgggcatgatgccgctgctgcagctgctgtgcaagtgccatcatgggacccaaacatgcaggcaggtagatcaacctttgcttcggctgctagcgcatttcccagtcaaccatttgcatcatcttctatttctgcttatccggctccccctggttcatcacccttgacaccagctgttccgccaaatgtgcgacctggtggtgcttcacctccaggccgtcctccttactttggtcagtaa

SEQ ID NO: 1600 - protein, 420 aa, Vitis vinifera
MSTSGQPQFRYTQTPSKVLHLRNLPWECTEEELVELCKPFGKIVNTKCNVGANRNQAFVEFLDLNQAISMVSYYASSSEPAQVRGKTVYIQYSNRHEIVNNKSPGDVPGNVLLVTIEGVEAGDALIQFTDAETASSARNALDGRSIPRYLLPEHVGSCHLRISYSAHTDLNIKFQSHRSRDYTNPYLPVNPTAIEGIAQPALGPDGKKKEPESNVLLASIENMQYAVTVDVLHTVFSAFGTVQKIAIFEKNGGMQALIQYPDVTTAAVAKEALEGHCIYDGGYCKLHLSYSRHTDLNVKAHSDRSRDYTIPDSGLLAVQQAPGHPGATTVWQNPQAAPLYTGHDAAAAAAVQVPSWDPNMQAGRSTFASAASAFPSQPFASSSISAYPAPPGSSPLTPAVPPNVRPGGASPPGRPPYFGQ

SEQ ID NO: 1601 - DNA, 1344 bp, Populus trichocarpa
  CDS (1)..(1344)
atgtcatctgtatcgagtcagtcgcaattccgtcttacccaaccgccatctaaggtgttgcatttgagaaacttgccatgggagtgcactgaagaggaattggttgagcttgggaagccgtttggtaatgttgttaataccaagtgtaatgttggaccgaatagaaatcaagctttcattgaatttgcggatctgaatcaagctattgcgatgatatcgtattatgcatcatcctcggagcctgctcaagttcgagggaagacagtttacttgcagtattctaataggcaagaaatagtgaacaacaaaacgacagctgatgctggtggaaatgtgttgttgattaccattgaaggggcagatgcacgcctggtcagcattgatgtcttgcacctggtattttctgcctttgggtttgttcataagattactacctttgagaagatggatagattccaggctttggtgcaattctccgatgtggaaactgcctcttctgcgaaaaatgccctggatggaagaaacatccctagttatctgcttcctgaacatcttgggccctgtactcttaggatcgcatattctggtcatacagatttgagtgtaaaatttcagagccatcggagcagggactacactaatccaaaccttcctgttgcacaatcagctatagatgcaaatggaatgttcagcatgggccttgatgggaaaaaactagaacctgagagcaatgttcttcttgcatcaatcgagaacatgcagtatgctgtcacattggatgttttacacatggtcttttcttcttttggtcctgtccagaagattgccatgtttgataaaaacagtggacttcaggctttaattcaataccctgatgtccagacagctgttgttgccaaggaagcattggaaggacactgcatctatgatggaggattttgcaagcttcacctttcatactcacgccataatgatcttagtattaaggtcaataatgataggagcagagactacacgattcccaacaatgtaatggtgaacccccagccttcaattctagggcagcagccagttgcaacacatggtcctccttctcatctatacactggagctcagtttgctccaactacagagcattcaatgattcctcagccttcttctggatgggccactggctttccaccagtacccaattccatgcctggccagatgaataataatccttacttgccacctggaactatgccacctcaaatgggccatggaatgatgcagatgcctagccatggtggcccaccacatactcatgcaatgcccccttacagaccttatcatatgcaatag

SEQ ID NO: 1602 - protein, 447 aa, Populus trichocarpa
MSSVSSQSQFRLTQPPSKVLHLRNLPWECTEEELVELGKPFGNVVNTKCNVGPNRNQAFIEFADLNQAIAMISYYASSSEPAQVRGKTVYLQYSNRQEIVNNKTTADAGGNVLLITIEGADARLVSIDVLHLVFSAFGFVHKITTFEKMDRFQALVQFSDVETASSAKNALDGRNIPSYLLPEHLGPCTLRIAYSGHTDLSVKFQSHRSRDYTNPNLPVAQSAIDANGMFSMGLDGKKLEPESNVLLASIENMQYAVTLDVLHMVFSSFGPVQKIAMFDKNSGLQALIQYPDVQTAVVAKEALEGHCIYDGGFCKLHLSYSRHNDLSIKVNNDRSRDYTIPNNVMVNPQPSILGQQPVATHGPPSHLYTGAQFAPTTEHSMIPQPSSGWATGFPPVPNSMPGQMNNNPYLPPGTMPPQMGHGMMQMPSHGGPPHTHAMPPYRPYHMQ

SEQ ID NO: 1603 - DNA, 1431 bp, Populus trichocarpa
  CDS (1)..(1431)
atgtcaacgtccggacagccacaattccgatacacacaaacaccatcaaaggttttgcatctgcgaaaccttccatgggagtgcacagaagaagagcttatcgagctctgtgaacctttcggaaagatcgtcaacactaagtgcaatgtcggcaacaatcgcaaccaagccttcgttgaattcgcagaacaaaaccaggcaatacaaatggtatcgtattatgcgtcgtcgtcggagccagcgcaggttcggggtaaaacggtgtatattcaatattcgaatagacatgaaattgtgaacaataagagtccaggtgataatcctggaaatgtattgctggttaccattgagggtgttgaagctggtgatgtcagcatcgatgtcattcacttggtgttttctgcttttggctatgtgcacaaaattgctacttttgaaaaggctgctggtttccaggcattaattcaattcactgatgctgaaactgcatcttcagcgagaaatgccttggatgggagaaatattatgtttaaaaaattcaggtacctgcttccagagcatgttggttcctgcaacttacgcatttcatattctgcacatactgatctcaatatcaagttccagtcccataggagcagagactatacaaatccgtatcttcctgtgaatcctactgcaattgacggacctgttcagtctactgtaggtgctgatgggaaaaagaaagagcctgagagcaatgtacttcttgcatccattgagaacatgcagtatgctgtcaccgtggatgttcttcacacggtattttctggatttggtactgtccagaagattgctatatttgagaaaaatggtggaacacaggcactaattcagtacccagatgttgcgactgcagcagtagccaaagaaactctggagggacactgcatttatgatggtggctattgtaagcttcatctatcatactctcgtcatactgatctcaatgtaaaggcctttagtgataaaagtagagattacaccatcccggatgcaagttttctcacagcacaagctcctggcctccacactgctcccacaacttggcagaatcctcaagctggttcaatgtaccttgggagtaactatgccaccacagctgctgctcctgctcaagttcctcctgggcaagtggcagcttgggatccgagtatgcaggcgggtggaccaggctattcatcagttcgcggtatgtatcctggtcaaacatatccaacacccccagcatatgcttcctcagcactacctccaggttcctctccccattcatatagcagcccgatttctcctggtgtggcctccatgggaatgactcacccaggggtgcagccaaacatgcgacctggtggggcttcacctcctggtcagactccatattatggtcgatga

SEQ ID NO: 1604 - protein, 476 aa, Populus trichocarpa
MSTSGQPQFRYTQTPSKVLHLRNLPWECTEEELIELCEPFGKIVNTKCNVGNNRNQAFVEFAEQNQAIQMVSYYASSSEPAQVRGKTVYIQYSNRHEIVNNKSPGDNPGNVLLVTIEGVEAGDVSIDVIHLVFSAFGYVHKIATFEKAAGFQALIQFTDAETASSARNALDGRNIMFKKFRYLLPEHVGSCNLRISYSAHTDLNIKFQSHRSRDYTNPYLPVNPTAIDGPVQSTVGADGKKKEPESNVLLASIENMQYAVTVDVLHTVFSGFGTVQKIAIFEKNGGTQALIQYPDVATAAVAKETLEGHCIYDGGYCKLHLSYSRHTDLNVKAFSDKSRDYTIPDASFLTAQAPGLHTAPTTWQNPQAGSMYLGSNYATTAAAPAQVPPGQVAAWDPSMQAGGPGYSSVRGMYPGQTYPTPPAYASSALPPGSSPHSYSSPISPGVASMGMTHPGVQPNMRPGGASPPGQTPYYGR

SEQ ID NO: 1605 - DNA, 2268 bp, Vitis vinifera
  CDS (928)..(2268)
  misc_feature (153)..(153): r is g or a
  misc_feature (675)..(675): y is t or c
  misc_feature (720)..(720): y is t or c
  misc_feature (826)..(826): r is g or a
  misc_feature (1515)..(1515): r is g or a
  misc_feature (1569)..(1569): y is t or c
  misc_feature (2076)..(2076): w is a or t
atggtgaagctcgcatccgccagagagagccgcctctatggcactcgcctcgctcggaaccgcttcgagtacataaacgccggcctctacgtcttcgccaccatcgttctcctcagcggattcgtctcccagctctccagagaccccaaatcrgggcttgcgctgatgatgatagggttagggctcttgtttgtggtgaatgttcatgatctggtggcgcacatggccgggatcgattacagattagggttgatggagtttgatcttcagcttgggcttgtggagttctcggttccgtttgttcaggccatggggtatctcctctccttcttgggcattctcttcctcttccttcaggaagagaaaggctatggttacttcaaattggagaggcatgctttgaacatgcttattgctggccctgttctatgggtgcttggctcgatccataactcgtgccaaatctacgagagagctgatggacacatccaaatattgcagcagagcgtccacatcccattcttaatgggaagcttgttgttcatggtgggttcaattataaactgccatgagcaagcgcgattggttcatcatggtatagacttattgggtatggcttgggtgtggttaggcatgtttgggtcgctactgttcttcattgggggcctaatgaaygtggtgaaagtgttcaaaatgcagcaaatggatggattaaggctygaaaaactccgaggaggggcacaagagagactgattcatgaaagggaaggccaaatccctctcatcctagaagatcagaggaggagaaaaatacatgtggaggaarcaatgccagttgtggttccaactccttacagggatgtccttgggtccaaaggacttcatatctctgcagtgtccttcaaccaattggggttattgtacggaatggcatctgtatcaagtcaaccacaattccgttacactcaaccaccatccaaggtgctccatttaaggaacttgccatgggagtgcacagaggaggaattgattgagctgggaaagccatttggtaaagttgtcaacacaaaatgcaatgttggggcaaacaggaatcaagcttttattgaatttgcagatttgaatcaagctattgcaatgatatcatattatgcttcatcttcagagccggctcaagtacgggggaaaaccgtctacttacaatattccaaccggcaagaaatagtaaacaacaaaacatctgctgatgttgctggaaatgtactgctggtgacaatcgagggtgctgatgcacgccttgtgagcattgacgttttacacttggtgttttccgcttttggatttgtgcataagatcactacctttgagaagacagccggattccaggctttggtgcaattttcagattcagaaactgcctctgctgcaaaaaatgccttggatggaaggagcatcccgaggtacctacttccagagcatttgggaccatgcactcttaggattacattttctgcrcacacagatttgagtgtgaaattccaaagccaccgcagcagggactacactaayccttatcttcctgttgcttcatcagccatagatggaagtggtcaatttagcatgggttttgatggaagaaaagtagaacctgaaagtaatgttcttcttgcatctattgagaacatgcagtatgccgtcaccttggatgtcttacacatggttttttctgcttttgggcctatccaaaagattgcaatgtttgataagaatggaggagttcaggctttgattcaataccctgatgttcagacagcaattgttgctaaggaagccttggaaggacactgcatttatgatggagggttttgcaagctccacatctcatattcacgccatacagatctcagtataaaggtcaacaatgataggagcagagattacactagccccgtgttgagctcccaaccttctgttctgggccaacaaccagttccaattccaggtccctccactcatcagtttgaaggagcccagtatgcctcaccttcggatcagccggtgatacatcagccttcwgcaggatgggccacatctgctgcagcagcaggagcaccaccaccaccacctcagtccatgccaatgcagcagcacaaccacccctacatgccacctgggaccatgcctcctcaaccagtccctggaatgatgccaatgcagacccagactggcctacctcagtcagcagcaatgcccccatacagccattga

SEQ ID NO: 1606 - protein, 446 aa, Vitis vinifera
MASVSSQPQFRYTQPPSKVLHLRNLPWECTEEELIELGKPFGKVVNTKCNVGANRNQAFIEFADLNQAIAMISYYASSSEPAQVRGKTVYLQYSNRQEIVNNKTSADVAGNVLLVTIEGADARLVSIDVLHLVFSAFGFVHKITTFEKTAGFQALVQFSDSETASAAKNALDGRSIPRYLLPEHLGPCTLRITFSAHTDLSVKFQSHRSRDYTNPYLPVASSAIDGSGQFSMGFDGRKVEPESNVLLASIENMQYAVTLDVLHMVFSAFGPIQKIAMFDKNGGVQALIQYPDVQTAIVAKEALEGHCIYDGGFCKLHISYSRHTDLSIKVNNDRSRDYTSPVLSSQPSVLGQQPVPIPGPSTHQFEGAQYASPSDQPVIHQPSAGWATSAAAAGAPPPPPQSMPMQQHNHPYMPPGTMPPQPVPGMMPMQTQTGLPQSAAMPPYSH

SEQ ID NO: 1607 - DNA, 1716 bp, Picea sitchensis
  CDS (167)..(1642)
ggggttcaccacgcagaagtcttctgacagaaaaggccccgtacaaggggaagaacaagaacagcaataagggttttattcgcttcttcccatggcggtctagggttcgaatccctcctcgtttcagttgcgaagcctttcttcacaagcctttttacacataacaatggcttcctcagccggtcagccccagtttcgatacacgcagcccccttcgaaggttctgcatctcagaaatcttccctgggaatgtaccgaggaggagcttattgaactctgcaagccattcgggagaattgtaaatactaagtgtaatgtgggagccaaccataatcaggcttttgttgaatttgcagatttgaatcaagccattgcaatggtttcatattatgcttcatcatcagaacctgctcaggtacgaggcaaaagtgtttacctccaatactcaaacaggcaagaaattgtaaacaataaaagcactggagatgttgccagcaatgtattgttggtgacaattgagggtgtcgattctggggatgtcagcattgatgttttgcatttggtattttcagcttttgggttcgtgcataagattgctacttttgagaagactgcaggttttcaggcactggtgcagtttagtgatgcagacactgctgcttctgcaagaagtgccctggatggacgaagcataccaagatatttgcttccagaacatgtagcgtcatgccacctgcgtatatcattttctgcacacactgacttaaatgtcaaatttcagagtcatcggagcagagactacacaaatccaaaccttcctgtcaatccctctgctatagatggagctgggcagtttactgtaggacctgatgggaaaagaagggagctagagagtaacgttcttcttgcatccattgaaaacatgcaatatgcagtgacagttgatgttttaaatacggtattttcagcttttggtagagttcagaaaattgcaatatttgagaaaaatggaggatttcaggcattaatacaatatccagatattgccaccgctgtgctagctaaagaagcattagaagggcattgcatatatgatggaggctattgtaaacttcatctatcttattctcgtcatactgacctcaatgttaagggtaataatgaccgaagtagagactacacaattccagcatccgggatgcttccagctcagcccccttctcttgcgggagctgctccagctgcagttggtggatggcaaggtcccccatctaccccaataatgtactctggaaatgaatttatgagcagtccttgtccgccacagccaggaggcgttcccaggcctcaacatttgcaaggatgggagtatggtcaatcacagatagcttcccaaacaccaggacctaatgctttctcatctccggcttacgcagggcaaggtcctcttatcactcctccgatgccgtctcctccaggacttgtagcaagcaatataggaaccaataacttgcaatcttctaatcatagtcctcatattggccagcctcaaatgccttactatggccatcaacagatgcaaatgcaaatgcctggagggcttcctccagtaagtggcggtacacctgcctatcacatgtaattgttataattgtgaaatttctatattaatttgtgagcaactatattgcatctttcccaaaaaaaaaaaaaaaa

SEQ ID NO: 1608 - protein, 491 aa, Picea sitchensis
MASSAGQPQFRYTQPPSKVLHLRNLPWECTEEELIELCKPFGRIVNTKCNVGANHNQAFVEFADLNQAIAMVSYYASSSEPAQVRGKSVYLQYSNRQEIVNNKSTGDVASNVLLVTIEGVDSGDVSIDVLHLVFSAFGFVHKIATFEKTAGFQALVQFSDADTAASARSALDGRSIPRYLLPEHVASCHLRISFSAHTDLNVKFQSHRSRDYTNPNLPVNPSAIDGAGQFTVGPDGKRRELESNVLLASIENMQYAVTVDVLNTVFSAFGRVQKIAIFEKNGGFQALIQYPDIATAVLAKEALEGHCIYDGGYCKLHLSYSRHTDLNVKGNNDRSRDYTIPASGMLPAQPPSLAGAAPAAVGGWQGPPSTPIMYSGNEFMSSPCPPQPGGVPRPQHLQGWEYGQSQIASQTPGPNAFSSPAYAGQGPLITPPMPSPPGLVASNIGTNNLQSSNHSPHIGQPQMPYYGHQQMQMQMPGGLPPVSGGTPAYHM

SEQ ID NO: 1609 - DNA, 1863 bp, Populus trichocarpa
  CDS (198)..(1526)
gatctcaatatcttaataccgactcgtcggccagacaaagtaaaatcatccataaaaggtattcctctcgattcgaccattctctctgcgtaaccctattttcaaaagaaatcgcaatcggtaaattgcgtcctgtcaattctctcagggtttgagggagtagagattattgaggtgtagtgtaggctgggagaataatgtcctctgtctcgagtcagccgcagttccgtcttacccaaccaccgtctaaggtgttgcatttgagaaatttgccatgggagtgtactgaagaggaattagttgagctggggaagccatttggtaaagttgttaacaccaagtgtaatgttgggccgaacagaaatcaagcttttattgaattttcggatttgaatcaagctattgcaatgatatcatattatgcatcatcctcggagcctgctcaagtgcgagggaagacagtttacttacagtattctaacaggcaagaaatagtgaacaacaaaacaacagctgatgttggtggaaatgtattgctggttaccattgaaggggcagatgcacgccttgtcagcattgatgttttgcacctggtattttctgcttttgggtttgttcataagattactacctttgagaagacagccgggttccaggcgttggtgcaattctccgatgctgaaactgcctcttctgcaaaaaatgccctggatggaagaaacatccctagttatctgcttcctgaacatcttgggccatgtactcttaggatcacatattctgcgcatacagatttgagtgtaaaattccagagccatcgaagcagggactacaccaatgcaaaccttcctgttgcaccatcagctatagatgcaaatggaatgtttagcgtgggccttgatgggaaaaaactagaacctgagagcaatgttcttcttgcttctattgagaacatgcagtatgctgtcactttggatgttttacacatggtcttttcttcttttggtcctgttcagaagattgccatgtttgataagaatggtggacttcaggctttaattcaataccctgatgttcagacagctgttgttgccaaagaagcgttggaaggacactgcatctatgatggagggttttgcaaacttcacctctcatactcgcgccatagtgatctcagtataaaggtcaataatgataggagcagagactacacaattcccaacactgtaatgatgaacccgcagccttcaattctggggcagcagccagttgcaacacatggtcctcctgcacatacataccctggagctcagcatcatcagatgatgcctcagccttctgctggatgggccacaggtggtccaccggtaccccattctatgcctgcccaaatgaataataatccttacttgccacctggaaccatgccacctcaaatgggtcacggaatgatgcagatgcccaaccacggtggcctgccacatgctcctgcaatgcctccttacagacctggtcatatgcaatagcacgccctccattcagttctattaatctgttttcacattcaagaatcagcagaagtggagcaagctatttgaaggagaatgctatcgttgaaaattaattgctggagatctcacggtttcaaagctgaagtgtctttaatatttcttctctttcagcgattttgtaggtgagattttgtaaacagcaagctcaggcaccttttgtttgggtctaggattgttgtgaactctggttgtccttgacggtgttgtgaaatatttcgactcccaccatttgtttattacctggataaaaagttaatggacgtaagttattattacaaaaaaaaaaaaaaaa

SEQ ID NO: 1610 - protein, 442 aa, Populus trichocarpa
MSSVSSQPQFRLTQPPSKVLHLRNLPWECTEEELVELGKPFGKVVNTKCNVGPNRNQAFIEFSDLNQAIAMISYYASSSEPAQVRGKTVYLQYSNRQEIVNNKTTADVGGNVLLVTIEGADARLVSIDVLHLVFSAFGFVHKITTFEKTAGFQALVQFSDAETASSAKNALDGRNIPSYLLPEHLGPCTLRITYSAHTDLSVKFQSHRSRDYTNANLPVAPSAIDANGMFSVGLDGKKLEPESNVLLASIENMQYAVTLDVLHMVFSSFGPVQKIAMFDKNGGLQALIQYPDVQTAVVAKEALEGHCIYDGGFCKLHLSYSRHSDLSIKVNNDRSRDYTIPNTVMMNPQPSILGQQPVATHGPPAHTYPGAQHHQMMPQPSAGWATGGPPVPHSMPAQMNNNPYLPPGTMPPQMGHGMMQMPNHGGLPHAPAMPPYRPGHMQ

SEQ ID NO: 1611 - DNA, 1725 bp, Populus trichocarpa
  CDS (123)..(1544)
gttctgtcatacgacacaccatcccaaaacccagaaaataattatccgggaaaatctttccatcactttctagacatccagacaaaaaagaaaaaatctcgaatagatagatagatagatagatgtcaacgtcgggacagccacaattccggtacacacaaacaccatcaaaggttttgcatctacgaaaccttccatgggagtgcacagaagaagagctaatcgagctctgtaaaccttttggaaggatcgtaaatactaagtgcaatgtgggcgccaatcggaaccaagcctttgtcgaattcgtagaccaaaatcaggcaatacaaatggtatcgtattatgcgtcgtcgtcggacccagcgcaggttcggggtaaaacggtgtatattcaatattcgaacaggcatgaaattgtgaacaataagagtccaggtgataatcctggaaatgtattgttggttaccatcgagggtgttgaagctggtgatgtcagcatcgatgtcattcacttggtgttttctgcttttggctatttgcacaaaattgctacttttgaaaaggctgctggtttccaggcattaattcaattcactgattctgaaactgcatcttcagcaagaaatgccttggatgggagaagcatacccaggtacttgcttccagagcatgttggttcctgccacttacgcatttcgtattctgcgcataccgatctcaatatcaagttccagtcccataggagcagagactatacaaatccatatctccctgtgaatcctactgcaatcgagggacctgttcagcctactgttggcgctgatggaaagaagaaagaacctgagagcaatgtgcttcttgcatcaattgagaatatgcagtatgccgtcaccatcgatgttcttcacactgtattctctgcatttggtactgtccagaagattgctatattcgagaaaaatggtggaacacaggcgctaattcagtacccagatgttgcgactgcagcagtagccaaagaaactctggagggacactgcatttatgatggtggctattgtaagcttcatctatcatactctcgtcatactgatctcaatgtaaaggcctatagtgataaaagtagagattacaccatcccagatgcaagtttgattgcagcacaagctcctggccttcacactgctcctacaatgtggcagaatcctcaggctggctcaatgtacactgggaataactatgctaccactgctgctgttccagttcaagttcctcctgggcaagtgccagcttgggatccaaccatgcaggcaggtggacaaggctatgcatcagttcctggcacttatcctggtcaaacatatccaacacctccagcgtctgcttatgctactgctgcaatacctgcaggctcctctccccggtcacatagcagcccaatttctcatagtgtggcttctatggcaatgagccacccagggatgcagtcaaacttgcgacctagtggtgcttcacctccgggtcagcctccatattatggttgatgatgatgtattctccttgtttaaatattttttgtttttgcctttccagcattcgattctggtaatgatgataatctttgatatgctgtgggttcacctatcttgtgaggctttcatgtttggttcaaaagaaaaaaaatgtttttttttttttttacttcaaaaaaaaaaaaaaaaaaaa

SEQ ID NO: 1612 - protein, 473 aa, Populus trichocarpa
MSTSGQPQFRYTQTPSKVLHLRNLPWECTEEELIELCKPFGRIVNTKCNVGANRNQAFVEFVDQNQAIQMVSYYASSSDPAQVRGKTVYIQYSNRHEIVNNKSPGDNPGNVLLVTIEGVEAGDVSIDVIHLVFSAFGYLHKIATFEKAAGFQALIQFTDSETASSARNALDGRSIPRYLLPEHVGSCHLRISYSAHTDLNIKFQSHRSRDYTNPYLPVNPTAIEGPVQPTVGADGKKKEPESNVLLASIENMQYAVTIDVLHTVFSAFGTVQKIAIFEKNGGTQALIQYPDVATAAVAKETLEGHCIYDGGYCKLHLSYSRHTDLNVKAYSDKSRDYTIPDASLIAAQAPGLHTAPTMWQNPQAGSMYTGNNYATTAAVPVQVPPGQVPAWDPTMQAGGQGYASVPGTYPGQTYPTPPASAYATAAIPAGSSPRSHSSPISHSVASMAMSHPGMQSNLRPSGASPPGQPPYYG

SEQ ID NO: 1613 - DNA, 1452 bp, Ricinus communis
  CDS (1)..(1452)
atgtcaacgtcagggcaacctcaattccgatacacgcaaacaccatcgaaggtattgcatttgagaaatctaccatgggaatgcacagaggaagagctaatcgagctctgtaaacccttcggaaagatcgttaacactaagtgtaacgttggcgctaatcgcaatcaagcttttgtggaattcgcagacttaaatcaggcaattcaaatggtttcatactatgcatcatcgtccgagcctgcacaagttcgtggtaagacagtgtacattcagtactcaaatagacatgaaattgtcaacaacaagagtccaggtgatgttcctggaaatgtattgctggtcacaattgaaggtgttgaagcgggtgatgttagcatcgatgtcattcacttggtattctctgcttttggctttgttcacaagatagctacttttgaaaaggctgctggtttccaggcacttatccaattcactgatgcggagactgcatcttctgcaaggaatgccttggatgggagaagcataccaaagtacagctttttctccctaaatctccacctctcactaaattctgcacttctctattctagatttactcagtctaaaagtcttgatgatctgcaatttttgatttgtttattaaatttcagggactacacaaatccttatctgcctgtgaatcctacggcaattgagggacctgtacagcctgctgtaggtcctgatggaaagaagaaagaacctgagagtaatgtacttcttgcatcaatagagaatatgcagtatgctgtaacagttgatgttatccacacggtattttctgcatttggtactgtccagaagattgctatatttgagaagaatggtggaacacaggcattagttcaatatcctgatgttgcgactgcagcagtagccaaggaaactttagaaggacactgcatttatgatggtggctattgtaagcttcatctatcatactctcgtcatactgatctcaatgtaaaggcttacagcgataaaagtagagattataccataccagatgcaagtttgcttgcagcaggacaggttcctggggtccctactgctccaaccatgtggcagaatccacaggcttctccaatgtaccctgttaacagctacgcctctgcagctgctgtcactgcacaagttcctgctggacaagtgcctgcttggaatccatctatggaggcaggcggaccagcctacccatcagttcctccaggcacatttccaggtcaatcatatccagcacctccacccacgtatgtctccgcagcaatgcctgttggatcctctccgcttacacaaggtagcccaatgtcccctggggtggggacaatgcctatgactcaccctggggttcaatcaaatttgcgacctggtggtgcttcacctccaggtcagcctcctttttatggccgatga

SEQ ID NO: 1614 - protein, 483 aa, Ricinus communis
MSTSGQPQFRYTQTPSKVLHLRNLPWECTEEELIELCKPFGKIVNTKCNVGANRNQAFVEFADLNQAIQMVSYYASSSEPAQVRGKTVYIQYSNRHEIVNNKSPGDVPGNVLLVTIEGVEAGDVSIDVIHLVFSAFGFVHKIATFEKAAGFQALIQFTDAETASSARNALDGRSIPKYSFFSLNLHLSLNSALLYSRFTQSKSLDDLQFLICLLNFRDYTNPYLPVNPTAIEGPVQPAVGPDGKKKEPESNVLLASIENMQYAVTVDVIHTVFSAFGTVQKIAIFEKNGGTQALVQYPDVATAAVAKETLEGHCIYDGGYCKLHLSYSRHTDLNVKAYSDKSRDYTIPDASLLAAGQVPGVPTAPTMWQNPQASPMYPVNSYASAAAVTAQVPAGQVPAWNPSMEAGGPAYPSVPPGTFPGQSYPAPPPTYVSAAMPVGSSPLTQGSPMSPGVGTMPMTHPGVQSNLRPGGASPPGQPPFYGR

SEQ ID NO: 1615 - DNA, 1329 bp, Solanum tuberosum
  CDS (1)..(1329)
atgtcaacatccgggcaacagcagttccggtacacgcagacaccgtcgaaagttcttcacctccggaatctcccctgggattgcagcgatgaagagctagtagagctttgcaagccctttggtaaaattgtcaatacaaagtgcaacgtcggggccaatcgcaaccaagcgtttgtcgaatttgctgaccttaatcaggcaatcaacatggtttcatattatgcttcatcttcagagcctgctcaagttcgtggcaagacggtgtacattcagtattctaacaggaatgaaattgtcaataataagagtcccggagatgttccaggaaatgttttgctggtgactatcgagggtgttgaagctggtgatgtcagtatcgatgtcattcatttggtattttcagcctttggttttgttcaaaagatcgctacttttgagaaggctgcaggttttcaggcattgattcaatttagtgatgttgggacagcatctgctgctagagaggcattggatgggagaagtataccaaagtaccttcttccagaacatgttaatcattgtcacttgcgcatctcatattcagcacacacggatcttaatatcaagtttcaatctcatcgaagcagggactacacaaacccttatctcccagtaaatcctactgcaatggagggggttcttcagcctgttgtaggtccagatggaaagaaaaaggaacccgagagtaatgtgctttttgcctctttagaaaatatgcagtatgctgttaccgtcgatgtccttaacacggttttctctgcatttggtactgttcagaagattgctatatttgagaagaatggtcaaacccaggcattaattcagtatcctgatgtaacaattgcagctgctgcaaaggacgctttagagggacactgcatatatgatggtggctattgtaagcttcatctatcatactctcgtcatactgatctgaatgtacaggcatacagtgacaaaagtagagactacacagttccagaatcaagtttgcttgcgatgcaacaagcatctgcagtccatgccacaccacctgtttggcataatcctcagtctggtccagtacagtcatcagctggctatgccactactggtactgttcctggccaagcaccacctgcatggaatccaaatttgcagggtggaggatcaacctttccatcggctcctactggatatcctggtcattcatatgctccaccagctcctgcttatgcaactgcagtacatcctcctggatcgtcacagcagaccaatcacatttctactggtagtcgacttttagtgtaa

SEQ ID NO: 1616 - protein, 442 aa, Solanum tuberosum
MSTSGQQQFRYTQTPSKVLHLRNLPWDCSDEELVELCKPFGKIVNTKCNVGANRNQAFVEFADLNQAINMVSYYASSSEPAQVRGKTVYIQYSNRNEIVNNKSPGDVPGNVLLVTIEGVEAGDVSIDVIHLVFSAFGFVQKIATFEKAAGFQALIQFSDVGTASAAREALDGRSIPKYLLPEHVNHCHLRISYSAHTDLNIKFQSHRSRDYTNPYLPVNPTAMEGVLQPVVGPDGKKKEPESNVLFASLENMQYAVTVDVLNTVFSAFGTVQKIAIFEKNGQTQALIQYPDVTIAAAAKDALEGHCIYDGGYCKLHLSYSRHTDLNVQAYSDKSRDYTVPESSLLAMQQASAVHATPPVWHNPQSGPVQSSAGYATTGTVPGQAPPAWNPNLQGGGSTFPSAPTGYPGHSYAPPAPAYATAVHPPGSSQQTNHISTGSRLLV

SEQ ID NO: 1617 - DNA, 1314 bp, Solanum tuberosum
  CDS (1)..(1314)
atgtcaacatccgggcaacagcagttccggtacacgcagacaccgtcgaaagttcttcacctccggaatcttccatgggattgcagcgatgaagagctagtagagctttgcaagccctttggtaaaattgtcaatacaaagtgcaacgtcggggccaatcgcaaccaagcgtttgtcgaatttgctgaccttaatcaggcaatcaacatggtttcatattatgcttcatcttcagagcctgctcaagttcgtggcaagacggtgtacattcagtattctaacaggaatgaaattgtcaataataagagtcccggagatgttccaggaaatgttttgctggtgactatcgagggtgttgaagctggtgatgtcagtatcgatgtcattcatttggtattttcagcctttggttttgttcaaaagatcgctacttttgagaaggctgcaggttttcaggcattgattcaatttagtgatgttgggacagcatctgctgctagagaggcattggatgggagaagtataccaaagtaccttcttccagaacatgttaatcattgtcacttgcgcatctcatattcagcacacacggatcttaatatcaagtttcaatctcatcgaagcagggactacacaaacccttatctcccagtaaatcctactgcaatggagggggttcttcagcctgttgtaggtccagatggaaagaaaaaggaacccgagagtaatgtgctttttgcctctttagaaaatatgcagtatgctgttaccgtcgatgtccttaacacggttttctctgcatttggtactgttcagaagatcgctatatttgagaagaatggtcaaacccaggcattaattcagtatcctgatgtaacaattgcagctgctgcaaaggacgctttagagggacactgcatatatgatggtggctattgtaagcttcatctatcatactctcgtcatactgatctgaatgtacaggcatacagtgacaaaagtagagactacacagttccagaatcaagtttgcttgcgatgcaacaagcatctgcagtccatgccacaccacctgtttggcataatcctcagtctggtccagtacagtcatcagctggctatgccactactggtactgttcctggccaagcaccacctacatggaatccaaatttgcagggttggaggatcaacctttccatcggctcctactggatatcctggtcattcatatgctccaccagctcctgcttatgcaactgcagtgcatcctcctggatcgtcacagcagaccaatcacatttctactggtag

SEQ ID NO: 1618 - protein, 437 aa, Solanum tuberosum
MSTSGQQQFRYTQTPSKVLHLRNLPWDCSDEELVELCKPFGKIVNTKCNVGANRNQAFVEFADLNQAINMVSYYASSSEPAQVRGKTVYIQYSNRNEIVNNKSPGDVPGNVLLVTIEGVEAGDVSIDVIHLVFSAFGFVQKIATFEKAAGFQALIQFSDVGTASAAREALDGRSIPKYLLPEHVNHCHLRISYSAHTDLNIKFQSHRSRDYTNPYLPVNPTAMEGVLQPVVGPDGKKKEPESNVLFASLENMQYAVTVDVLNTVFSAFGTVQKIAIFEKNGQTQALIQYPDVTIAAAAKDALEGHCIYDGGYCKLHLSYSRHTDLNVQAYSDKSRDYTVPESSLLAMQQASAVHATPPVWHNPQSGPVQSSAGYATTGTVPGQAPPTWNPNLQGWRINLSIGSYWISWSFICSTSSCLCNCSASSWIVTADQSHFYW

SEQ ID NO: 1619 - DNA, 1287 bp, Glycine max
  CDS (1)..(1287)
atggcatcggtgtctactcagcaacagttccgttacacgcagccaccatcaaaggtgcttcatttgagaaatttgccgtgggagtgcacagaggacgaactaattgaacttgggaagctatttgggaaagttgtgaacacaaagtgcaatgtcggagcaaatcggaatcaagcttttatagaatttgcagatttaaatcaggcgatcgcaatgatatcatattatgcctcatcgtcggagcctgctcaagtacgagggaaaactgtgtatcttcaatattccaataggcaagaaatagtgaataacaaaactgcagcagatgttgctggaaatgtactgttagttacaattgagggtgaagatgcacgccttgtcagcattgatgtcttacacttggtcttttcagcctttgggtttgtgcataagattactacttttgagaagacagcaggattccaggcattggtgcaattctcagatgcagaaactgctacttctgcaaaggatgcttggaaaggaagaagcacacctaggcacctgcgacctgaacatatgggaccatgtggccttaagatcacatattctggacattcagacttaagtgtcaagtttcaaagtcacagaagcagagactacactaatccttaccttcctgttgctcaatctgccatggagggaagtggacagcccatggtgggtttggatgggaagagactggaggccgagagtaatgttcttcttgcatctattgagaacatgcagtatactgtaaccttggatgtcttacacatggttttctctgcctttggacctgtccaaaagattgcaatgtttgacaagaatggtggtttacaggctctgattcaatatccagatatccaaacagctgttgtggccaaggaaaccttggaaggacactgcatatatgatggaggtttttgcaagcttcacatctcgtattcacgtcatactgatcttagtataaaggtgaataatgagagaagtagagactataccattcctaatgtacctccacctgtagtgaatgctcagccctcaattttagggcaacatccagttccgatgacgggccctcctcctcaacattacaatggagctcagtacgcaccagttactgagcaaactctgatgtctcattctcaggctggatgggggacaggtccacctcagtctatgcaacagatgcataaccatccttacacgccatccgccatggtgccaccgcaaacaacccctggaatgcagtttccaagtcacattcaatag

SEQ ID NO: 1620 - protein, 428 aa, Glycine max
MASVSTQQQFRYTQPPSKVLHLRNLPWECTEDELIELGKLFGKVVNTKCNVGANRNQAFIEFADLNQAIAMISYYASSSEPAQVRGKTVYLQYSNRQEIVNNKTAADVAGNVLLVTIEGEDARLVSIDVLHLVFSAFGFVHKITTFEKTAGFQALVQFSDAETATSAKDAWKGRSTPRHLRPEHMGPCGLKITYSGHSDLSVKFQSHRSRDYTNPYLPVAQSAMEGSGQPMVGLDGKRLEAESNVLLASIENMQYTVTLDVLHMVFSAFGPVQKIAMFDKNGGLQALIQYPDIQTAVVAKETLEGHCIYDGGFCKLHISYSRHTDLSIKVNNERSRDYTIPNVPPPVVNAQPSILGQHPVPMTGPPPQHYNGAQYAPVTEQTLMSHSQAGWGTGPPQSMQQMHNHPYTPSAMVPPQTTPGMQFPSHIQ

SEQ ID NO: 1621 - DNA, 1302 bp, Glycine max
  CDS (1)..(1302)
atggcatcggtatccagtcaaccacagttccgttacactcagccaccgtcaaaggttctccatttgaggaacttgccatgggagtgcacagaggaggaactgattgagcttgggaagccgtttggcaaagttgttaacacaaaatgcaatgttggggcgaatagaaatcaagcttttattgaatttgcagatttgaatcaagccattgcaatgatatcgtactatgcctcatcatcagagcctgctcaagtacgtgggaaaactgtatacctacaatattcaaataggcaagaaatagtgaataacaaaactactgcagatgttcccgggaatgtattgttggtaacgattgagggtgcagatgcacgtcttgtcagcattgatgtcttgcacttggttttttcagcctttggatttgtgcataagattactactttcgagaagacagcaggatttcaggcactggtgcaattctcagatgcagagactgccacctctgcgaaggatgctttggatggaagaagcatacctaggtatctgctgcctgagcatgtgggaccatgtacccttaggatcacttattccggacattcagatttaagtgtaaagtttcaaagccacaggagcagagactatactaatccttaccttcctgttgctccatcagctgtggagggaagtggacaggctatggttggcttggatgggaaaagactggagactgagagtaatgttctccttgcatctattgaaaacatgcaatatgccgtaacactggatgtcttacacatggttttctctgcttttggtcctgtccaaaaaattgcaatgttcgataagaatggtggtttgcaggctctgattcaatttccagatactcagacagctgttgtggccaaggaggccttggaaggacattgcatatatgatggaggtttttgcaagcttcacatttcatattcacgacatactgatctaagtataaaggtcaataatgataggagcagagactataccattcctaatacccctgctgtgaacgtccaaccctcaattttagggcaacaatctgttcccatgatgggccctccacaacaaccatacaatgggtctcaggctggatgggggacagctccaccagcaacaacggttcagtctatgccaatgcagatgcacaataatgtttacatgccatctggaactatgccacaacaaatggcccctggaatgcaatttccaagttacaacacagcacaacctacaacaacattgccctcatatcgatctgatcgtactcaatag

SEQ ID NO: 1622 - protein, 433 aa, Glycine max
MASVSSQPQFRYTQPPSKVLHLRNLPWECTEEELIELGKPFGKVVNTKCNVGANRNQAFIEFADLNQAIAMISYYASSSEPAQVRGKTVYLQYSNRQEIVNNKTTADVPGNVLLVTIEGADARLVSIDVLHLVFSAFGFVHKITTFEKTAGFQALVQFSDAETATSAKDALDGRSIPRYLLPEHVGPCTLRITYSGHSDLSVKFQSHRSRDYTNPYLPVAPSAVEGSGQAMVGLDGKRLETESNVLLASIENMQYAVTLDVLHMVFSAFGPVQKIAMFDKNGGLQALIQFPDTQTAVVAKEALEGHCIYDGGFCKLHISYSRHTDLSIKVNNDRSRDYTIPNTPAVNVQPSILGQQSVPMMGPPQQPYNGSQAGWGTAPPATTVQSMPMQMHNNVYMPSGTMPQQMAPGMQFPSYNTAQPTTTLPSYRSDRTQ

SEQ ID NO: 1623 - DNA, 20 bp, Artificial sequence
  primer
atgtcgagctcaggccaaac

SEQ ID NO: 1624 - DNA, 24 bp, Artificial sequence
  primer
ttaataaagaggcatcaacatcag

SEQ ID NO: 1625 - protein, 331 aa, Artificial sequence
  consensus sequence
  Variant (2)..(7): Xaa in position 2 to 7 is any amino acid
  Variant (8)..(11): Xaa in position 8 to 11 is any or no amino acid
  Variant (18)..(18): Xaa in position 18 is any amino acid
  Variant (33)..(33): Xaa in position 33 is any amino acid
  Variant (38)..(38): Xaa in position 38 is any amino acid
  Variant (41)..(41): Xaa in position 41 is any amino acid
  Variant (46)..(47): Xaa in position 46 to 47 is any amino acid
  Variant (52)..(52): Xaa in position 52 is any amino acid
  Variant (63)..(63): Xaa in position 63 is any amino acid
  Variant (66)..(66): Xaa in position 66 is any amino acid
  Variant (68)..(68): Xaa in position 68 is any amino acid
  Variant (73)..(73): Xaa in position 73 is any amino acid
  Variant (75)..(75): Xaa in position 75 is any amino acid
  Variant (87)..(87): Xaa in position 87 is any amino acid
  Variant (94)..(94): Xaa in position 94 is any amino acid
  Variant (100)..(100): Xaa in position 100 is any amino acid
  Variant (107)..(109): Xaa in position 107 to 109 is any amino acid
  Variant (111)..(112): Xaa in position 111 to 112 is any amino acid
  Variant (120)..(120): Xaa in position 120 is any amino acid
  Variant (123)..(126): Xaa in position 123 to 126 is any amino acid
  Variant (127)..(127): Xaa in position 127 is any or no amino acid
  Variant (129)..(129): Xaa in position 129 is any amino acid
  Variant (133)..(133): Xaa in position 133 is any amino acid
  Variant (142)..(144): Xaa in position 142 to 144 is any amino acid
  Variant (147)..(147): Xaa in position 147 is any amino acid
  Variant (152)..(155): Xaa in position 152 to 155 is any amino acid
  Variant (156)..(159): Xaa in position 156 to 159 is any or no amino acid
  Variant (163)..(163): Xaa in position 163 is any amino acid
  Variant (165)..(166): Xaa in position 165 to 166 is any amino acid
  Variant (168)..(169): Xaa in position 168 to 169 is any amino acid
  Variant (172)..(173): Xaa in position 172 to 173 is any amino acid
  Variant (175)..(177): Xaa in position 175 to 177 is any amino acid
  Variant (182)..(182): Xaa in position 182 is any amino acid
  Variant (185)..(185): Xaa in position 185 is any amino acid
  Variant (186)..(189): Xaa in position 186 to 189 is any or no amino acid
  Variant (193)..(194): Xaa in position 193 to 194 is any amino acid
  Variant (196)..(198): Xaa in position 196 to 198 is any amino acid
  Variant (200)..(200): Xaa in position 200 is any amino acid
  Variant (202)..(205): Xaa in position 202 to 205 is any amino acid
  Variant (207)..(207): Xaa in position 207 is any amino acid
  Variant (209)..(209): Xaa in position 209 is any amino acid
  Variant (210)..(215): Xaa in position 210 to 215 is any or no amino acid
  Variant (218)..(219): Xaa in position 218 to 219 is any amino acid
  Variant (224)..(224): Xaa in position 224 is any amino acid
  Variant (233)..(233): Xaa in position 233 is any amino acid
  Variant (237)..(239): Xaa in position 237 to 239 is any amino acid
  Variant (241)..(244): Xaa in position 241 to 244 is any amino acid
  Variant (245)..(245): Xaa in position 245 is any or no amino acid
  Variant (247)..(249): Xaa in position 247 to 249 is any amino acid
  Variant (251)..(251): Xaa in position 251 is any amino acid
  Variant (254)..(256): Xaa in position 254 to 256 is any amino acid
  Variant (258)..(260): Xaa in position 258 to 260 is any amino acid
  Variant (265)..(265): Xaa in position 265 is any amino acid
  Variant (276)..(276): Xaa in position 276 is any amino acid
  Variant (281)..(281): Xaa in position 281 is any amino acid
  Variant (285)..(286): Xaa in position 285 to 286 is any amino acid
  Variant (288)..(288): Xaa in position 288 is any amino acid
  Variant (294)..(294): Xaa in position 294 is any amino acid
  Variant (296)..(296): Xaa in position 296 is any amino acid
  Variant (300)..(301): Xaa in position 300 to 301 is any amino acid
  Variant (308)..(308): Xaa in position 308 is any amino acid
  Variant (310)..(312): Xaa in position 310 to 312 is any amino acid
  Variant (314)..(314): Xaa in position 314 is any amino acid
  Variant (315)..(315): Xaa in position 315 is any or no amino acid
  Variant (317)..(319): Xaa in position 317 to 319 is any amino acid
  Variant (330)..(330): Xaa in position 330 is any amino acid
MXXXXXXXXXXQFRYTQXPSKVLHLRNLPWECXEEELXELXKPFGXXVNTKXNVGANRNQAFXEFXDXNQAIXMXSYYASSSEPAQXRGKTVYXQYSNRXEIVNNKXXXDXXGNVLLVTXEGXXXXXVXIDVXHLVFSAFGXXXKIXTFEKXXXXXXXXQALXQXXDXXTAXXAXXXLDGRXIPXXXXXYLLXXHXXXCXLXXXXSXHXXXXXXXDLXXKFQSXRSRDYTNPXLPVXXXAXXXXXQXXXGXDGXXXEXXXNVLLXSIENMQYAVTXDVLHXVFSXXGXVQKIAXFXKNGXXQALIQYXDXXXAXXAXXXLEGHCIYDGGXC

SEQ ID NO: 1626 - protein, 27 aa, Artificial sequence
  protein pattern
  Variant (8)..(8): Xaa in position 8 is Asp or Glu
  Variant (11)..(11): Xaa in position 11 is any amino acid
  Variant (12)..(12): Xaa in position 12 is Ile or Val
  Variant (16)..(16): Xaa in position 16 is Ser or Thr
  Variant (19)..(19): Xaa in position 19 is Ile or Leu
  Variant (25)..(25): Xaa in position 25 is any amino acid
SYYASSSXPAXXRGKXVYXQYSNRXEI

SEQ ID NO: 1627 - protein, 9 aa, Artificial sequence
  protein pattern
  Variant (7)..(7): Xaa in position 7 is Phe or Ile
NVLLVTXEG

SEQ ID NO: 1628 - DNA, 1224 bp, Arabidopsis thaliana
  CDS (1)..(1224)
atggaaggtgggttttattccgattggaatgatagttcctcgtcgttattcggatcagagaatccggagcacgagttggaggaaggaaatgtaagaagtgaagagattgtctctcagatacctcagcctcagacaccaagggagccaatgaagtttctatccagatcatggagtctatctgcttctgaaatctccaaagctttggcgcagaaacagagacaacagcgagatctgttttctgtttcccagaacagtcctagaggcttcttccaagatgttgctgcagatccactcatggcagagaatatcatgaactcagctggaacccgtagatcagggagattatcaaagtggtttcaccacaaacaacacaccaacccaagcaccatgaggattccgaggaagaaagataaagcgcgtgtacagaaagcccatgttcactcagctgtgtccattgcagctctggcagctgggttagcatctgtgacttctgaggaaagctgcagcaaagagtcatgctccatgatggcactggctctagcctcagcaacagagctactggcttcacactgcattgacatggctgagcaagcaggcgctgatcacacctgtgttgcttccacggtcaggtcttccgttgatatccacagccctggcgatctcatgactctcacagctgcggctgcaactgcattgagaggggaagcagctttaaaggtgaggcagccgaaggaatcaaggaagaatgcaactatcacaccttgtgaaaggagcttctcagactctcactggcccggcgaaaattgtcagtttagattggaggaaccaaaccttcctttagagggcgaactggtgcaatgtgcacgaaatgcaggattgcagcgaaataagcgagtttgtgtctatatcaacaagaagtctcaggtcatgatcaaactcaaaagcaaacatgttggaggggcattctccaagaagatcaaatgtgttgtttatggagtctgcgacgagatatctgcatggccttgcaggaaagagagggaaaattccgaagaagtctattttggtctgaaaacaggacagggtcttttagagttcaagtgcaagagcaagattcagaagcagagatgggttgctgggattcagtctaatctccgcttagtaagttgcctcgaggctgccaaatgctctctggaatctctgagtctcagcaatcgcatgcgatag

SEQ ID NO: 1629 - protein, 407 aa, Arabidopsis thaliana
MEGGFYSDWNDSSSSLFGSENPEHELEEGNVRSEEIVSQIPQPQTPREPMKFLSRSWSLSASEISKALAQKQRQQRDLFSVSQNSPRGFFQDVAADPLMAENIMNSAGTRRSGRLSKWFHHKQHTNPSTMRIPRKKDKARVQKAHVHSAVSIAALAAGLASVTSEESCSKESCSMMALALASATELLASHCIDMAEQAGADHTCVASTVRSSVDIHSPGDLMTLTAAAATALRGEAALKVRQPKESRKNATITPCERSFSDSHWPGENCQFRLEEPNLPLEGELVQCARNAGLQRNKRVCVYINKKSQVMIKLKSKHVGGAFSKKIKCVVYGVCDEISAWPCRKERENSEEVYFGLKTGQGLLEFKCKSKIQKQRWVAGIQSNLRLVSCLEAAKCSLESLSLSNRMR

SEQ ID NO: 1630 - DNA, 1329 bp, Oryza sativa
  CDS (1)..(1329)
atggagcaatgccatcatcatcagcagcagagcaatggccagcagctgcagaggctggagggcattgaggaagaaggcggcgccgccgagaagtggccgccgccgacgactgtccggccgccggagacgccgacggagacgatggagttcttggcgaggtcgtggagcctgtcggccgccgagatctccaaggccctcagggtcctcagcggcaagggcgtctccgacgacgtccacgacgccgccgccgccgtcgccggcgacaggaaggagcggaggtcaccggtgaccatggacggccgccgccatgaacaggcaagcgaggagaacgaggcagcatctatgagagcggacgcgtcgtcaatggcggcggcggcgcagggcggcgcgatgagcccgcccatctctccccgtgccaacctggacgtgaagcttctccgggcgacggctacggcggcggcggcggcgggagggagaggcgggggcggcaagacgacgatgggcacgtggatcaaggagcagaaggagcggaagcgcgccgaggcgaggtcgcgcaacgcgcaggcctacgcggcgacgtccgtggccggcgtcgccgccgcggtggccgcgctggtcgccggcgcggtgttctcccctcctccggaccaccccaagaacggcggcgccgccgcaccagcaccggcacccgcacacgccgccggagcggcaggcgcgaagacggcggcggccatcgcgtccgccgccgcgctggtggcgtcgcactgcgtggagatggcgcaggcgatcggcgccagccacgaccagatcctcggcgccatccagtccgccgtgaacgcgcagaccagcggcgacatcatggcgctcaccgccggcgccgccacggccctgcgcggggcggcgatgctgcgggcgaggctccacaaggagatccaggccgccgccctccccggcggcggcgccggcgccggcgacatcagcggcagggagcccgagagggacacgtcgccattcgccttcgtctccagaggcggcgagcttctcaagcgcacaagacaaggcacgataacagtgatcatcaagatgaggagcgcgcatatggccggcaccttcatcaagaccaagaaatttgttgtgcttgacatctgctcggagatcccggcgtgggcggggagggaggtggaggaggggagccacaggaggggatacttcgggatcaagacggtggagaggatgatcgagttcgagtgcaggagcaaatacgagcagcacaagtgggttcaagggatcaccgagatgctcaaccgccgtcacaccatgaaaaattag

SEQ ID NO: 1631 - protein, 442 aa, Oryza sativa
MEQCHHHQQQSNGQQLQRLEGIEEEGGAAEKWPPPTTVRPPETPTETMEFLARSWSLSAAEISKALRVLSGKGVSDDVHDAAAAVAGDRKERRSPVTMDGRRHEQASEENEAASMRADASSMAAAAQGGAMSPPISPRANLDVKLLRATATAAAAAGGRGGGGKTTMGTWIKEQKERKRAEARSRNAQAYAATSVAGVAAAVAALVAGAVFSPPPDHPKNGGAAAPAPAPAHAAGAAGAKTAAAIASAAALVASHCVEMAQAIGASHDQILGAIQSAVNAQTSGDIMALTAGAATALRGAAMLRARLHKEIQAAALPGGGAGAGDISGREPERDTSPFAFVSRGGELLKRTRQGTITVIIKMRSAHMAGTFIKTKKFVVLDICSEIPAWAGREVEEGSHRRGYFGIKTVERMIEFECRSKYEQHKWVQGITEMLNRRHTMKN

SEQ ID NO: 1632 - DNA, 1182 bp, Oryza sativa
  CDS (1)..(1182)
atgaggaggagggatcacctgctgctcatggatgctgctcctcctccggcggcggtggcggcggcggtgcagacgctgatggagcccatggagttcctgtcccggtcgtggagcgtgtccgcgtcggacatatccagggtgctcaccggcggcgtcggcgcgaggcggagcaccaacttcgtggtggatcgcctctccgggatgctcatgccggagacgctcgcgctcgccgccgcctccagcacaaacctgagcccccgcaaacgctattccaggtgcaggagcgccatctccgcgcaccagcacacgatcgggaggtggttccaccacagggacgggagcagcagcagcagcagcagcagggtcgacaaggcccgcgccgagcgggcgcgcgtgcacgccgcggtcaccgtggcgagcgtggcggccgccgtcgcggccgtggcctccggcgcggcgaacgacccggacgacctcgacgacgccaagatggacgccgcgctggcgtccgccacacagctgctggcctcgcactgcatcgagatcgccgagctcgccggcgccgaccacgaccaggtcgcctccgcggtggaggccgccgtcgacgtgcggagccccggcgatctcatgaccctgaccgcctccgcagccacagctctgagaggagcgacggcgctgaggctgagagcgcagcgggaggcgaggagcaaggtggcggcggtggcgccctacgagaagaccggcagctgccgcggcgacatatggtgcaaggaagggacgctcctgaaacgcagccggaaaggcgctttgcaccggaagcgcgtggccgtctacatcaacaagaagtcgcaggtgatcgtgaaactgaagagcaagcacatcggcggcgccttctccaagaagaagaagagcgtcgtgtacggcgtcgacgacgacgtgcaggcgtggccggcgccgcacgcgtgcggcggcggcgccgtgcctcctgctccggagacggcgtcgtcggagaagtgccagttcgggctgaggacggcgcagggcgtggtcgagttccagtgcgagagcagggcgcagaagcaggactgggtggagtcggtgaagaatctgctccggcaggcggccggcgggacggctcagctcgagcactccttcgaatctctccggcttagcgcctcgtaa

SEQ ID NO: 1633 - protein, 393 aa, Oryza sativa
MRRRDHLLLMDAAPPPAAVAAAVQTLMEPMEFLSRSWSVSASDISRVLTGGVGARRSTNFVVDRLSGMLMPETLALAAASSTNLSPRKRYSRCRSAISAHQHTIGRWFHHRDGSSSSSSSRVDKARAERARVHAAVTVASVAAAVAAVASGAANDPDDLDDAKMDAALASATQLLASHCIEIAELAGADHDQVASAVEAAVDVRSPGDLMTLTASAATALRGATALRLRAQREARSKVAAVAPYEKTGSCRGDIWCKEGTLLKRSRKGALHRKRVAVYINKKSQVIVKLKSKHIGGAFSKKKKSVVYGVDDDVQAWPAPHACGGGAVPPAPETASSEKCQFGLRTAQGVVEFQCESRAQKQDWVESVKNLLRQAAGGTAQLEHSFESLRLSAS

SEQ ID NO: 1634 - DNA, 1140 bp, Oryza sativa
  CDS (1)..(1140)
atggccatggagagagcttggaagccaagggaaattgctgacacttttggcattgagatggatgaagaggaggctgcggctgcggcgataccgcctccgcagacgccattggagcccatggagtacctgtcgaggtcatggagcgtgtcagcgtcagagatatccaagatccttttcaacgggagcaagaagagctttgccgccaagcgtctgccggagatgaccataccggaaaactctgtggtcgctgcgtccattgttcccagccatctgcaacatatagacacaagaaggaattcaatcagcagccaccacctgccaattgggaggtggttccaacacaaggaggcaagccgggtcaagcagagcagcaaagagaagctgcgagccgagaaggcccatgtacacgccatggtgtcggtggcccgggtcgcagctgccgttgctgcggttaccgcggccaccacgagctcagatatccagacctccaagatggccgcggccatggtgtcggccaccgagctattggcttcgcactgcgtggagatcgcgcagcacgcgggggcacgccatgagcaggtggcctgtgccatccagtctgcagttggtgttagaagctctggtgatctgatgacactcacagcagcagcagctactgctcttcgaggagccgcaacaatgaagcagagagtgcagcgagagatgagaagcaatgcgagtgttcttccgtatgagaagggtcactcatggagtcctgacatctggtgcaaggagggggagttactgaaacgcacaagaaaaggagatttacacaagacacgagtatctatatacatcaacaagaggtcacaggtcatattgaagttgaagagtaaacacataggaggagcactatcaaagaagaacaagagtgtggtttttggtgtgtacaacgagcttcccacatgggttgaggcagggaaacatttcacagaggagagatgctgctttggcctgagcacggcacaaggtctggtagagtttgagtgtgagaacagcacaagtaaacagaggtgggtcgatgatgtgaagaatctgcttcggcaggtcgctgcagaagagcaagtggaaaataagttgggatcagtgaagctcagttga

SEQ ID NO: 1635 - protein, 379 aa, Oryza sativa
MAMERAWKPREIADTFGIEMDEEEAAAAAIPPPQTPLEPMEYLSRSWSVSASEISKILFNGSKKSFAAKRLPEMTIPENSVVAASIVPSHLQHIDTRRNSISSHHLPIGRWFQHKEASRVKQSSKEKLRAEKAHVHAMVSVARVAAAVAAVTAATTSSDIQTSKMAAAMVSATELLASHCVEIAQHAGARHEQVACAIQSAVGVRSSGDLMTLTAAAATALRGAATMKQRVQREMRSNASVLPYEKGHSWSPDIWCKEGELLKRTRKGDLHKTRVSIYINKRSQVILKLKSKHIGGALSKKNKSVVFGVYNELPTWVEAGKHFTEERCCFGLSTAQGLVEFECENSTSKQRWVDDVKNLLRQVAAEEQVENKLGSVKLS

SEQ ID NO: 1636 - DNA, 1440 bp, Oryza sativa
  CDS (1)..(1440)
atgagcgaatccggcagggtcaccgccggcggaggaaggggcgagctgcggccgccggagctgccgcgggacccggcgctggagttcctgtcccggtcgtggagcgcgtcgggcgccgccgacgtctcccgccgcgcgctcgccgccgccgccttcccggcggcggcggcgtcggccgcggtcatcgccgaggacgtctccggtgagctcgacgtcgacggctccgcctccgggagctccttctccttcgcgtcggcggccacctcgcagctcatcatggacaggatcatgtcgcaatcggaggtgtcgccgctgacctccggccgcctctcacacagcagcggccctctcaacggcggcggctcgctctccgacagcccaccggtctcgccggacgtcgacgacagcaagttttgcagagcggtgagcacgccgaagccgcagccgtaccgcggcgtcgtcggcggcggcgggaagacggtggggcggtggctgaaggagaggaaggagaagaagaaggaggaggcgcgggcgcacaacgcgcaggtccacgccgcggtgtcggtggcggcggtggcggccgcggtcgccgccgtggccgccgccaccgcggcctccggcggcggcagggacgaccgcgccgcgcgcaccgacatggccgtggcgtccgcggcgacgctggtcgccgcccagtgcgtcgaggctgccgagtccctcggcgccgagcgcgaccacctcgccgccgccatcgcctccgccgtcaacgtccgcacacccggcgacatcgtcaccatcaccgccgccgccgccaccgcgttgcgaggcgccgcgacgctcaaggcgagggcgctcaaggacgtgtggaacgtggccgcggtgatccccgtcgagaagaacgccatcgccgccgccaccaccggcggtggccaccacaaacacaacgcccagaagcagcagcatcaccaccgccaccatggcaacggcagcaacacgagcagcagcttcagcgacgaggtcgccgccgtcgacgacgacgacgacgacgacaacaacttcctcaccatctgcagccaagagctcctcgcccgtggcaccgagctcctcaagcgcactcgcaaaggagctttgcattggaaggtggtctcggtctacatccatcggacgggagtggtgatgctcaagatgaagagccggcacgtcgcgggcacgctcaccaagaagaagaagaatgtggtggtggacgtgtgcagggacgtggcggcgtggccggggaggcacctgctagagggcggcgagcaccggcggtacttcgggctccgcaccgcggagcaccgggtgatcgagttcgagtgcggcagccagagagagcatgacatgtggaccaagggcgtcgcccgcctcctcgccaccatcgatggccgtcgcaagcgcttcgcctga

SEQ ID NO: 1637 - protein, 479 aa, Oryza sativa
MSESGRVTAGGGRGELRPPELPRDPALEFLSRSWSASGAADVSRRALAAAAFPAAAASAAVIAEDVSGELDVDGSASGSSFSFASAATSQLIMDRIMSQSEVSPLTSGRLSHSSGPLNGGGSLSDSPPVSPDVDDSKFCRAVSTPKPQPYRGVVGGGGKTVGRWLKERKEKKKEEARAHNAQVHAAVSVAAVAAAVAAVAAATAASGGGRDDRAARTDMAVASAATLVAAQCVEAAESLGAERDHLAAAIASAVNVRTPGDIVTITAAAATALRGAATLKARALKDVWNVAAVIPVEKNAIAAATTGGGHHKHNAQKQQHHHRHHGNGSNTSSSFSDEVAAVDDDDDDDNNFLTICSQELLARGTELLKRTRKGALHWKVVSVYIHRTGVVMLKMKSRHVAGTLTKKKKNVVVDVCRDVAAWPGRHLLEGGEHRRYFGLRTAEHRVIEFECGSQREHDMWTKGVARLLATIDGRRKRFA

SEQ ID NO: 1638 - DNA, 1167 bp, Glycine max
  CDS (1)..(1167)
atggaaggtggtttttttacaccttggaagaatgagccttggcaggagttagcttcagaggacgtgaaggaaagtgagcaattgatatcgttgccacccttggctgagccaccgacaccccgtgaacctatggagttcttatctaggtcatggagtctctctgcctccgaaatctcaaaggctctctcagagaaacaaaagcaaactttcctcgataacaaggccccagacacattgcccgaacctatttccgctcctcaattagcaggagggaagatgatagtatctggaaattgtcgaaggatgggtgcgattgggaaatggttacatcagaagcagtacggcattacgaacgtttccgttaagaagaaagaccgggcgcgcgtggaaaacgcgcgtgtgcattctgcgctatccattgcggggctggcctctgcggtggccgctgtggcggcaacagaggaccctcgcggtggctctcgttctaaattggacgttgctctcgcttcggccacgcaactcttggcttcttattgcgttgaaatagcggagatagttggcgcggatcgccagcgcgtggcttccacagttaggtctgcggttgatattcaaacgccaggagatctaatgactctcactgctgcagctgcaacaggagatgcagctctgacagcgagaatgccaaaagaagcaaagaaaaatgcgtcaataagtccgtatgataaagtgatagcggaaacgcaatggcttcgtgcgtttgacggtcagatgttggaacgttatcctccgtgcctgggggatttgttgcagctcacagaaaaaggtgctttacgatggagacatgtccatgtttatatcaagaaatgtcaggttaaagttaagatcaaaagcaagcacgttggaggagccttctccaaaaagaacaaatgtgtggtgtatggagtctgtgataaagataatgcatggccatatagaaaagaaagggaagcatcagaagagctttattttggcctgaaaactgcacaaggtcttctagaatttaagtgccagaacaaactccacaagcaaaaatgggttgatggaatagaatttttacttcgtagggtcaactctgtcgaagcaacagagcattctctagaatttttaagtattagtaccagtacatga

SEQ ID NO: 1639 - protein, 388 aa, Glycine max
MEGGFFTPWKNEPWQELASEDVKESEQLISLPPLAEPPTPREPMEFLSRSWSLSASEISKALSEKQKQTFLDNKAPDTLPEPISAPQLAGGKMIVSGNCRRMGAIGKWLHQKQYGITNVSVKKKDRARVENARVHSALSIAGLASAVAAVAATEDPRGGSRSKLDVALASATQLLASYCVEIAEIVGADRQRVASTVRSAVDIQTPGDLMTLTAAAATGDAALTARMPKEAKKNASISPYDKVIAETQWLRAFDGQMLERYPPCLGDLLQLTEKGALRWRHVHVYIKKCQVKVKIKSKHVGGAFSKKNKCVVYGVCDKDNAWPYRKEREASEELYFGLKTAQGLLEFKCQNKLHKQKWVDGIEFLLRRVNSVEATEHSLEFLSISTST

SEQ ID NO: 1640 - DNA, 1182 bp, Glycine max
  CDS (1)..(1182)
atggatggtggttattttccacctcgcaaaattggttcatggcatggattggaattagaggatgtgcaagaaaatgatgaactcaaattggttacatcgttatctgccatacctcagccacctaccccacatgagcctatggagttcttatccaggtcttggagtctctctgctgcagaaatttcgaaggctcttttggaaaaacaaaagcataccttccatgacaagaatcaagccacctttccagaagctattttggcacctcaattagtaacaagtaagatcataccttctccttatagtagaaagatgggtactattggaaaatggtttcatcagaggcatcatgggaatactaacattactgtaaagaagaaagatcgggcacgcttagagaatgcacgtgtgcattctgctgtgtccattgctgggctagcttcggccttggctgctgttgctgcagcagagaactcttgtggctctcaaacgaagttgaaacttgctctggcttcagccacacaactcttggcatcgcattgcattgaaatggctgaactagctggagctgatcatgaccatgtggcttctactataaagtctgcggttgatattcaaacccctggtgatctaatgactcttacagctgcagctgcaacagctttgagaggagaagcagctctaagagcaagattgccaaacgaagcaaagaggaatgcatctataagtcccaatgatagggtacaactaccacaatctcattggttttctgcttttgaaggtcagagttgtgaacatcatcctccatgtgtgggagatttgtggcagctcacaagaaaaggtgtattacgatggaagcatgtttctgtttacatcaacaagaagtgtcaggtcaaaatcaagatcaagagcaagcacgttggaggagccttctccaaaaagaataaatgtgtggtttatggaatttgtgacaaagatggggcatggccatacagaaaagaaaggaaaacgtcagaagagtactttggcctcaaaactgcacaaggtcttctagagttcaagtgtgatagtaaactccacaagcaaaaatgggttgatggaatagggtgtctacttcgtcgagtaaactctattgaagcaacagagcgctctctagatcttttaagtattaacagcgacacgtga

SEQ ID NO: 1641 - protein, 393 aa, Glycine max
MDGGYFPPRKIGSWHGLELEDVQENDELKLVTSLSAIPQPPTPHEPMEFLSRSWSLSAAEISKALLEKQKHTFHDKNQATFPEAILAPQLVTSKIIPSPYSRKMGTIGKWFHQRHHGNTNITVKKKDRARLENARVHSAVSIAGLASALAAVAAAENSCGSQTKLKLALASATQLLASHCIEMAELAGADHDHVASTIKSAVDIQTPGDLMTLTAAAATALRGEAALRARLPNEAKRNASISPNDRVQLPQSHWFSAFEGQSCEHHPPCVGDLWQLTRKGVLRWKHVSVYINKKCQVKIKIKSKHVGGAFSKKNKCVVYGICDKDGAWPYRKERKTSEEYFGLKTAQGLLEFKCDSKLHKQKWVDGIGCLLRRVNSIEATERSLDLLSINSDT

SEQ ID NO: 1642 - DNA, 1290 bp, Arabidopsis thaliana
  CDS (1)..(1290)
atggagtatgaccgtacgttgaacttgattccatacggactacaaggagtaagagaggaggaagaaatcgaagaagacgatgaagagagcatgacgttgtcgtcagtaccagaaaacgaaacgtcggagtgttcttcgcctccggcgacgtatcctccaatccctcctcggcctaaaacaccgagagagccgatggagtttctatgcagatcatggagtctttctacttctgagatctctttagctttatcatctcagaaatctgataaacaactcaacaaaaaccctaatatttctcagttggccgatgtcacttctctggctccggtagcaccaccaccgccgctacaaacgggaaagctagcgagtgcggttcacgcgcggagaacgggaacgatcggaaaatggttccaccaccgagaattcgtcggcgggaaggtctccgccgtaaagaagagagatagagttcgcgtggagaaagctcatctgcattccgccgtgtccattgcgtctctggcgacggcaatcgccgcagtgaccgcttcaggcaatcaagacggcttcgctggatcaaagatgagctcagcccttgcctcggcgtcggagttgttagcttctcactgcctcgaattggcggagcttgccggcgccgatcacgatcgcgtcgtctctgctgtccgatcagctgttgatgttcgtggacctggcgatttgttgactctaactgctgcagctgcaacagcattgagaggagaagcagctttgagggtaagactaccaaaggaagctaagaacagtgcagctataagcccctgtgagagagttttaccagagactcatagttgctcttctgagctcgatcgcactagcacgaccgatgaactcatatctgcaaaaggagttgaagaatcaactggagagctaatgcagtgcacacgaaacggtgttctgcggtggaagcatgtaaaagtgtacatcaacaaaaaatctcaggtcatagtagaaatcaaaagcaaacacgttgtaggagcattctccatgaaaagcaaaggcattgtaaatgatgtatgcgagacagtctcaggcctgcaaaatggaaaagacacggaaaacacagaagaagagctctatttcggaatcggtacagggaaaggtctgacaaagttcaagtgcaagagcaaggctgataagcagacatgggtggatagcatccggaatcttctccatcgagtaactgctgttgaggtcgacacttctcttgaaactataaacattaacgatagcacataa

SEQ ID NO: 1643 - protein, 429 aa, Arabidopsis thaliana
MEYDRTLNLIPYGLQGVREEEEIEEDDEESMTLSSVPENETSECSSPPATYPPIPPRPKTPREPMEFLCRSWSLSTSEISLALSSQKSDKQLNKNPNISQLADVTSLAPVAPPPPLQTGKLASAVHARRTGTIGKWFHHREFVGGKVSAVKKRDRVRVEKAHLHSAVSIASLATAIAAVTASGNQDGFAGSKMSSALASASELLASHCLELAELAGADHDRVVSAVRSAVDVRGPGDLLTLTAAAATALRGEAALRVRLPKEAKNSAAISPCERVLPETHSCSSELDRTSTTDELISAKGVEESTGELMQCTRNGVLRWKHVKVYINKKSQVIVEIKSKHVVGAFSMKSKGIVNDVCETVSGLQNGKDTENTEEELYFGIGTGKGLTKFKCKSKADKQTWVDSIRNLLHRVTAVEVDTSLETININDST

SEQ ID NO: 1644 - DNA, 1218 bp, Arabidopsis thaliana
  CDS (1)..(1218)
atggaaagtggcttttattcagattggaaagatacttcttcttcttcgttctttggatcagagaatatggaggaagagttggaagatggagttcttagagctgaagagcttttctcatcgattcctcaacctcagacacctaaagagccaatggagtttctgtctagatcctggagtctctctacttctgaaatctccaaagcacttgctctcaaacatagacaacaacaagatcagttttgtgttggccagaacagtcctcctgttttgttccctgatgctgctgcagatccactcgtggctgggaagatcatgaactctgttggcacacgtagagcagggacattgtctaaatggtttcaccacaacaaggaacacagcaccagcagtactactaccaatctcaagaagaaagataaagtgcgtgtggagaacgcccacgtgcattctgccgtctctatagcggctctggctgcaggtttagcctctgtgacatctgctagcaattgcaaagggtcaggctccaagatggcactggctttagcctcagccactgaactgttggcctcacactgtgttgagatggctgagcgagccggtgctgaccatgcacgtgttacttccacggttagatcttctgtggatatccacagccccggtgatctcatgactctaacagccgctgctgcaactgctttgagaggagaagcggctctgaaggcgaggcagccaaaggaagcaaggaaaaatgcagctattaccccttttgagagaagtttctctgattctcattggcatgcaaattttcagtatagattggaagaaccaaatcttccatttgaaggcgaactgatgcaatgtgcacgaaatggagtgcagcgaactaagcgtgtctgtgtctatatcaacaagaagtctcaggtaatgatcaaactcaaaagcaaacatgttggaggggcattctctaagaaaatcaaatgcgttgtctatggagtctgcgatgagaaatcagcttggccttacaggaaagagagggaaaattcagaagaagtctacttcggtctgaaaaccggacaaggtcttttggagttcaagtgcaagagcaagattcacaagcagagatgggttgatggggttcagtctcttctccgccaagtaaattgctttgaggctgccaaatgctcgctgggatctctgaatctcactggtcacacgtga

SEQ ID NO: 1645 - protein, 405 aa, Arabidopsis thaliana
MESGFYSDWKDTSSSSFFGSENMEEELEDGVLRAEELFSSIPQPQTPKEPMEFLSRSWSLSTSEISKALALKHRQQQDQFCVGQNSPPVLFPDAAADPLVAGKIMNSVGTRRAGTLSKWFHHNKEHSTSSTTTNLKKKDKVRVENAHVHSAVSIAALAAGLASVTSASNCKGSGSKMALALASATELLASHCVEMAERAGADHARVTSTVRSSVDIHSPGDLMTLTAAAATALRGEAALKARQPKEARKNAAITPFERSFSDSHWHANFQYRLEEPNLPFEGELMQCARNGVQRTKRVCVYINKKSQVMIKLKSKHVGGAFSKKIKCVVYGVCDEKSAWPYRKERENSEEVYFGLKTGQGLLEFKCKSKIHKQRWVDGVQSLLRQVNCFEAAKCSLGSLNLTGHT

SEQ ID NO: 1646 - DNA, 1362 bp, Arabidopsis thaliana
  CDS (1)..(1362)
atggatcaaaaaagtaaaacgattggagaacaatggtggaggtcaaatccaacgtttaaaccgcctgaaacgccattagattctatggagtttttgtcacgtacttggagtgcttccgctactgaagtttcaagagctgtcgtcgcgtctccaccgacttctcaaccgccgcaaatgcgtttctcggagatccaaaacggttcttctgacgtcactttggtgccggaagatgaagaaaacggcatcgttcttggaaatactttttcttttgcttcttcagaaacttctttaatggtcatggaacgtatcatggctcagtcaccggagatttcatcgccacgaacatcagggagactttctcatagctcattcaccgacagtcctccgatctctccctccgacatcgacgactttaagcaattctaccgtgtgagcccttcctttaacggccacatacgtggttcatcagccattcccggcaccgccggagggtctaaaactgttggtcgttggctaaaggaccggcgagagaagaagagagaagagacgcgtgcacaaaatgcacagcttcacgcggctgtatctgtagctggagtggctgccgcggtggctgctatcgctgcagccactgcctctcagtcgagttctggaactgacgagcaagtggccaaaaatgactccgcggtggcttctgccgcgactttggtggcggcgaagtgtgtggaagctgcagagattatgggagctgatcgtgagcacttggcctccgttgttagttctgcggttaacgttcgttctgccggagatatcatgactttgaccgccgctgctgccacagctttgagaggagctgcacaattaaaggcaagagcattgaaggaggtatggaacattgcggctgtgattcctgtagataagggtacaccaaaaggcggtggtggtggttatagaggtggcgagttagcccctgtagataattttcttgggatttgcagtaaagaattgctagctaaaggttgcgaattgcttaaacgcacccgcaaaggtgatcttcattggaaagttgtttcgatctacattaatagaacaaagcaggtaatattgaagactaagagcaaacatgttgctgggaccatcacaaagaagaaaaagaatgtggtggtgggattggttaagggattaccggcgtggcctggccgggaaatgctcgagggtggagagaatttgaggtatttcgggctgaagacggtggagaaaagagtgattgaattcgagtgcaaaagccaaagggaatatgatctttggacacaaggtgtttccatgcttctttccattgcttctgataggaaacataaatgttga

SEQ ID NO: 1647 - protein, 453 aa, Arabidopsis thaliana
MDQKSKTIGEQWWRSNPTFKPPETPLDSMEFLSRTWSASATEVSRAVVASPPTSQPPQMRFSEIQNGSSDVTLVPEDEENGIVLGNTFSFASSETSLMVMERIMAQSPEISSPRTSGRLSHSSFTDSPPISPSDIDDFKQFYRVSPSFNGHIRGSSAIPGTAGGSKTVGRWLKDRREKKREETRAQNAQLHAAVSVAGVAAAVAAIAAATASQSSSGTDEQVAKNDSAVASAATLVAAKCVEAAEIMGADREHLASVVSSAVNVRSAGDIMTLTAAAATALRGAAQLKARALKEVWNIAAVIPVDKGTPKGGGGGYRGGELAPVDNFLGICSKELLAKGCELLKRTRKGDLHWKVVSIYINRTKQVILKTKSKHVAGTITKKKKNVVVGLVKGLPAWPGREMLEGGENLRYFGLKTVEKRVIEFECKSQREYDLWTQGVSMLLSIASDRKHKC

SEQ ID NO: 1648 - DNA, 1221 bp, Arabidopsis thaliana
  CDS (1)..(1221)
atggaaggtgggttttattccgattggaatgatagttcctcgtcgttattcggatcagagaatccggagcacgagttggaggaaggaaatgtaagaagtgaagagattgtctctcagatacctcagcctcagacaccaagggagccaatgaagtttctatccagatcatggagtctatctgcttctgaaatctccaaagctttggcgcagaaacagagacaacagcgagatctgttttctgtttcccagaacagtcctagaggcttcttccaagatgttgctgcagatccactcatggcagagaatatcatgaactcagctggaacccgtagatcagggagattatcaaagtggtttcaccacaaacaacacaccaacccaagcaccatgaggattccgaggaagaaagataaagcgcgtgtacagaaagcccatgttcactcagctgtgtccattgcagctctggcagctgggttagcatctgtgacttctgaggaaagctgcagcaaagagtcatgctccatgatggcactggctctagcctcagcaacagagctactggcttcacactgcattgacatggctgagcaagcaggcgctgatcacacctgtgttgcttccacggtcaggtcttccgttgatatccacagccctggcgatctcatgactctcacagctgcggctgcaactgcattgagaggggaagcagctttaaaggtgaggcagccgaaggaatcaaggaagaatgcaactatcacaccttgtgaaaggagcttctcagactctcactggcccggcgaaaattgtcagtttagattggaggaaccaaaccttcctttagagggcgaactggtgcaatgtgcacgaaatggattgcagcgaaataagcgagtttgtgtctatatcaacaagaagtctcaggtcatgatcaaactcaaaagcaaacatgttggaggggcattctccaagaagatcaaatgtgttgtttatggagtctgcgacgagatatctgcatggccttgcaggaaagagagggaaaattccgaagaagtctattttggtctgaaaacaggacagggtcttttagagttcaagtgcaagagcaagattcagaagcagagatgggttgctgggattcagtctaatctccgcttagtaagttgcctcgaggctgccaaatgctctctggaatctctgagtctcagcaatcgcatgcgatag

SEQ ID NO: 1649 - protein, 406 aa, Arabidopsis thaliana
MEGGFYSDWNDSSSSLFGSENPEHELEEGNVRSEEIVSQIPQPQTPREPMKFLSRSWSLSASEISKALAQKQRQQRDLFSVSQNSPRGFFQDVAADPLMAENIMNSAGTRRSGRLSKWFHHKQHTNPSTMRIPRKKDKARVQKAHVHSAVSIAALAAGLASVTSEESCSKESCSMMALALASATELLASHCIDMAEQAGADHTCVASTVRSSVDIHSPGDLMTLTAAAATALRGEAALKVRQPKESRKNATITPCERSFSDSHWPGENCQFRLEEPNLPLEGELVQCARNGLQRNKRVCVYINKKSQVMIKLKSKHVGGAFSKKIKCVVYGVCDEISAWPCRKERENSEEVYFGLKTGQGLLEFKCKSKIQKQRWVAGIQSNLRLVSCLEAAKCSLESLSLSNRMR

SEQ ID NO: 1650 - DNA, 1203 bp, Physcomitrella patens subsp. patens
  CDS (1)..(1203)
atggagttcctctccagatcctggagtatctcgtctgtggatgttgcgcgctctttgcagctgaagtctcagcactcgcatggctcccttagagctttagagccgggttcgcagcatacgtcgctggaggatcccacgttgtgtgccccctttacattcgcctcgacacttacttctcagatggtcatggatcgactcatggcaccgggctctagctcggaaccatcaccttttgtatcgcggcggaactcttacagcagtggctcgctggcattgctgagccctccggtgtctccacgaactgttgaagattacaagtttcgaagaagcttcagcatgatgaaagctcccctgtcagggaggtcaatgagccggtggataaaagacctcaaaacaaagaaaaaagaggcgaccaggtgtcagaatgcacaggttcatgctgctgtttccgttgctggagtggcagctgccattgctgctgttacagctgcaactgctgcttcagctcaagaggattcttcaaagacttccatggcagttgcttctgctgctgcattagttgcagctcagtgcgtggaggtggcagaaagcataggtgctgaccgcgatcacatggcttctatagtgagttcagcagtaaatgttcgttctgctggggatattttgactcttactgcctctgctgcaacttctttaagaggtgccgctactttaagagcaaggaggatgaaagaagctcgaagcctggctgctgtgacgccttacgagagagcagcaatttgcccttccataactttcggcggtcaagatactgaaaatgaaagtgagacagagtacaactgccatgatgtactcgcgagaggtgctgagtttctgaagtggtcgaagactggtgatttgcattggagaaatgtttttatataccttaacaaagttggtcaggttactgtaaggcttcaaagcaaacatatgaggggcgcactcacgaagaacaaaaagagtattatatttcaagtcttttccaatattcgagcttggccaggtaggaacattttggagggcagcgaaaatcgccgatactttgctctcaggacttctagtggagacatggaatttgagtgtcggaacaaggaggaacatcaagtctggacagagggcatatcacgcctcttgtacatctcaagccaatgccgtcgaagataa

SEQ ID NO: 1651 - protein, 400 aa, Physcomitrella patens subsp. patens
MEFLSRSWSISSVDVARSLQLKSQHSHGSLRALEPGSQHTSLEDPTLCAPFTFASTLTSQMVMDRLMAPGSSSEPSPFVSRRNSYSSGSLALLSPPVSPRTVEDYKFRRSFSMMKAPLSGRSMSRWIKDLKTKKKEATRCQNAQVHAAVSVAGVAAAIAAVTAATAASAQEDSSKTSMAVASAAALVAAQCVEVAESIGADRDHMASIVSSAVNVRSAGDILTLTASAATSLRGAATLRARRMKEARSLAAVTPYERAAICPSITFGGQDTENESETEYNCHDVLARGAEFLKWSKTGDLHWRNVFIYLNKVGQVTVRLQSKHMRGALTKNKKSIIFQVFSNIRAWPGRNILEGSENRRYFALRTSSGDMEFECRNKEEHQVWTEGISRLLYISSQCRRR

SEQ ID NO: 1652 - DNA, 1143 bp, Vitis vinifera
  CDS (1)..(1143)
atggagggtggtcagttttgggggcagaagatgggtaatttgcatgatctagagcacgcagaggatggtggtgagctgaaactgtggtcacaatttccatccatccctcaacctcaaacgccgaaggagccaatggagttcttgtccagatcctggagcctttctgctctggaaatttcaaaagctcttaaagagaagcagtgtgttcttgaaaaaaatcccagcataatcccagaaatggttgctgcaccacagcttacaggaaaggttatgaactgggttaatactcgaagaacagtatcaataggtaaatggttccaccacaaggagttgggaagtagcggggtgaagaagaaagataggatgcgggtggagaatgcccgggtgcatgccaccatgtctgttgctggactggctgcagccttggcttcagcggctgcagcagagaactccagtggatcaggctcgaaaatgagagcggctttggcatcagccacagaactcctggcatcacattgcattgagatcgctgaatcagcaggagctgatcacgatcggttggcatcggttgtcagatcagcagtggatattcaaagtcctggtgatctaatgactctcactgctgcagctgcaacagctttgagaggagaagcagccctgaaagtaagattgcagaaagaaacaagaaaaaatgcaagtataagtccctatgaagctccttttgttgctgatttccacagtgaaatggaagaacaggatcctccctgcacaggtgaactacagcagcacacacaaaagggagtgcttcggtggaagcgtgtcactatctatatcaataagaaatcacaggtaatagttaagctcaaaagcaaacatgttggaggagccttctccaaaaagaataaatgtgttgtttatggagtctgcaatgagaccgctgcatggcccttcagaaaagaaagagaaaacatcgaagcctattttggactgaaaactgcacagggttttctagagtttaagtgcaagagcaagatccataagcagacctgggttgatgggattcagaatctcctccgtcgagtcagttgcattgaagccactgaacactccttggaaatcttaaatatcaataagagcatttga

SEQ ID NO: 1653 - protein, 380 aa, Vitis vinifera
MEGGQFWGQKMGNLHDLEHAEDGGELKLWSQFPSIPQPQTPKEPMEFLSRSWSLSALEISKALKEKQCVLEKNPSIIPEMVAAPQLTGKVMNWVNTRRTVSIGKWFHHKELGSSGVKKKDRMRVENARVHATMSVAGLAAALASAAAAENSSGSGSKMRAALASATELLASHCIEIAESAGADHDRLASVVRSAVDIQSPGDLMTLTAAAATALRGEAALKVRLQKETRKNASISPYEAPFVADFHSEMEEQDPPCTGELQQHTQKGVLRWKRVTIYINKKSQVIVKLKSKHVGGAFSKKNKCVVYGVCNETAAWPFRKERENIEAYFGLKTAQGFLEFKCKSKIHKQTWVDGIQNLLRRVSCIEATEHSLEILNINKSI

SEQ ID NO: 1654 - DNA, 1197 bp, Vitis vinifera
  CDS (1)..(1197)
atgaaacttttgccagtgtctgtgggctcctgcggaggcttcaaatgcccttcacgtcgtctggaaaacatcgaggaagatgggcctgcgagttggctgccggagacatgtgcgccaccagaaactcccattgagtccatggagtttcttgctagatcatggagcctctcggccatggagctcgctaaggctcttgcagctgacaacctggacaagtactccgccttctgttcggttggcaatgaagctgaaattcatgttgcaagttctgtggcttcagaggaagctattattcaacaattaccaggtgggggtagccctccaatttctcctagggatagtgatgacatgaagctatataaaagcataatgagagggaaaacatttgggagatggttgaaagatcaaaaggagaggaagaagcaggagattagaactcacaatgcccagttgcatgcagcagtatccgttgcaggagttgctgctgctgttgcggcacttgctgcatcaaatgcggcatcgcctgaagtcttggccacccaacacaagaagccttccaaaacatctgctgcaattgcatctgcagcagcgttagtggcatcccattgcattgaaattgctgaggacatgggagctgatcatgaccacatcttaatggctgttaactcagcagttaatgccaggactaatggcgatatcatgactctaacagctggagcagctactgccttacgtggagctgccactctaagggcaaggctgcaaaaggggtgcggaactgcaacccttgttctttctgaggaacagattgaggaaggcagagaatcaaacatcttgattgcactgaactttgtctctaggggaggagaacttcttaaacgcactaggaaaggagcactccactggaagcaagtttctttcaacatagattcatgttggcaggtggcagttaaaatgaaaagcaagcatatggcaggaacatttacaaaaaagaagaaatgtgtagtctctggagtctattgtgacattccagcatggccggggagggagagggaagagagcagcgagcagagggcttactttgggataaaaacagatgacaggataatagaatttgaatgcagaaataacagtgataaacaaatgtgggctgaagggatccagtatatgttgcactgccgggctagcatgatatga

SEQ ID NO: 1655 - protein, 398 aa, Vitis vinifera
MKLLPVSVGSCGGFKCPSRRLENIEEDGPASWLPETCAPPETPIESMEFLARSWSLSAMELAKALAADNLDKYSAFCSVGNEAEIHVASSVASEEAIIQQLPGGGSPPISPRDSDDMKLYKSIMRGKTFGRWLKDQKERKKQEIRTHNAQLHAAVSVAGVAAAVAALAASNAASPEVLATQHKKPSKTSAAIASAAALVASHCIEIAEDMGADHDHILMAVNSAVNARTNGDIMTLTAGAATALRGAATLRARLQKGCGTATLVLSEEQIEEGRESNILIALNFVSRGGELLKRTRKGALHWKQVSFNIDSCWQVAVKMKSKHMAGTFTKKKKCVVSGVYCDIPAWPGREREESSEQRAYFGIKTDDRIIEFECRNNSDKQMWAEGIQYMLHCRASMI

SEQ ID NO: 1656 - DNA, 1125 bp, Populus trichocarpa
  CDS (1)..(1125)
atgctagaatatttagaggaggaccaagagctgaaacctgcatcttcactgccagcgattcctcaaccacagacaccaagagagcctatggagttcttatcaagatcctggagtctctctgcttcagaaatctcaaaagctctggctcagaagcagaaagagtttttcactgaaaagaatcccgatacatttccagagacaattgtggcacaacaatcatcagggaaggtggtaaattcaaaaggaggttcaaggacaggatcaataggaaaatggttccaccacaaggaattcagtagcagtgcagtgaagaagaaagacaaagcacgcacggaaaatgcgcatatgcattctgctgtatctatagccggactagctgcggcattggctgccgtgacagctgccggaaattccagtggttccagctccaaaatgagcatggctttggcctcagctgcagaactccttgcatcacattgcatagaattatcagaatcagccggagctgatcatgattgtgtggcttctgttgtgagatcagcagtagatattcaaagtccaggtgatctaatgacccttaccgccgccgcggcaacagctttgagaggagaagcagctttaaaatcaagattaccaaaagaagcaagaaggaatgctgctataagtccttatgataggggggtggcggatactcactggacttcttcttcaaatggtccaatagaagaacagggtcctccctgtgttggtgaactcttgcaacacacaaagaaaggagtgatgcgatggaaacatgtcaccgtgtacatcaacaagaaatcccaggtcctaattaagatcaaaagcaaacacgtaggaggagccttgtccaagaagcaaaaaggtgttgtttatggagtctgtgatgagacaacagcatggccatatagaaaagaaagggaaactggtactgaggaagtctatttcggcattaaaacagcacaaggtctactggagttcaagtgcaagaacaaaattcacaagcagaggtgggttgatggtatacagagtcttcttcgacaagtcagcagtgttgaagaaactgaccactccctgacatgtttaagcataaacgatggtgcctag

SEQ ID NO: 1657 - protein, 374 aa, Populus trichocarpa
MLEYLEEDQELKPASSLPAIPQPQTPREPMEFLSRSWSLSASEISKALAQKQKEFFTEKNPDTFPETIVAQQSSGKVVNSKGGSRTGSIGKWFHHKEFSSSAVKKKDKARTENAHMHSAVSIAGLAAALAAVTAAGNSSGSSSKMSMALASAAELLASHCIELSESAGADHDCVASVVRSAVDIQSPGDLMTLTAAAATALRGEAALKSRLPKEARRNAAISPYDRGVADTHWTSSSNGPIEEQGPPCVGELLQHTKKGVMRWKHVTVYINKKSQVLIKIKSKHVGGALSKKQKGVVYGVCDETTAWPYRKERETGTEEVYFGIKTAQGLLEFKCKNKIHKQRWVDGIQSLLRQVSSVEETDHSLTCLSINDGA

SEQ ID NO: 1658 - DNA, 1158 bp, Populus trichocarpa
  CDS (1)..(1158)
atggaaagtgggctttattcttcttttaaaagtagttctttgctagattatttagaggcggaccaggagatgaaaccagcatcttcactgccaacaatccctcaaccaaagacaccaagagagcctatggagttcttgtctagatcctggagtctctctgcttcagaaatttcaaaagctctagctcagaagcagaaacaatttttcactgaaaagaattccgatacatttgcagagataattgtggcaccacaagcatcagggaaggtggtaaactctaatagtccaaggactggatcattaggaaaatggttccaccacaaggaattcagcagtcgtgcagtgaagaagaaagacaaagcacgcaccgaaaatgctcatatgcattctgctgtatctatagccggactagctgcagccttggctgcggtgaccgctgcaggaaattctagtggctccagctccaaaatgaacatggctttggcctcagctacagaactcctcgcatcacattgcatagaattagcagaatcagctggagctgatcatgatcgtatggcttctgttgtgagatcagcagtagatattcaaagtccaggtgatctaatgacccttactgcagcagcagcgacagctttgagaggagaagcaactttaaaagcaagattaccaaaagaagcaagaaggaatgctgctataagtccttatgataggggggtggcaaacactccttactggacttctttaaatggtccattagaagaacggggtcctccctgtgttggtgaactgttgcaacacacaaagaaaggggcgttgcgatggaaacatgtcaccgtgtacatcaacaagaaatctcaggtcctaattaagatcaaaagcaaacacgttggaggagccttgtccaagaagcacaaaggtgttgtttatggagtttgtgatgagacaacagcatggcgttatataaaagaaagagtaagtactgaagaagtgtatttcggcattaaaacagcacaaggtctgcatgagttcgagtgtaaaagcaaagttcacaagcagaggtgggttgatgatataaaaaatctcctgcaacaagtaagttatgtggaagtaactgaccgctcactgaaatgcttaagcataaacgatggcgcatag

SEQ ID NO: 1659 - protein, 385 aa, Populus trichocarpa
MESGLYSSFKSSSLLDYLEADQEMKPASSLPTIPQPKTPREPMEFLSRSWSLSASEISKALAQKQKQFFTEKNSDTFAEIIVAPQASGKVVNSNSPRTGSLGKWFHHKEFSSRAVKKKDKARTENAHMHSAVSIAGLAAALAAVTAAGNSSGSSSKMNMALASATELLASHCIELAESAGADHDRMASVVRSAVDIQSPGDLMTLTAAAATALRGEATLKARLPKEARRNAAISPYDRGVANTPYWTSLNGPLEERGPPCVGELLQHTKKGALRWKHVTVYINKKSQVLIKIKSKHVGGALSKKHKGVVYGVCDETTAWRYIKERVSTEEVYFGIKTAQGLHEFECKSKVHKQRWVDDIKNLLQQVSYVEVTDRSLKCLSINDGA

SEQ ID NO: 1660 - DNA, 1266 bp, Oryza sativa subsp. indica
  CDS (1)..(1266)
atgaggaggagggatcacctgctgctcatggatgctgctcctcctccggcggcggtggcggcggcggtgcagacgctgatggagcccatggagttcctgtcccggtcgtggagcgtgtccgcgtcggacatatccagggtgctcaccggcggcgtcggcgcgaggcggagcaccaacttcgtagtggatcgcctctccgggatgctcatgccggagacgctcgcgctcgccgccgcctccagcacaaacctgagcccccgcaaacgcgtaagatcatccgcgattggatggagagtgcgagaggtttttttgcgagatgatctgatccggagttcgtctttctgcgtgcagtattccaggtgcaggagcgccatctccgcgcaccagcacacgatcgggaggtggttctaccacagggacgggagcagcagcagcagcagcagcagggtcgacaaggcccgcgccgagcgggcgcgcgtgcacgccgcggtcaccgtggcgagcgtggcggccgccgtcgcggccgtggcctccggcgcggcgaacgacccggacgacctcgacgacgccaagatggacgccgcgctggcgtccgccacacagctgctggcctcgcactgcatcgagatcgccgagctcgccggcgccgaccacgaccaggtcgcctccgcggtggaggccgccgtcgacgtgcggagccccggcgatctcatgaccctgaccgcctccgcagccacagctctgagaggagcgacggcgctgaggctgagagcgcagcgggaggcgaggagcaaggcggcggcggtggcgccctacgagaagaccggcagctgccgcggcgacatatggtgcaaggaagggacgctcctgaaacgcagccggaaaggcgctttgcaccggaagcgcgtggccgtctacatcaacaagaagtcgcaggtgatcatgaaactgaagagcaagcacatcggcggcgccttctccaagaagaagaagagcgtcgtgtacggcgtcgacgacgacgtgcaggcgtggccggcgccgcacgcgtgcggcggcggcgccgtgcctcctgctccggagacggcgtcgtcggagaagtgccagttcgggctgaggacggcgcagggcgtggtcgagttccagtgcgagagcagggcgcagaagcaggactgggtggagtcggtgaagaatctgctccggcaggcggccggcgggacggctcagctcgagcactccttcgaatctctccggcttagcgcctcgtaa

SEQ ID NO: 1661 - protein, 421 aa, Oryza sativa subsp. indica
MRRRDHLLLMDAAPPPAAVAAAVQTLMEPMEFLSRSWSVSASDISRVLTGGVGARRSTNFVVDRLSGMLMPETLALAAASSTNLSPRKRVRSSAIGWRVREVFLRDDLIRSSSFCVQYSRCRSAISAHQHTIGRWFYHRDGSSSSSSSRVDKARAERARVHAAVTVASVAAAVAAVASGAANDPDDLDDAKMDAALASATQLLASHCIEIAELAGADHDQVASAVEAAVDVRSPGDLMTLTASAATALRGATALRLRAQREARSKAAAVAPYEKTGSCRGDIWCKEGTLLKRSRKGALHRKRVAVYINKKSQVIMKLKSKHIGGAFSKKKKSVVYGVDDDVQAWPAPHACGGGAVPPAPETASSEKCQFGLRTAQGVVEFQCESRAQKQDWVESVKNLLRQAAGGTAQLEHSFESLRLSAS

SEQ ID NO: 1662 - DNA, 1134 bp, Oryza sativa subsp. japonica
  CDS (1)..(1134)
atggccatggagagagcttggaagccaagggaaattgctgacacttttggcattgagatggatgaagaggaggctgcggctgcggcgataccgcctccgcagacgccattggagcccatggagtacctgtcgaggtcatggagcgtgtcagcgtcagagatatccaagatccttttcaacgggagcaagaagagctttgccgccaagcgtctgccggagatgaccataccggaaaactctgtggtcgctgcgtccattgttcccagccatctgcaacatacacaagaaggaattcaatcagcagccaccacctgccaattgggaggtggttcaacacaggaggcaagccgggtcaagcagagcagcaaagagaagctgcgagccgagaaggcccatgtacacgccatggtgtcggtggcccgggtcgcagctgccgttgctgcggttaccgcggccaccacgagctcagatatccagacctccaagatggccgcggccatggtgtcggccaccgagctattggcttcgcactgcgtggagatcgcgcagcacgcgggggcacgccatgagcaggtggcctgtgccatccagtctgcagttggtgttagaagctctggtgatctgatgacactcacagcagcagcagctactgctcttcgaggagccgcaacaatgaagcagagagtgcagcgagagatgagaagcaatgcgagtgttcttccgtatgagaagggtcactcatggagtcctgacatctggtgcaaggagggggagttactgaaacgcacaagaaaaggagatttacacaagacacgagtatctatatacatcaacaagaggtcacaggtcatattgaagttgaagagtaaacacataggaggagcactatcaaagaagaacaagagtgtggtttttggtgtgtacaacgagcttcccacatgggttgaggcagggaaacatttcacagaggagagatgctgctttggcctgagcacggcacaaggtctggtagagtttgagtgtgagaacagcacaagtaaacagaggtgggtcgatgatgtgaagaatctgcttcggcaggtcgctgcagaagagcaagtggaaaataagttgggatcagtgaagctcagttga

SEQ ID NO: 1663 - protein, 377 aa, Oryza sativa subsp. japonica
MAMERAWKPREIADTFGIEMDEEEAAAAAIPPPQTPLEPMEYLSRSWSVSASEISKILFNGSKKSFAAKRLPEMTIPENSVVAASIVPSHLQHTQEGIQSAATTCQLGGGSTQEASRVKQSSKEKLRAEKAHVHAMVSVARVAAAVAAVTAATTSSDIQTSKMAAAMVSATELLASHCVEIAQHAGARHEQVACAIQSAVGVRSSGDLMTLTAAAATALRGAATMKQRVQREMRSNASVLPYEKGHSWSPDIWCKEGELLKRTRKGDLHKTRVSIYINKRSQVILKLKSKHIGGALSKKNKSVVFGVYNELPTWVEAGKHFTEERCCFGLSTAQGLVEFECENSTSKQRWVDDVKNLLRQVAAEEQVENKLGSVKLS

SEQ ID NO: 1664 - DNA, 1161 bp, Vitis vinifera
  CDS (1)..(1161)
atggagtttcttgctagatcatggagcctctcggccatggagctcgctaaggctcttgcagctgacaacctggacaagtactccgccttctgttcggttggcaatgaagctgaaattcatgttgcaagttctacaaagatagagctacttttcaagtataatctttataatcttgtgtcacagattattcaacaattaccaggtgggggtagccctccaatttctcctagggatagtgatgacatgaaggaattatttctacttcatcaggcgctaaacccggatttcctatcaaatcaacagttactcagaaatgggctatataaaagcataatgagagggaaaacatttgggagatggttgaaagatcaaaaggagaggaagaagcaggagattagaactcacaatgcccagttgcatgcagcagtatccgttgcaggagttgctgctgctgttgcggcacttgctgcatcaaatgcggcatcgcctgaagtcttggccacccaacacaagaagccttccaaaacatctgctgcaattgcatctgcagcagcgttagtggcatcccattgcattgaaattgctgaggacatgggagctgatcatgaccacatcttaatggctgttaactcagcagttaatgccaggactaatggcgatatcatgactctaacagctggagcagctactgccttacgtggagctgccactctaagggcaaggctgcaaaaggggtgcggaactgcaacccttgttctttctgaggaacagattgaggaaggcagagaatcaaacatcttgattgcactgaactttgtctctaggggaggagaacttcttaaacgcactaggaaaggagcactccactggaagcaagtttctttcaacatagattcatgttggcaggtggcagttaaaatgaaaagcaagcatatggcaggaacatttacaaaaaagaagaaatgtgtagtctctggagtctattgtgacattccagcatggccggggagggagagggaagagagcagcgagcagagggcttactttgggataaaaacagatgacaggataatagaatttgaatgcagaaataacagtgataaacaaatgtgggctgaagggatccagtatatgttgcactgccgggctagcatgatatga

SEQ ID NO: 1665 - protein, 386 aa, Vitis vinifera
MEFLARSWSLSAMELAKALAADNLDKYSAFCSVGNEAEIHVASSTKIELLFKYNLYNLVSQIIQQLPGGGSPPISPRDSDDMKELFLLHQALNPDFLSNQQLLRNGLYKSIMRGKTFGRWLKDQKERKKQEIRTHNAQLHAAVSVAGVAAAVAALAASNAASPEVLATQHKKPSKTSAAIASAAALVASHCIEIAEDMGADHDHILMAVNSAVNARTNGDIMTLTAGAATALRGAATLRARLQKGCGTATLVLSEEQIEEGRESNILIALNFVSRGGELLKRTRKGALHWKQVSFNIDSCWQVAVKMKSKHMAGTFTKKKKCVVSGVYCDIPAWPGREREESSEQRAYFGIKTDDRIIEFECRNNSDKQMWAEGIQYMLHCRASMI

SEQ ID NO: 1666 - DNA, 1269 bp, Ricinus communis
  CDS (1)..(1269)
atgagaactttcaaccaaaaccacagtgcggaggagtctgaaccaagtgggaatagcaagctcagaatgagctctagcagcacaaagagcttatcgaagaagcttgagaacattgatgaaaatggtcctgctctttggcagccagtgccatgtgatgctcctgaaactcctaccgagtccatggagtttcttgctagatcatggagtgtttctgccgtagagctctctaaagctctttccaatactcatgctacttgtgacaacgccgacaagctacctttttcttcttctgaaactgttgcagctcccaaagactccttgcttcagcagtttccgaattacagtgctggtagccctccaatatccccaagagatagtgaagaaatgaagctatacagaagcatattgaaagggagaacaatgggaagatggttgaaggatcaaaaggagaggaagaagcaggagatcagaactcataatgctcaactgcatgcagctgtctctgtagcagggcttgctgcggccattgctgcactagccgcctccaatgccatgtcagcagaaatggcagcaacctgccagaagacatcttccaaaacatcagctgcaatggcctcagcagcagctctagtagcatctcactgcattgagcttgcggaagatatgggagccaatcatgatcaaatcttaacagttgtcaactctgccgttaatgcaaggagtagtggagatatcatgaccctaacagctggagcagctacagcattacgaggtgctaacactttaaaagcgagtttccaaaagggttacataactacggcttttgccctggtggaagaaaaaagtgaagagggcaaagaatctaacatcttggcagcattgaactttgtgaccagagggggagaacttctcaagcgtacaaggaaaggagctctccattggaagcaagtttcttttaacatcaactcaacctggcaggtggtagctaaattgaaaagcaagcatatggcaggaacattcacaaaaaagaagaagtgtgtagtctctggagtatacagtgacatcccagcgtggcctggaagggagagagaagactgcaacgagcaaagagcttactttgggatcaaaacagctgagagagttatagagtttgaatgcagaagtaaaggtgaaaaactcatatggactgagggaattcagcaaatgttgagttgccgtgccaatttaaaatatgagacaacttccaattgcttcaaaactagtctttga

SEQ ID NO: 1667 - protein, 422 aa, Ricinus communis
MRTFNQNHSAEESEPSGNSKLRMSSSSTKSLSKKLENIDENGPALWQPVPCDAPETPTESMEFLARSWSVSAVELSKALSNTHATCDNADKLPFSSSETVAAPKDSLLQQFPNYSAGSPPISPRDSEEMKLYRSILKGRTMGRWLKDQKERKKQEIRTHNAQLHAAVSVAGLAAAIAALAASNAMSAEMAATCQKTSSKTSAAMASAAALVASHCIELAEDMGANHDQILTVVNSAVNARSSGDIMTLTAGAATALRGANTLKASFQKGYITTAFALVEEKSEEGKESNILAALNFVTRGGELLKRTRKGALHWKQVSFNINSTWQVVAKLKSKHMAGTFTKKKKCVVSGVYSDIPAWPGREREDCNEQRAYFGIKTAERVIEFECRSKGEKLIWTEGIQQMLSCRANLKYETTSNCFKTSL

SEQ ID NO: 1668 - DNA, 1161 bp, Ricinus communis
  CDS (1)..(1161)
atgggaagtaggtttttttcagctgggaaggatggttctttgctagattatttagaggaagatcgagaacagaaactggcgtcgtcaatgccagcaattcctcaaccacaaacaccgaaagaaccaatggagttcttatctagatcctggagtctatctgcttccgaaatttcgaaagctctagctcagaaacagagacaatttttcattgacaagcaaccaaatatatttccagatacaattgttcctccccagttttcgggaaagatgataaattcaataaattcaagaaagacaggatcgatagggaagtggttccaccacaaggagcttagcagtagcacagtgaagaagaaagataaggcgcgtatggaaaatgcccatatgcattctgctatatccgttgccggactggccgcagccttggctgctgttgctgcttcaggaaactctggtgattctggatcaaaaatgggtatggctttggcctcagctacagaactcctggcatcacattgcatagagttagcagaatcagctggagctgatcatgatcgtgtagcttctgttgtgagatcagcagttgacattcatagtcctggtgatctaatgacccttactgcagctgctgcaacagctttgagaggagaagcagcattgagagcaagattgcccaaagaagcaaaaaagaatgctgctataagtccttgtgataggggaatggctgatacttcttgggattctgcttacagtagtggtgaagtagaagcacaggcacctccctgcaatggagaactaatgcaacacacaagaaaaggagtgttacgatggaaactcatctctgtctacatcaacaagaaatcagaggttataattaagataaaaagcaaacatgtcggaggagctttctccaagaagcacaaatgcattgtttatggggtctgcgacgagactacagcatggccatacagaaaagaaagggaaagttctgaagatgtttattttgggctcaagactgcacagggtcttctagagttcaagtgcaaaaacaagatacataagcaaagatgggttgatgggattcaaaatcttcttcaagtcagctgcgtagaagcaactgaaggctctctggaatttctaagcataaacgatagcatatag

SEQ ID NO: 1669 - protein, 386 aa, Ricinus communis
MGSRFFSAGKDGSLLDYLEEDREQKLASSMPAIPQPQTPKEPMEFLSRSWSLSASEISKALAQKQRQFFIDKQPNIFPDTIVPPQFSGKMINSINSRKTGSIGKWFHHKELSSSTVKKKDKARMENAHMHSAISVAGLAAALAAVAASGNSGDSGSKMGMALASATELLASHCIELAESAGADHDRVASVVRSAVDIHSPGDLMTLTAAAATALRGEAALRARLPKEAKKNAAISPCDRGMADTSWDSAYSSGEVEAQAPPCNGELMQHTRKGVLRWKLISVYINKKSEVIIKIKSKHVGGAFSKKHKCIVYGVCDETTAWPYRKERESSEDVYFGLKTAQGLLEFKCKNKIHKQRWVDGIQNLLQVSCVEATEGSLEFLSINDSI

SEQ ID NO: 1670 - DNA, 1251 bp, Arabidopsis thaliana
  CDS (1)..(1251)
atggagtatgaccgtacgttgaacttgattccatacggactacaaggagtaagagaggaggaagaaatcgaagaagacgatgaagagagcatgacgttgtcgtcagtaccagaaaacgaaacgtcggagtgttcttcgcctccggcgacgtatcctccaatccctcctcggcctaaaacaccgagagagccgatggagtttctatgcagatcatggagtctttctacttctgagatctctttagctttatcatctcagaaatctgataaacaactcaacaaaaaccctaatatttctcagttggccgatgtcacttctctggctccggtagcaccaccaccgccgctacaaacgggaaagctagcgagtgcggttcacgcgcggagaacgggaacgatcggaaaatggttccaccaccgagaattcgtcggcgggaaggtctccgccgtaaagaagagagatagagttcgcgtggagaaagctcatctgcattccgccgtgtccattgcgtctctggcgacggcaatcgccgcagtgaccgcttcaggcaatcaagacggcttcgctggatcaaagatgagctcagcccttgcctcggcgtcggagttgttagcttctcactgcctcgaattggcggagcttgccggcgccgatcacgatcgcgtcgtctctgctgtccgatcagctgttgatgttcgtggacctggcgatttgttgactctaactgctgcagctgcaacagcattgagaggagaagcagctttgagggtaagactaccaaaggaagctaagaacagtgcagctataagcccctgtgagagagttttaccagagactcatagttgctcttctgagctcgatcgcactagcacgaccgatgaactcatatctgcaaaaggagttgaagaatcaactggagagctaatgcagtgcacacgaaacggtaatgtttcagtcatagtagaaatcaaaagcaaacacgttgtaggagcattctccatgaaaagcaaaggcattgtaaatgatgtatgcgagacagtctcaggcctgcaaaatggaaaagacacggaaaacacagaagaagagctctatttcggaatcggtacagggaaaggtctgacaaagttcaagtgcaagagcaaggctgataagcagacatgggtggatagcatccggaatcttctccatcgagtaactgctgttgaggtcgacacttctcttgaaactataaacattaacgatagcacataa

SEQ ID NO: 1671 - protein, 416 aa, Arabidopsis thaliana
MEYDRTLNLIPYGLQGVREEEEIEEDDEESMTLSSVPENETSECSSPPATYPPIPPRPKTPREPMEFLCRSWSLSTSEISLALSSQKSDKQLNKNPNISQLADVTSLAPVAPPPPLQTGKLASAVHARRTGTIGKWFHHREFVGGKVSAVKKRDRVRVEKAHLHSAVSIASLATAIAAVTASGNQDGFAGSKMSSALASASELLASHCLELAELAGADHDRVVSAVRSAVDVRGPGDLLTLTAAAATALRGEAALRVRLPKEAKNSAAISPCERVLPETHSCSSELDRTSTTDELISAKGVEESTGELMQCTRNGNVSVIVEIKSKHVVGAFSMKSKGIVNDVCETVSGLQNGKDTENTEEELYFGIGTGKGLTKFKCKSKADKQTWVDSIRNLLHRVTAVEVDTSLETININDST

SEQ ID NO: 1672 - DNA, 1152 bp, Arabidopsis thaliana
  CDS (1)..(1152)
atggaggaagagttggaagatggagttcttagagctgaagagcttttctcatcgattcctcaacctcagacacctaaagagccaatggagtttctgtctagatcctggagtctctctacttctgaaatctccaaagcacttgctctcaaacatagacaacaacaagatcagttttgtgttggccagaacagtcctcctgttttgttccctgatgctgctgcagatccactcgtggctgggaagatcatgaactctgttggcacacgtagagcagggacattgtctaaatggtttcaccacaacaaggaacacagcaccagcagtactactaccaatctcaagaagaaagataaagtgcgtgtggagaacgcccacgtgcattctgccgtctctatagcggctctggctgcaggtttagcctctgtgacatctgctagcaattgcaaagggtcaggctccaagatggcactggctttagcctcagccactgaactgttggcctcacactgtgttgagatggctgagcgagccggtgctgaccatgcacgtgttacttccacggttagatcttctgtggatatccacagccccggtgatctcatgactctaacagccgctgctgcaactgctttgagaggagaagcggctctgaaggcgaggcagccaaaggaagcaaggaaaaatgcagctattaccccttttgagagaagtttctctgattctcattggcatgcaaattttcagtatagattggaagaaccaaatcttccatttgaaggcgaactgatgcaatgtgcacgaaatggagtgcagcgaactaagcgtgtctgtgtctatatcaacaagaagtctcaggtaatgatcaaactcaaaagcaaacatgttggaggggcattctctaagaaaatcaaatgcgttgtctatggagtctgcgatgagaaatcagcttggccttacaggaaagagagggaaaattcagaagaagtctacttcggtctgaaaaccggacaaggtcttttggagttcaagtgcaagagcaagattcacaagcagagatgggttgatggggttcagtctcttctccgccaagtaaattgctttgaggctgccaaatgctcgctgggatctctgaatctcactggtcacacgtga

SEQ ID NO: 1673 - protein, 383 aa, Arabidopsis thaliana
MEEELEDGVLRAEELFSSIPQPQTPKEPMEFLSRSWSLSTSEISKALALKHRQQQDQFCVGQNSPPVLFPDAAADPLVAGKIMNSVGTRRAGTLSKWFHHNKEHSTSSTTTNLKKKDKVRVENAHVHSAVSIAALAAGLASVTSASNCKGSGSKMALALASATELLASHCVEMAERAGADHARVTSTVRSSVDIHSPGDLMTLTAAAATALRGEAALKARQPKEARKNAAITPFERSFSDSHWHANFQYRLEEPNLPFEGELMQCARNGVQRTKRVCVYINKKSQVMIKLKSKHVGGAFSKKIKCVVYGVCDEKSAWPYRKERENSEEVYFGLKTGQGLLEFKCKSKIHKQRWVDGVQSLLRQVNCFEAAKCSLGSLNLTGHT

SEQ ID NO: 1674 - DNA, 1218 bp, Arabidopsis thaliana
  CDS (1)..(1218)
atggaaagtggcttttattcagattggaaagatacttcttcttcttcgttctttggatcagagaatatggaggaagagttggaagatggagttcttagagctgaagagcttttctcatcgattcctcaacctcagacacctaaagagccaatggagtttctgtctagatcctggagtctctctacttctgaaatctccaaagcacttgctctcaaacatagacaacaacaagatcagttttgtgttggccagaacagtcctcctgttttgttccctgatgctgctgcagatccactcgtggctgggaagatcatgaactctgttggcacacgtagagcagggacattgtctaaatggtttcaccacaacaaggaacacagcaccagcagtactactaccaatctcaagaagaaagataaagtgcgtgtggagaacgcccacgtgcattctgccgtctctatagcggctctggctgcaggtttagcctctgtgacatctgctagcaattgcaaagggtcaggctccaagatggcactggctttagcctcagccactgaactgttggcctcacactgtgttgagatggctgagcgagccggtgctgaccatgcacgtgttacttccacggttagatcttctgtggatatccacagccccggtgatctcatgactctaacagccgctgctgcaactgctttgagaggagaagcggctctgaaggcgaggcagccaaaggaagcaaggaaaaatgcagctattaccccttttgagagaagtttctctgattctcattggcatgcaaattttcagtatagattggaagaaccaaatcttccatttgaaggcgaactgatgcaatgtgcacgaaatggagtgcagcgaactaagcgtgtctgtgtctatatcaacaagaagtctcaggtaatgatcaaactcaaaagcaaacatgttggaggggcattctctaagaaaatcaaatgcgttgtctatggagtctgcgatgagaaatcagcttggccttacaggaaagagagggaaaattcagaagaagtctacttcggtctgaaaaccggacaaggtcttttggagttcaagtgcaagagcaagattcacaagcagagatgggttgatggggttcagtctcttctcggccaagtaaattgctttgaggctgccaaatgctcgctgggatctctgaatctcactggtcacacgtga

SEQ ID NO: 1675 - protein, 405 aa, Arabidopsis thaliana
MESGFYSDWKDTSSSSFFGSENMEEELEDGVLRAEELFSSIPQPQTPKEPMEFLSRSWSLSTSEISKALALKHRQQQDQFCVGQNSPPVLFPDAAADPLVAGKIMNSVGTRRAGTLSKWFHHNKEHSTSSTTTNLKKKDKVRVENAHVHSAVSIAALAAGLASVTSASNCKGSGSKMALALASATELLASHCVEMAERAGADHARVTSTVRSSVDIHSPGDLMTLTAAAATALRGEAALKARQPKEARKNAAITPFERSFSDSHWHANFQYRLEEPNLPFEGELMQCARNGVQRTKRVCVYINKKSQVMIKLKSKHVGGAFSKKIKCVVYGVCDEKSAWPYRKERENSEEVYFGLKTGQGLLEFKCKSKIHKQRWVDGVQSLLGQVNCFEAAKCSLGSLNLTGHT

SEQ ID NO: 1676 - DNA, 1233 bp, Brassica oleracea
  CDS (1)..(1233)
atggagagtggtgggttttattcagattggaaggatacttcatcttccttgtttggatcagagaacatggatgaagacagagttctcagagctgaagagctgttctcatctatccctcagcctcagacaccaaaagagccaatggagtttctgtctagatcctggagtctctctacttctgaaatagccaaagcacttgcactcaaacatagacaacaacaagagcaagaccaacagttctgtgttgctcaaaacactcctcctgtcttgttccctgatgctgctgcagatccactcgtggctgggaagatcatgaactcgtttggcacacgcaagggagggacattgtcaaaatggtttcaccaccataaggaacatagcagcagtagctgtagcagcaacaccatcaactatctcaagaagaaagacaaggcgcgcgttgagaatgcacacgtgcattccgctgtctctatagctgctctggctgcaggtgtagcctctgtgacatctgcaagcaacagcaaaggctcaagctccaagatggctctggctttggcctcagccaccgagcttttagcctcacactgcgttgagatggctgagcgagcaggtgctgaccgcgcgcgtgttgcttccacggttaggtcatctgtggatatccacagtcctggtgatctcatgactcttacagccgctgctgcaacagctttgagaggagaagcggcgctgaaggcgagacagccaaaggaagcaaggaaaaatgcatctattgcacctttcgagagaagcttctctgactctcattggccttcaaatattcagtttagattggaagaaccaaatcttccattagaaggcgaactgatgcaatgctcgcgacatggagtgcaacgaagtaagcgtgtctgtgtctatgtcaacaagaagtctcaggtaatgatcaaacttaaaagcaaacatgtaggaggagcattctcaaagaagatcaaaagcgttgtatatggagtctgcgatgagaaatcagcttggccatacaggaaagagagggaaaacaactcagaagaggtttactttggtctgaaaacaggacaagggcttttggagttcaagtgcaagaacaagattcacaagcagagatgggttgatggggtacagtgtcttctacgccaagtaaactgctttgaggctgccaagtgctcgctgggatctctgagtctcactagtaaaacgtga

SEQ ID NO: 1677 - protein, 410 aa, Brassica oleracea
MESGGFYSDWKDTSSSLFGSENMDEDRVLRAEELFSSIPQPQTPKEPMEFLSRSWSLSTSEIAKALALKHRQQQEQDQQFCVAQNTPPVLFPDAAADPLVAGKIMNSFGTRKGGTLSKWFHHHKEHSSSSCSSNTINYLKKKDKARVENAHVHSAVSIAALAAGVASVTSASNSKGSSSKMALALASATELLASHCVEMAERAGADRARVASTVRSSVDIHSPGDLMTLTAAAATALRGEAALKARQPKEARKNASIAPFERSFSDSHWPSNIQFRLEEPNLPLEGELMQCSRHGVQRSKRVCVYVNKKSQVMIKLKSKHVGGAFSKKIKSVVYGVCDEKSAWPYRKERENNSEEVYFGLKTGQGLLEFKCKNKIHKQRWVDGVQCLLRQVNCFEAAKCSLGSLSLTSKT

SEQ ID NO: 1678 - DNA, 1212 bp, Brassica oleracea
  CDS (1)..(1212)
atggaacgtggtgggttttatccagattggaaggatacttcttcttccttgtttggatcagagaacatggaggaagagctggaagaagagcttttctcatctattccacagcctcagacaccaaaagagcctatggagtttctgtcaagatcttggagtctctctacctctgaaatcgcaaaagcacttgcactgaaacatagacaacaacaagaacagcgttgtgttgcacaaaacaacactcatgttctgttccctgatgctgctgctgctgctgcacatccactcatgactgggaagattatgaactcgtttggcacacgtagagcagggacactatccaaatggtttcaccaccacagggaacatagcagcagtagcaacaccaccaactatctcaagaagaaagacaaggcgcgtgttgagaacgctcacgtgcactctgcagtatctatagcagctctagctgcaggtgtagcctcggtgacatccgcaagcaattgcaaagggtcaagctccaagatgactctggctttaggctcagccacagaactgttggcttcacactgtgttgagatggctgagcgagccggtgctgaccatgcacgtgttgcttccacggttaggtcatctgttgacatccacagccccggtgatctcatgactcttacagccgctgctgcaacggctttaagaggagaagcggctctgaaggcgagacagccaaaggaagcaaggaaaaacgcagctattacacctttcgagagaagcttctccaactctcattggcctgcaaactttcagtttagattggaagaaccaaatcttccacttgaaggcgaactgatgcaatgcgcgcgaaatggagtgcagagaactaagcgtgtatgtgtctatatcaacaagaagtctcaggttataatcaagctcaaaagcaaacatgttggaggtgcattctcaaagaagatcaaatgcattgtctatggagtctgcgacgagaaatcagcttggccttacaggaaagagagggaaaactcagaggaagtctactttggtctgaaaaccggacaaggccttttggagttcaagtgcaagagcaaagttcacaagcagagatgggttgatggggtagagtctcttctccgccaagtaaactgctttgaggctgccaagtgctcgctgggatctctaagtctcaccaatcacagatga

SEQ ID NO: 1679 - protein, 403 aa, Brassica oleracea
MERGGFYPDWKDTSSSLFGSENMEEELEEELFSSIPQPQTPKEPMEFLSRSWSLSTSEIAKALALKHRQQQEQRCVAQNNTHVLFPDAAAAAAHPLMTGKIMNSFGTRRAGTLSKWFHHHREHSSSSNTTNYLKKKDKARVENAHVHSAVSIAALAAGVASVTSASNCKGSSSKMTLALGSATELLASHCVEMAERAGADHARVASTVRSSVDIHSPGDLMTLTAAAATALRGEAALKARQPKEARKNAAITPFERSFSNSHWPANFQFRLEEPNLPLEGELMQCARNGVQRTKRVCVYINKKSQVIIKLKSKHVGGAFSKKIKCIVYGVCDEKSAWPYRKERENSEEVYFGLKTGQGLLEFKCKSKVHKQRWVDGVESLLRQVNCFEAAKCSLGSLSLTNHR

SEQ ID NO: 1680 - DNA, 1194 bp, Brassica oleracea
  CDS (1)..(1194)
atggaaggaaggtcctatttagattggaatgagagttctacatcgttatttggatcagagaatctggaggaagagttagaagtggtaactgtgagagctgaagaggttttctctcggattcctcaacctcagacaccaagcgagtcaatgaagtttctgtccagatcatggagtctatccgcttctgaaatctccaaagctctagctcacaaacagagacaacatcagagtctgtctactgtttcccataacagtcctaatctcttcttccaagattctgccgcaaacccactcatggcacggaagatcatgaactcaagtggcaaacgcaaatcagggaagttatcaaagtggtttcaccaaaaacaacacaccaacccaaacaccatgaggaatccgaagaggaaagacaaagcgcgtgtggagagagcccgtgtccactcagctgtgtccatcgcagctctggcagctgggttagcgtctgtgacatccaataaaagctgcggtaaagagtcaggctccatgatgacgctggctctagcctcagctaccgagctactagcttcacattgcattgagatggctgagcaagcaggtgctgatcgcgcatgtgttgctgctgcggttagatcttccattgatatccacagccctggtgatctcaccactctcacagcagcagctgcaactgctttgagaggagaagcggctttgaaggtgaggcagccaaaggaagcaaggaagaacgcgacgatcacaccttgtgagaggagcttctctgactctaactggactgcaaattgccagtttagattggatgaaccaagtcttcctttagagggagcccatcgacttaagcgagtttgtgtctatatcaacaacaagtctcaggtaatgatcaaactcaaaagcaaacacattggaggaacattctccaaaaagatcaaatgcgttgtttatggactctgcgacgagatatctgcatggccttacagtaaagatagagaagacaactcagaagaagtctattttggtcttaaaactggacagggtcttttggagttcaagtgcaagagtaagattcagaagcagagatgggttgctgggattcagtctactctccgccaagtaacttgtctagaagctgacaaatgctgtctcgaatctttgagcctcagtgatcgtatgcgatag

SEQ ID NO: 1681 - protein, 397 aa, Brassica oleracea
MEGRSYLDWNESSTSLFGSENLEEELEVVTVRAEEVFSRIPQPQTPSESMKFLSRSWSLSASEISKALAHKQRQHQSLSTVSHNSPNLFFQDSAANPLMARKIMNSSGKRKSGKLSKWFHQKQHTNPNTMRNPKRKDKARVERARVHSAVSIAALAAGLASVTSNKSCGKESGSMMTLALASATELLASHCIEMAEQAGADRACVAAAVRSSIDIHSPGDLTTLTAAAATALRGEAALKVRQPKEARKNATITPCERSFSDSNWTANCQFRLDEPSLPLEGAHRLKRVCVYINNKSQVMIKLKSKHIGGTFSKKIKCVVYGLCDEISAWPYSKDREDNSEEVYFGLKTGQGLLEFKCKSKIQKQRWVAGIQSTLRQVTCLEADKCCLESLSLSDRMR

SEQ ID NO: 1682 - DNA, 1206 bp, Oryza sativa subsp. japonica
  CDS (1)..(1206)
atggaagggcacatgttggggaggatgaggaggagggatcacctgctgctcatggatgctgctcctcctccggcggcggtggcggcggcggtgcagacgctgatggagcccatggagttcctgtcccggtcgtggagcgtgtccgcgtcggacatatccagggtgctcaccggcggcgtcggcgcgaggcggagcaccaacttcgtggtggatcgcctctccgggatgctcatgccggagacgctcgcgctcgccgccgcctccagcacaaacctgagcccccgcaaacgctattccaggtgcaggagcgccatctccgcgcaccagcacacgatcgggaggtggttccaccacagggacgggagcagcagcagcagcagcagcagggtcgacaaggcccgcgccgagcgggcgcgcgtgcacgccgcggtcaccgtggcgagcgtggcggccgccgtcgcggccgtggcctccggcgcggcgaacgacccggacgacctcgacgacgccaagatggacgccgcgctggcgtccgccacacagctgctggcctcgcactgcatcgagatcgccgagctcgccggcgccgaccacgaccaggtcgcctccgcggtggaggccgccgtcgacgtgcggagccccggcgatctcatgaccctgaccgcctccgcagccacagctctgagaggagcgacggcgctgaggctgagagcgcagcgggaggcgaggagcaaggtggcggcggtggcgccctacgagaagaccggcagctgccgcggcgacatatggtgcaaggaagggacgctcctgaaacgcagccggaaaggcgctttgcaccggaagcgcgtggccgtctacatcaacaagaagtcgcaggtgatcgtgaaactgaagagcaagcacatcggcggcgccttctccaagaagaagaagagcgtcgtgtacggcgtcgacgacgacgtgcaggcgtggccggcgccgcacgcgtgcggcggcggcgccgtgcctcctgctccggagacggcgtcgtcggagaagtgccagttcgggctgaggacggcgcagggcgtggtcgagttccagtgcgagagcagggcgcagaagcaggactgggtggagtcggtgaagaatctgctccggcaggcggccggcgggacggctcagctcgagcactccttcgaatctctccggcttagcgcctcgtaa

SEQ ID NO: 1683 - protein, 401 aa, Oryza sativa subsp. japonica
MEGHMLGRMRRRDHLLLMDAAPPPAAVAAAVQTLMEPMEFLSRSWSVSASDISRVLTGGVGARRSTNFVVDRLSGMLMPETLALAAASSTNLSPRKRYSRCRSAISAHQHTIGRWFHHRDGSSSSSSSRVDKARAERARVHAAVTVASVAAAVAAVASGAANDPDDLDDAKMDAALASATQLLASHCIEIAELAGADHDQVASAVEAAVDVRSPGDLMTLTASAATALRGATALRLRAQREARSKVAAVAPYEKTGSCRGDIWCKEGTLLKRSRKGALHRKRVAVYINKKSQVIVKLKSKHIGGAFSKKKKSVVYGVDDDVQAWPAPHACGGGAVPPAPETASSEKCQFGLRTAQGVVEFQCESRAQKQDWVESVKNLLRQAAGGTAQLEHSFESLRLSAS

SEQ ID NO: 1684 - DNA, 1290 bp, Arabidopsis thaliana
  CDS (1)..(1290)
  misc_feature (949)..(949): n is a, g, c or t
atggagtatgaccgtacgttgaacttgattccatacggactacaaggagtaagagaggaggaagaaatcgaagaagacgatgaagagagcatgacgttgtcgtcagtaccagaaaacgaaacgtcggagtgttcttcgcctccggcgacgtatcctccaatccctcctcggcctaaaacaccgagagagccgatggagtttctatgcagatcatggagtctttctacttctgagatctctttagctttatcatctcagaaatctgataaacaactcaacaaaaaccctaatatttctcagttggccgatgtcacttctctggctccggtagcaccaccaccgccgctacaaacgggaaagctagcgagtgcggttcacgcgcggagaacgggaacgatcggaaaatggttccaccaccgagaattcgtcggcgggaaggtctccgccgtgaagaagagagatagagttcgcgtggagaaagctcatctgcattccgccgtgtccattgcgtctctggcgacggcaatcgccgcagtgaccgcttcaggcaatcaagacggcttcgctggatcaaagatgagctcagcccttgcctcggcgtcggagttgttagcttctcactgcctcgaattggcggagcttgccggcgccgatcacgatcgcgtcgtctctgctgtccgatcagctgttgatgttcgtggacctggcgatttgttgactctaactgctgcagctgcaacagcattgagaggagaagcagctttgagggttagactaccaaaggaagctaagaacagtgcagctataagcccctgtgagagagttttaccagagactcatagttgctcttctgagctcgatcgcactagcacgaccgatgaactcatatctgcaaaaggagttgaagaatcaactggagagctaatgcagtgcacacgaaacggtgttntgcggtggaagcatgtaaaagtgtacatcaacaaaaaatctcaggtcatagtagaaatcaaaagcaaacacgttgtaggagcattctccatgaaaagcaaaggcattgtaaatgatgtatgcgagacagtctcaggcctgcaaaatggaaaagacacggaaaacacagaagaagagctctatttcggaatcagtacagggaaaggtctgacaaagttcaagtgcaagagcaaggctgataagcagacatgggtggatagcatccggaatcttctccatcgagtaactgctgttgaggtcgacacttctcttgaaactataaacattaacgatagcacataa

SEQ ID NO: 1685 - protein, 429 aa, Arabidopsis thaliana
  misc_feature (317)..(317): The Xaa at location 317 stands for Leu, Met, or Val.
MEYDRTLNLIPYGLQGVREEEEIEEDDEESMTLSSVPENETSECSSPPATYPPIPPRPKTPREPMEFLCRSWSLSTSEISLALSSQKSDKQLNKNPNISQLADVTSLAPVAPPPPLQTGKLASAVHARRTGTIGKWFHHREFVGGKVSAVKKRDRVRVEKAHLHSAVSIASLATAIAAVTASGNQDGFAGSKMSSALASASELLASHCLELAELAGADHDRVVSAVRSAVDVRGPGDLLTLTAAAATALRGEAALRVRLPKEAKNSAAISPCERVLPETHSCSSELDRTSTTDELISAKGVEESTGELMQCTRNGVXRWKHVKVYINKKSQVIVEIKSKHVVGAFSMKSKGIVNDVCETVSGLQNGKDTENTEEELYFGISTGKGLTKFKCKSKADKQTWVDSIRNLLHRVTAVEVDTSLETININDST

SEQ ID NO: 1686 - DNA, 1290 bp, Arabidopsis thaliana
  CDS (1)..(1290)
atggagtatgaccgtacgttgaacttgattccatacggactacaaggagtaagagaggaggaagaaatcgaagaagacgatgaagagagcatgacgttgtcgtcagtaccagaaaacgaaacgtcggagtgttcttcgcctccggcgacgtatcctccaatccctcctcggcctaaaacaccgagagagccgatggagtttctatgcagatcatggagtctttctacttctgagatctctttagctttatcatctcagaaatctgataaacaactcaacaaaaaccctaatatttctcagttggccgatgtcacttctctggctccggtagcaccaccaccgccgctacaaacgggaaagctagcgagtgcggttcacgcgcggagaacgggaacgatcggaaaatggttccaccaccgagaattcgtcggcgggaaggtctccgccgtaaagaagagagatagagttcgcgtggagaaagctcatctgcattccgccgtgtccattgcgtctctggcgacggcaatcgccgcagtgaccgcttcaggcaatcaagacggcttcgctggatcaaagatgagctcagcccttgcctcggcgtcggagttgttagcttctcactgcctcgaattggcggagcttgccggcgccgatcacgatcgcgtcgtctctgctgtccgatcagctgttgatgttcgtggacctggcgatttgttggctctaactgctgcagctgcaacagcattgagaggagaagcagctttgagggtaagactaccaaaggaagctaagaacagtgcagctataagcccctgtgagagagttttaccagagactcatagttgctcttctgagctcgatcgcactagcacgaccgatgaactcatatctgcaaaaggagttgaagaatcaactggagagctaatgcagtgcacacgaaacggtgttctgcggtggaagcatgtaaaagtgtacatcaacaaaaaatctcaggtcatagtagaaatcaaaagcaaacacgttgtaggagcattctccatgaaaagcaaaggcattgtaaatgatgtatgcgagacagtctcaggcctgcaaaatggaaaagacacggaaaacacagaagaagagctctatttcggaatcggtacagggaaaggtctgacaaagttcaagtgcaagagcaaggctgataagcagacatgggtggatagcatccggaatcttctccatcgagtaactgctgttgaggtcgacacttctcttgaaactataaacattaacgatagcacataa

SEQ ID NO: 1687 - protein, 429 aa, Arabidopsis thaliana
MEYDRTLNLIPYGLQGVREEEEIEEDDEESMTLSSVPENETSECSSPPATYPPIPPRPKTPREPMEFLCRSWSLSTSEISLALSSQKSDKQLNKNPNISQLADVTSLAPVAPPPPLQTGKLASAVHARRTGTIGKWFHHREFVGGKVSAVKKRDRVRVEKAHLHSAVSIASLATAIAAVTASGNQDGFAGSKMSSALASASELLASHCLELAELAGADHDRVVSAVRSAVDVRGPGDLLALTAAAATALRGEAALRVRLPKEAKNSAAISPCERVLPETHSCSSELDRTSTTDELISAKGVEESTGELMQCTRNGVLRWKHVKVYINKKSQVIVEIKSKHVVGAFSMKSKGIVNDVCETVSGLQNGKDTENTEEELYFGIGTGKGLTKFKCKSKADKQTWVDSIRNLLHRVTAVEVDTSLETININDST

SEQ ID NO: 1688 - DNA, 1185 bp, Oryza sativa
  CDS (1)..(1185)
atgaggaggagggatcacctgctgctcatggatgctgctcctcctccggcggcggtggcggcggcggtgcagacgctgatggagcccatggagttcctgtcccggtcgtggagcgtgtccgcgtcggacatatccagggtgctcaccggcggcgtcggcgcgaggcggagcaccaacttcgtggtggatcgcctctccgggatgctcatgccggagacgctcgcgctcgccgccgcctccagcacaaacctgagcccccgcaaacgctattccaggtgcaggagcgccatctccgcgcaccagcacacgatcgggaggtggttccaccacagggacgggagcagcagcagcagcagcagcagcagggtcgacaaggcccgcgccgagcgggcgcgcgtgcacgccgcggtcaccgtggcgagcgtggcggccgccgtcgcggccgtggcctccggcgcggcgaacgacccggacgacctcgacgacgccaagatggacgccgcgctggcgtccgccacacagctgctggcctcgcactgcatcgagatcgccgagctcgccggcgccgaccacgaccaggtcgcctccgcggtggaggccgccgtcgacgtgcggagccccggcgatctcatgaccctgaccgcctccgcagccacagctctgagaggagcgacggcgctgaggctgagagcgcagcgggaggcgaggagcaaggcggcggcggtggcgccctacgagaagaccggcagctgccgcggcgacatatggtgcaaggaagggacgctcctgaaacgcagccggaaaggcgctttgcaccggaagcgcgtggccgtctacatcaacaagaagtcgcaggtgatcgtgaaactgaagagcaagcacatcggcggcgccttctccaagaagaagaagagcgtcgtgtacggcgtcgacgacgatgtgcaggcgtggccggcgccgcacgcgtgcggcggcggcgccgtgcctcctgctccggagacggcgtcgtcggagaagtgccagttcgggctgaggacggcgcagggcgtggtcgagttccagtgcgagagcagggcgcagaagcaggactgggtggagtcggtgaagaatctgctccggcaggcggccggcgggacggctcagctcgagcactccttcgaatctctccggcttagcgcctcgtaa

SEQ ID NO: 1689 - protein, 394 aa, Oryza sativa
MRRRDHLLLMDAAPPPAAVAAAVQTLMEPMEFLSRSWSVSASDISRVLTGGVGARRSTNFVVDRLSGMLMPETLALAAASSTNLSPRKRYSRCRSAISAHQHTIGRWFHHRDGSSSSSSSSRVDKARAERARVHAAVTVASVAAAVAAVASGAANDPDDLDDAKMDAALASATQLLASHCIEIAELAGADHDQVASAVEAAVDVRSPGDLMTLTASAATALRGATALRLRAQREARSKAAAVAPYEKTGSCRGDIWCKEGTLLKRSRKGALHRKRVAVYINKKSQVIVKLKSKHIGGAFSKKKKSVVYGVDDDVQAWPAPHACGGGAVPPAPETASSEKCQFGLRTAQGVVEFQCESRAQKQDWVESVKNLLRQAAGGTAQLEHSFESLRLSAS

SEQ ID NO: 1690 - DNA, 1362 bp, Brassica napus
  CDS (1)..(1362)
atggataaaagtaaaacgtttggaggtcaatggaggttcaatcctgcgtttaaaccacctgaaacgccattagactctatggaatttttatcacgcacgtggagtgcttccgcaactgaagtttcccgagccgtcgtcgcttctccgacttctcaaccgccgcaaatgcgtttctcagagatccaaggcgtttctgacgtcactttggtgccggaagatgaagagaacggcatcgtttctggaaacacgttctctttcgcttcctctgagacttctttgatggtcattgaacgtatcatggctcagtctccggagatttcttcaccacggacctcggggagactttcacatagctctttcactgaaagtcctcccatatctccctcggacattaacgactttaagcaattctatcgtgtgagcccatcctttagtgggcacgtacgtggtccatcggccgtctctggtgtggctggaggatcaaaaactgtcggccggtggttgaaggaccggagggaaaagaaaagagaagagacgcgtgcacaaaacgcacagctccacgcggctgtatctgtagctggcgtggccgccgctgtagctgctattgctgtagcgaccgcctctcagtcgagttccggaagtgacgagcaagttgctaaaactgactccgccgtggcttcagccgctactttggtggcggcacagtgtgtggaagccgcagagattatgggagctgatcgcgagcacttagcttcggttgttagttctgcggttaacgttcgttctgccggagatattatgacgttgaccgccgccgcggctacagcgttgagaggggctgcgacgttgaaggcgagggcactgaaggaggtatggaacattgcagcggtgattccggtggataagggaataccaaaaggcggtgaaagcagcggcggtggcggtggttaccaaagcgatttaactccggaagacaactttcttgggatatgtagtagagaattgctagctaaaggttgcgaattgcttaaacgcacccgcaaaggcgatcttcattggaaagttgtttcggtatacataaatagaacaaagcaggtaacattgaagatgaaaagcaaacatgtcgccgggaccattacaaagaaaaaaaagaatgtggtggtggaactggtcaagggattaacggcatggcctggccgcgaactactcgaggaaggagaggatttgaggtacttcgggctaaaaacattagagaaaagagtgattgaattcgagtgcaaaagccaaagggagtatgatctttggacacaaggcgtttccatgcttctctcccttgcttctgatagaaggcataaatggtga

SEQ ID NO: 1691 - protein, 453 aa, Brassica napus
MDKSKTFGGQWRFNPAFKPPETPLDSMEFLSRTWSASATEVSRAVVASPTSQPPQMRFSEIQGVSDVTLVPEDEENGIVSGNTFSFASSETSLMVIERIMAQSPEISSPRTSGRLSHSSFTESPPISPSDINDFKQFYRVSPSFSGHVRGPSAVSGVAGGSKTVGRWLKDRREKKREETRAQNAQLHAAVSVAGVAAAVAAIAVATASQSSSGSDEQVAKTDSAVASAATLVAAQCVEAAEIMGADREHLASVVSSAVNVRSAGDIMTLTAAAATALRGAATLKARALKEVWNIAAVIPVDKGIPKGGESSGGGGGYQSDLTPEDNFLGICSRELLAKGCELLKRTRKGDLHWKVVSVYINRTKQVTLKMKSKHVAGTITKKKKNVVVELVKGLTAWPGRELLEEGEDLRYFGLKTLEKRVIEFECKSQREYDLWTQGVSMLLSLASDRRHKW

SEQ ID NO: 1692 - DNA, 1362 bp, Brassica napus
  CDS (1)..(1362)
atggataaaagtaaaacgtttggaggtcaatggaggttcaatcctgcgtttaaaccacctgaaacgccattagactctatggaatttttatcacgcacgtggagtgcttccgcaactgaagtttcccgagccgtcgtcgcttctccgacttctcaaccgccgcaaatgcgtttctcagagatccaaggcgtttctgacgtcactttggtgccggaagatgaagagaacggcatcgtttctggaaacacgttctctttcgcttcctctgagacttctttgatggtcattgaacgtatcatggctcagtctccggagatttcttcaccacggacctcggggagactttcacatagctctttcactgaaagtcctcccatatctccctcggacattaacgactttaagcaattctatcgtgtgagcccatcctttagtgggcacgtacgtggtccatcggccgtctctggtgtggctggaggatcaaaaactgtcggccggtggttgaaggaccggagggaaaagaaaagagaagagacgcgtgcacaaaacgcacagctccacgcggctgtatctgtagctggcgtggccgccgctgtagctgctattgctgtagcgaccgcctctcagtcgagttccggaagtgacgagcaagttgctaaaactgactccgccgtggcttcagccgctactttggtggcggcacagtgtgtggaagccgcagagattatgggagctgatcgcgagcacttagcttcggttgttagttctgcggttaacgttcgttctgccggagatattatgacgttgaccgccgccgcggctacagcgttgagaggggctgcgacgttgaaggcgagggcactgaaggaggtatggaacattgcagcggtgattccggtggataagggaataccaaaaagccgtgaaagcagcggcggtggcggtggttaccaaagcgatttaactccggaagacaactttcttgggatatgtagtagagaattgctagctaaaggttgcgaattgcttaaacgcacccgcaaaggcgatcttcattggaaagttgtttcggtatacataaatagaacaaagcaggtaacattgaagatgaaaagcaaacatgtcgccgggaccattacaaagaaaaaaaagaatgtggtggtggaactggtcaagggattaacggcatggcctggccgcgaactactcgaggaaggagaggatttgaggtacttcgggctaaaaacattagagaaaagagtgattgaattcgagtgcaaaagccaaagggagtatgatctttggacacaaggcgtttccatgcttctctcccttgcttctgatagaaggcataaatggtga

SEQ ID NO: 1693 - protein, 453 aa, Brassica napus
MDKSKTFGGQWRFNPAFKPPETPLDSMEFLSRTWSASATEVSRAVVASPTSQPPQMRFSEIQGVSDVTLVPEDEENGIVSGNTFSFASSETSLMVIERIMAQSPEISSPRTSGRLSHSSFTESPPISPSDINDFKQFYRVSPSFSGHVRGPSAVSGVAGGSKTVGRWLKDRREKKREETRAQNAQLHAAVSVAGVAAAVAAIAVATASQSSSGSDEQVAKTDSAVASAATLVAAQCVEAAEIMGADREHLASVVSSAVNVRSAGDIMTLTAAAATALRGAATLKARALKEVWNIAAVIPVDKGIPKSRESSGGGGGYQSDLTPEDNFLGICSRELLAKGCELLKRTRKGDLHWKVVSVYINRTKQVTLKMKSKHVAGTITKKKKNVVVELVKGLTAWPGRELLEEGEDLRYFGLKTLEKRVIEFECKSQREYDLWTQGVSMLLSLASDRRHKW

SEQ ID NO: 1694 - DNA, 1224 bp, Brassica napus
  CDS (1)..(1224)
atggaacgtggtgggttttatccagattggaaggatacttcatcttccttgtttggatcagagaacatggaggaagacagagttctcaaagctgaagagctgttctcatccatcccacagcctcagacaccaaaagagccaatggagtttctctcaagatcctggagtctctctacctctgaaatagcaaaagcacttgcactcaaacatagacaacaacaagaacagcgttgtgttgcacaaaacaacactcatgttctgttccctgatgctgctgctgctgctgcacatccactcatgactgggaagattatgaactcgtttggcacacgtagagcagggacactatccaaatggtttcaccaccacagggaacacagcagcagcagcaacaccaccaactatctcaagaagaaagacaaggcgcgtgttgagaacgcacacgtgcactctgcagtatctatagcagctctagctgcaggtgtagcctcggtgacatccgcaagcaattgcaaagggtcaagctccaagatggctctggctttgggctcagccacagaactgttggcctcacattgtgttgagatggctgagcgagccggtgctgaccgtgcacgtgttgcttccacggtgaggtcatctgttgacatccacagccctggtgatctcatgactcttacagccgctgctgcaacggctttgagaggagaagcggctctgaaggcgagacagccaaaggaagcaaggaaaaacgcagctattacacctttcgagagaagcttctctgactctcattggcctgcaaacattcagtttagactggaagaaccaaatcttccactagaaggagaactcatgcaatgcgcacgaaatggagcgcaaagaactaagcgtgtctgcgtctatatcaacaagaagtctcaggttataatcaaactcaaaagcaaacatgttggaggtgcattctcaaagaagatcaaatgcattgtctatggagtctgcgatgagaaatcagcttggccttacaggaaagagagggaaaactcagaggaagtctactttggtctgaaaacaggacagggccttttggagttcaagtgcaagaacaaggttcacaagcagagatggattgctgggattcattctactgtctccaaagtaacttgtcttgaagctgacaaatgctctgtcgaatcattgagcttcagtgatcgtatgccatag

SEQ ID NO: 1695 - protein, 407 aa, Brassica napus
MERGGFYPDWKDTSSSLFGSENMEEDRVLKAEELFSSIPQPQTPKEPMEFLSRSWSLSTSEIAKALALKHRQQQEQRCVAQNNTHVLFPDAAAAAAHPLMTGKIMNSFGTRRAGTLSKWFHHHREHSSSSNTTNYLKKKDKARVENAHVHSAVSIAALAAGVASVTSASNCKGSSSKMALALGSATELLASHCVEMAERAGADRARVASTVRSSVDIHSPGDLMTLTAAAATALRGEAALKARQPKEARKNAAITPFERSFSDSHWPANIQFRLEEPNLPLEGELMQCARNGAQRTKRVCVYINKKSQVIIKLKSKHVGGAFSKKIKCIVYGVCDEKSAWPYRKERENSEEVYFGLKTGQGLLEFKCKNKVHKQRWIAGIHSTVSKVTCLEADKCSVESLSFSDRMP

SEQ ID NO: 1696 - DNA, 1383 bp, Brassica napus
  CDS (1)..(1383)
atggataaggagtgcacgttaaacttgtttccatatggactacaagaagtagcagaggtcgaagagatcgaggaagacaacgataacgagagcatgactttgtcgtcggtgccagaaaatgagacgtcagagtgttcatcgtctccggagacgtatccaccgattcctcctcggcctaaaactccgagagagccgatggagtttctatgcagatcatggagcagttctacgtctgagatctctctagctttatcctctcagaaatctaataaacaactcaacaaaacccatacactttctgagttagccggcgtcacttcgccggctccggcaccactaccaccgcctctacgcacggaaaacccggcgagcgtggttcacgcgaggcgaacaagtgccatcggaaaatggttccaccaccgagattttgtcggcgggaaggtttccagcataagtaagagagataaatctcgatatgagaacgctcatcttcacaccgccgtgtccatcgcgtctctcgcgacggccatagccgccgtaaccgcttcgggaaaccaagacggcgccttgatggaatcaaagatgatctcagcgctggcctcggcatctgagctgttagcttctcactgcgtcgaattagcagagctctccggtgccggccacgatcgcgttgtctctgctgtccgatccgccgtcgatgttcgaggaccgggagatttgctgactctaactgctgcagccgcaacagcattgagaggagaagccgctttaaggacaagacttccaaaggaagctaagaacaatgcagctataagcccttgcgaaagggctttaccagagactcatgattgctcttctgagctggattccgcaagcacaaccactgaggaacaggcatctgcacagggagtagaagaatcagatttgaaatgtaacggagagctaatgcagtgcacacgaaatggagttttgcggtggaagcatatgaaagtgtacatcaacaagaaatcgcaggttgtagtagaaatcaaaagcaaacatgttagaggagccttctccatgaaaagcaaaggtagttcacatcagataactcttctttctctccatgctcattacaatctaaatccaatgaccgcaggtattgtgaatgatgtatgcgagacggtctcaggcctgcaaagtgtaaaagaaacagaaaacgcagaagaaaaagagctctattttggaataagcacaggcaaaggtctaacgaagttcaagtgcaagagcaaggctgataagcagacatgggtggatagtatccggaatcttctccatcgagtcactgctgtcgagactattaacacttcccttgaaactacaaacattggggatagtacataa

SEQ ID NO: 1697 - protein, 460 aa, Brassica napus
MDKECTLNLFPYGLQEVAEVEEIEEDNDNESMTLSSVPENETSECSSSPETYPPIPPRPKTPREPMEFLCRSWSSSTSEISLALSSQKSNKQLNKTHTLSELAGVTSPAPAPLPPPLRTENPASVVHARRTSAIGKWFHHRDFVGGKVSSISKRDKSRYENAHLHTAVSIASLATAIAAVTASGNQDGALMESKMISALASASELLASHCVELAELSGAGHDRVVSAVRSAVDVRGPGDLLTLTAAAATALRGEAALRTRLPKEAKNNAAISPCERALPETHDCSSELDSASTTTEEQASAQGVEESDLKCNGELMQCTRNGVLRWKHMKVYINKKSQVVVEIKSKHVRGAFSMKSKGSSHQITLLSLHAHYNLNPMTAGIVNDVCETVSGLQSVKETENAEEKELYFGISTGKGLTKFKCKSKADKQTWVDSIRNLLHRVTAVETINTSLETTNIGDST

SEQ ID NO: 1698 - DNA, 1356 bp, Brassica napus
  CDS (1)..(1356)
atggataaaagtaaaacgtttggaggtcaatggaggttcaatcctgcgtttaaaccacctgaaacgccattagactctatggaatttttatcacgcacgtggagtgcttccgcaactgaagtttcccgagccgtcgtcgcttctccgacttctcaaccgccacaaatgcgtttctcggagatccaaggcgtttctgacgtcactttggtgccggaagatgaagagaacggcatcgtttctggaaacacgttctctttcgcttcctctgagacttctttgatggtcattgaacgtatcatggctcagtctccggagatttcttcaccgcggacctcggggagactttcacatagctctttcactgatagtcctcccatatctccctcggacattaacgactttaagcaattctatcgtgtgagcccatcctttaatgggcacgtacgtggtccatcggccgtctctggtgtggctggaggatcaaaaactgtcggccggtggttgaaggaccggagggaaaagaaaagagaagagacgcgtgcacaaaacgcacagctccacgcggctgtatctgtagctggcgtggccgccgctgtagctgctattgctgtagcgaccgcctctcagtcgagttccggaagtgacgagcaagttgctaaaactgactccgccgtggcttcagccgctactttggtggcggcacagtgtgtggaagccgcagagattatgggagctgatcgcgagcacttagcttcggttgttagttctgcggttaacgttcgttctgccggagatattatgacgttgaccgccgccgcggccacagcgttgagaggggctgcgacgttgaaagcgagggcactgaaggaggtatggaacattgcagcggtgattccggtggataagggaataccaaaaagccgtgtaggcggtggtggtggttaccgaagcgatttagctcctgaagataactttcttgggatttgtagtagagaattgctggctaaaggttgcgagttgcttaaacgtacccgcaaaggcgatcttcattggaaagttgtttcggtctacattaatagaacaaatcaggtaacgttgaagatgaagagcaaacatgtcgctgggacccttacaaagaagaaaaagaatgtggtggtggaattggtcaagggattaccggcatggcctggccgcgaactgcttgatgatggagaggatttgaggtacttcgggctaaagacgttggagaaaagagtgattgaattcgagtgcaaaagccaaagggagtatgatctttggacacaaggtgtttccatgcttctctccgttgcttctgatagaaggcataaatgttga

SEQ ID NO: 1699 - protein, 451 aa, Brassica napus
MDKSKTFGGQWRFNPAFKPPETPLDSMEFLSRTWSASATEVSRAVVASPTSQPPQMRFSEIQGVSDVTLVPEDEENGIVSGNTFSFASSETSLMVIERIMAQSPEISSPRTSGRLSHSSFTDSPPISPSDINDFKQFYRVSPSFNGHVRGPSAVSGVAGGSKTVGRWLKDRREKKREETRAQNAQLHAAVSVAGVAAAVAAIAVATASQSSSGSDEQVAKTDSAVASAATLVAAQCVEAAEIMGADREHLASVVSSAVNVRSAGDIMTLTAAAATALRGAATLKARALKEVWNIAAVIPVDKGIPKSRVGGGGGYRSDLAPEDNFLGICSRELLAKGCELLKRTRKGDLHWKVVSVYINRTNQVTLKMKSKHVAGTLTKKKKNVVVELVKGLPAWPGRELLDDGEDLRYFGLKTLEKRVIEFECKSQREYDLWTQGVSMLLSVASDRRHKC

SEQ ID NO: 1700 - DNA, 1176 bp, Glycine max
  CDS (1)..(1176)
atggaaggtggtttttttccaccttggaaaaacgggtcttggcaggagttaggttcagaggatgtgcaggaaagtgagcaattcaaatcttttccaccgttggctgagccaccgacaccccgtgaacctatggagttcttatctaggtcatggagtctctctgcctccgaaatctcaaagactctctcagagaaacaaaaacaaactttcctcgataataagacctcagacacattgccagaacctatttccgcacctcaattagcaggagggaagatgatagtatctggaaattgtagaaggatgggtgcgattgggaaatggttacatcagaagcagtacggcaatacgaacgtctccgttaagaagaaagaccgggcgcgcgtggaaaacgcgcgtgtacattctgcgctgtccattgcggggttagcctctgcggtggctgctgtggcggcaacagaggaccctcgcggtggctctcgttctaaattggacgttgctctcgcttcggccacgcaactcttggcctcttattgcgttgaaatggcggaggtagctggcgcggatcgcgagcgcgtggcttccaccgtcaggtctgcggttgatattcaaacgccaggggatctaatgactctcaccgctgcggctgcaacagctttgcgaggagaagcagccttgacagcgagaatgccaaaagaagcaaagaagaatgcgtcaataagtccgtatgataaagtgatagcggaaacgcagtggcttcgtgcgtttgacggtcaggtgttggaacgttatcctccgtgcctgggggatttgttgcagctcacagaaaaaggtgctttacgatggagacatgtccatgtttatatcaagaaatgtcaggttaaagttaagatcaaaagcaagcacgttggaggagccttctccaaaaagaacaaatgtgtggtgtatggagtctgtgataaagataatgcatggccatatagaaaagaaagggaagcatcagaagagctttattttggcctcaaaactgcacaaggtcttctagaatttaagtgccagaacaaactccacaagcaaaaatgggttgatggagtagagtttttgcttcgtagggttaactctgttgaagcaacagagcattctctagaatttttaagtattagtactagtacatga

SEQ ID NO: 1701 - protein, 391 aa, Glycine max
MEGGFFPPWKNGSWQELGSEDVQESEQFKSFPPLAEPPTPREPMEFLSRSWSLSASEISKTLSEKQKQTFLDNKTSDTLPEPISAPQLAGGKMIVSGNCRRMGAIGKWLHQKQYGNTNVSVKKKDRARVENARVHSALSIAGLASAVAAVAATEDPRGGSRSKLDVALASATQLLASYCVEMAEVAGADRERVASTVRSAVDIQTPGDLMTLTAAAATALRGEAALTARMPKEAKKNASISPYDKVIAETQWLRAFDGQVLERYPPCLGDLLQLTEKGALRWRHVHVYIKKCQVKVKIKSKHVGGAFSKKNKCVVYGVCDKDNAWPYRKEREASEELYFGLKTAQGLLEFKCQNKLHKQKWVDGVEFLLRRVNSVEATEHSLEFLSISTST

SEQ ID NO: 1702 - DNA, 20 bp, Artificial sequence
  primer
atggaaggtgggttttattc

SEQ ID NO: 1703 - DNA, 21 bp, Artificial sequence
  primer
ctatcgcatgcgattgctgag

SEQ ID NO: 1704 - protein, 506 aa, Artificial sequence
  consensus sequence
  Variant (2)..(2): Xaa in position 2 is any amino acid
  Variant (5)..(5): Xaa in position 5 is any amino acid
  Variant (7)..(7): Xaa in position 7 is any amino acid
  Variant (8)..(8): Xaa in position 8 is any or no amino acid
  Variant (13)..(13): Xaa in position 13 is any amino acid
  Variant (18)..(18): Xaa in position 18 is any amino acid
  Variant (20)..(21): Xaa in position 20 to 21 is any amino acid
  Variant (22)..(22): Xaa in position 22 is any or no amino acid
  Variant (24)..(24): Xaa in position 24 is any amino acid
  Variant (26)..(27): Xaa in position 26 to 27 is any amino acid
  Variant (29)..(82): Xaa in position 29 to 82 is any amino acid
  Variant (83)..(159): Xaa in position 83 to 159 is any or no amino acid
  Variant (161)..(164): Xaa in position 161 to 164 is any amino acid
  Variant (166)..(168): Xaa in position 166 to 168 is any amino acid
  Variant (170)..(171): Xaa in position 170 to 171 is any amino acid
  Variant (173)..(173): Xaa in position 173 is any amino acid
  Variant (177)..(177): Xaa in position 177 is any amino acid
  Variant (179)..(180): Xaa in position 179 to 180 is any amino acid
  Variant (182)..(184): Xaa in position 182 to 184 is any amino acid
  Variant (186)..(198): Xaa in position 186 to 198 is any amino acid
  Variant (199)..(221): Xaa in position 199 to 221 is any or no amino acid
  Variant (223)..(225): Xaa in position 223 to 225 is any amino acid
  Variant (227)..(227): Xaa in position 227 is any amino acid
  Variant (231)..(232): Xaa in position 231 to 232 is any amino acid
  Variant (234)..(234): Xaa in position 234 is any amino acid
  Variant (237)..(237): Xaa in position 237 is any amino acid
  Variant (239)..(239): Xaa in position 239 is any amino acid
  Variant (241)..(241): Xaa in position 241 is any amino acid
  Variant (244)..(245): Xaa in position 244 to 245 is any amino acid
  Variant (249)..(255): Xaa in position 249 to 255 is any amino acid
  Variant (257)..(257): Xaa in position 257 is any amino acid
  Variant (259)..(259): Xaa in position 259 is any amino acid
  Variant (261)..(265): Xaa in position 261 to 265 is any amino acid
  Variant (268)..(269): Xaa in position 268 to 269 is any amino acid
  Variant (274)..(274): Xaa in position 274 is any amino acid
  Variant (282)..(282): Xaa in position 282 is any amino acid
  Variant (284)..(284): Xaa in position 284 is any amino acid
  Variant (286)..(287): Xaa in position 286 to 287 is any amino acid
  Variant (289)..(290): Xaa in position 289 to 290 is any amino acid
  Variant (293)..(296): Xaa in position 293 to 296 is any amino acid
  Variant (297)..(297): Xaa in position 297 is any or no amino acid
  Variant (299)..(317): Xaa in position 299 to 317 is any amino acid
  Variant (318)..(369): Xaa in position 318 to 369 is any or no amino acid
  Variant (371)..(378): Xaa in position 371 to 378 is any amino acid
  Variant (379)..(379): Xaa in position 379 is any or no amino acid
  Variant (381)..(384): Xaa in position 381 to 384 is any amino acid
  Variant (386)..(386): Xaa in position 386 is any amino acid
  Variant (388)..(389): Xaa in position 388 to 389 is any amino acid
  Variant (393)..(394): Xaa in position 393 to 394 is any amino acid
  Variant (395)..(395): Xaa in position 395 is any or no amino acid
  Variant (398)..(399): Xaa in position 398 to 399 is any amino acid
  Variant (401)..(401): Xaa in position 401 is any amino acid
  Variant (406)..(407): Xaa in position 406 to 407 is any amino acid
  Variant (409)..(411): Xaa in position 409 to 411 is any amino acid
  Variant (414)..(414): Xaa in position 414 is any amino acid
  Variant (416)..(417): Xaa in position 416 to 417 is any amino acid
  Variant (418)..(439): Xaa in position 418 to 439 is any or no amino acid
  Variant (441)..(442): Xaa in position 441 to 442 is any amino acid
  Variant (444)..(448): Xaa in position 444 to 448 is any amino acid
  Variant (451)..(458): Xaa in position 451 to 458 is any amino acid
  Variant (459)..(469): Xaa in position 459 to 469 is any or no amino acid
  Variant (471)..(471): Xaa in position 471 is any amino acid
  Variant (472)..(473): Xaa in position 472 to 473 is any or no amino acid
  Variant (477)..(478): Xaa in position 477 to 478 is any amino acid
  Variant (480)..(484): Xaa in position 480 to 484 is any amino acid
  Variant (485)..(485): Xaa in position 485 is any or no amino acid
  Variant (488)..(488): Xaa in position 488 is any amino acid
  Variant (490)..(494): Xaa in position 490 to 494 is any amino acid
  Variant (497)..(497): Xaa in position 497 is any amino acid
  Variant (499)..(505): Xaa in position 499 to 505 is any amino acid
PXTPXEXXMEFLXRSWSXSXXXEXSXXLXXXXXXXXXXXXXXXXXXXXXXXXXXXXXXXXXXXXXXXXXXXXXXXXXXXXXXXXXXXXXXXXXXXXXXXXXXXXXXXXXXXXXXXXXXXXXXXXXXXXXXXXXXXXXXXXXXXXXXXXXXXXXXXXXXXKXXXXRXXXAXXHXAVSXAXXAXXXAXXXXXXXXXXXXXXXXXXXXXXXXXXXXXXXXXXXXKXXXAXASAXXLXASXCXEXAEXXGADXXXXXXXVXSXVXXXXXGDXXTLTAXAATALRGXAXLXXRXXKEXXXXXAXXXXXXXXXXXXXXXXXXXXXXXXXXXXXXXXXXXXXXXXXXXXXXXXXXXXXXXXXXXXXXXXXXXXXXXGXXXXXXXXXGXXXXKXVXXYINXXXQVXXKXKSKHXXGXXXKKXKXXXXXXXXXXXXXXXXXXXXXXXXVXXVXXXXXAWXXXXXXXXXXXXXXXXXXXEXXXYFGXXTXXXXXXEFXCXXXXXKQXWXXXXXXXL

SEQ ID NO: 1705 - protein, 58 aa, Artificial sequence
  protein pattern
  Variant (2)..(3): Xaa in position 2 to 3 is any amino acid
  Variant (6)..(6): Xaa in position 6 is Ala, Ser or Thr
  Variant (7)..(7): Xaa in position 7 is Ala, Glu or Gln
  Variant (9)..(9): Xaa in position 9 is Leu or Val
  Variant (12)..(12): Xaa in position 12 is His or Tyr
  Variant (14)..(14): Xaa in position 14 is Ile, Leu or Val
  Variant (15)..(15): Xaa in position 15 is Asp or Glu
  Variant (16)..(16): Xaa in position 16 is Ile, Leu or Met
  Variant (18)..(18): Xaa in position 18 is Glu or Gln
  Variant (19)..(20): Xaa in position 19 to 20 is any amino acid
  Variant (23)..(23): Xaa in position 23 is any amino acid
  Variant (24)..(24): Xaa in position 24 is His or Arg
  Variant (25)..(25): Xaa in position 25 is Ala, Asp, Glu, Gln or Thr
  Variant (26)..(26): Xaa in position 26 is any amino acid
  Variant (27)..(27): Xaa in position 27 is Ile, Leu, Met or Val
  Variant (28)..(29): Xaa in position 28 to 29 is any amino acid
  Variant (30)..(30): Xaa in position 30 is Ala, Thr or Val
  Variant (31)..(31): Xaa in position 31 is Ile or Val
  Variant (32)..(32): Xaa in position 32 is any amino acid
  Variant (33)..(34): Xaa in position 33 to 34 is Ala or Ser
  Variant (35)..(35): Xaa in position 35 is Ile or Val
  Variant (36)..(36): Xaa in position 36 is Asp, Gly or Asn
  Variant (37)..(37): Xaa in position 37 is Ala, Ile or Val
  Variant (38)..(38): Xaa in position 38 is any amino acid
  Variant (39)..(39): Xaa in position 39 is Gly, Ser or Thr
  Variant (40)..(40): Xaa in position 40 is Asn, Pro or Ser
  Variant (43)..(43): Xaa in position 43 is Ile or Leu
  Variant (44)..(44): Xaa in position 44 is any amino acid
  Variant (45)..(45): Xaa in position 45 is Ala or Thr
  Variant (49)..(49): Xaa in position 49 is Ala, Gly or Ser
  Variant (53)..(53): Xaa in position 53 is Ala or Gly
  Variant (54)..(55): Xaa in position 54 to 55 is any amino acid
  Variant (56)..(56): Xaa in position 56 is Ala or Gly
  Variant (57)..(57): Xaa in position 57 is any amino acid
  Variant (58)..(58): Xaa in position 58 is Ala, Asn or Thr
AXXSAXXLXASXCXXXAXXXGAXXXXXXXXXXXXXXXXXXGDXXXLTAXAATXXXXXX

SEQ ID NO: 1706 - protein, 23 aa, Artificial sequence
  protein pattern
  Variant (2)..(2): Xaa in position 2 is any amino acid
  Variant (5)..(5): Xaa in position 5 is Lys or Arg
  Variant (7)..(7): Xaa in position 7 is any amino acid
  Variant (8)..(8): Xaa in position 8 is any or no amino acid
  Variant (10)..(10): Xaa in position 10 is Gly or Thr
  Variant (11)..(13): Xaa in position 11 to 13 is any amino acid
  Variant (16)..(16): Xaa in position 16 is any or no amino acid
  Variant (18)..(18): Xaa in position 18 is Cys, Gly, Asn or Ser
  Variant (19)..(19): Xaa in position 19 is Ile or Val
  Variant (21)..(21): Xaa in position 21 is any amino acid
  Variant (22)..(22): Xaa in position 22 is Asp, Glu or Gly
  Variant (23)..(23): Xaa in position 23 is Ile, Leu or Val
KXKSXHXXGXXXXKKXKXXVXXX

SEQ ID NO: 1707 - protein, 24 aa, Artificial sequence
  protein pattern
  Variant (2)..(2): Xaa in position 2 is any amino acid
  Variant (4)..(4): Xaa in position 4 is any amino acid
  Variant (5)..(5): Xaa in position 5 is Asn or Ser
  Variant (6)..(8): Xaa in position 6 to 8 is any amino acid
  Variant (9)..(9): Xaa in position 9 is His or Lys
  Variant (11)..(11): Xaa in position 11 is any amino acid
  Variant (13)..(13): Xaa in position 13 is any amino acid
  Variant (14)..(14): Xaa in position 14 is Ala, Asp or Glu
  Variant (15)..(15): Xaa in position 15 is Asp, Gly or Ser
  Variant (16)..(16): Xaa in position 16 is Ile or Val
  Variant (17)..(19): Xaa in position 17 to 19 is any amino acid
  Variant (20)..(20): Xaa in position 20 is Leu or Val
  Variant (21)..(23): Xaa in position 21 to 23 is any amino acid
  Variant (24)..(24): Xaa in position 24 is Ala, Cys, Asn, Ser or Thr
FXCXXXXXXQXWXXXXXXXXXXXX

SEQ ID NO: 1708 - protein, 35 aa, Artificial sequence
  protein pattern
  Variant (2)..(2): Xaa in position 2 is any or no amino acid
  Variant (4)..(4): Xaa in position 4 is any amino acid
  Variant (5)..(7): Xaa in position 5 to 7 is any or no amino acid
  Variant (9)..(11): Xaa in position 9 to 11 is any amino acid
  Variant (13)..(13): Xaa in position 13 is any amino acid
  Variant (14)..(14): Xaa in position 14 is Leu, Met or Val
  Variant (16)..(16): Xaa in position 16 is Ala or Ser
  Variant (17)..(17): Xaa in position 17 is any amino acid
  Variant (18)..(18): Xaa in position 18 is Ile, Leu or Val
  Variant (20)..(20): Xaa in position 20 is Ile or Val
  Variant (22)..(22): Xaa in position 22 is any amino acid
  Variant (23)..(23): Xaa in position 23 is Leu or Val
  Variant (25)..(25): Xaa in position 25 is Ala, Ser or Thr
  Variant (26)..(26): Xaa in position 26 is Ala or Gly
  Variant (27)..(27): Xaa in position 27 is Ile, Leu or Val
  Variant (29)..(29): Xaa in position 29 is Ala or Ser
  Variant (30)..(30): Xaa in position 30 is Ile, Leu or Val
  Variant (31)..(31): Xaa in position 31 is Ala or Thr
  Variant (32)..(32): Xaa in position 32 is Ala, Ser or Val
  Variant (33)..(33): Xaa in position 33 is Ala, Glu, Asn, Ser or Thr
  Variant (34)..(34): Xaa in position 34 is any amino acid
  Variant (35)..(35): Xaa in position 35 is Ala, Asp, Asn, Ser or Thr
KXKXXXXRXXXAXXHXXXSXAXXAXXXAXXXXXXX

SEQ ID NO: 1709 - DNA, 852 bp, ESCHERICHIA COLI
  CDS (1)..(852): transl_table=11
atgcggacacagtggccctctccggcaaaacttaatctgtttttatacattaccggtcagcgtgcggatggttaccacacgctgcaaacgctgtttcagtttcttgattacggcgacaccatcagcattgagcttcgtgacgatggggatattcgtctgttaacgcccgttgaaggcgtggaacatgaagataacctgatcgttcgcgcagcgcgattgttgatgaaaactgcggcagacagcgggcgtcttccgacgggaagcggtgcgaatatcagcattgacaagcgtttgccgatgggcggcggtctcggcggtggttcatccaatgccgcgacggtcctggtggcattaaatcatctctggcaatgcgggctaagcatggatgagctggcggaaatggggctgacgctgggcgcagatgttcctgtctttgttcgggggcatgccgcgtttgccgaaggcgttggtgaaatactaacgccggtggatccgccagagaagtggtatctggtggcgcaccctggtgtaagtattccgactccggtgatttttaaagatcctgaactcccgcgcaatacgccaaaaaggtcaatagaaacgttgctaaaatgtgaattcagcaatgattgcgaggttatcgcaagaaaacgttttcgcgaggttgatgcggtgctttcctggctgttagaatacgccccgtcgcgcctgactgggacaggggcctgtgtctttgctgaatttgatacagagtctgaagcccgccaggtgctagagcaagccccggaatggctcaatggctttgtggcgaaaggcgctaatctttccccattgcacagagccatgctttaa

SEQ ID NO: 1710 - protein, 283 aa, ESCHERICHIA COLI
MRTQWPSPAKLNLFLYITGQRADGYHTLQTLFQFLDYGDTISIELRDDGDIRLLTPVEGVEHEDNLIVRAARLLMKTAADSGRLPTGSGANISIDKRLPMGGGLGGGSSNAATVLVALNHLWQCGLSMDELAEMGLTLGADVPVFVRGHAAFAEGVGEILTPVDPPEKWYLVAHPGVSIPTPVIFKDPELPRNTPKRSIETLLKCEFSNDCEVIARKRFREVDAVLSWLLEYAPSRLTGTGACVFAEFDTESEARQVLEQAPEWLNGFVAKGANLSPLHRAML

SEQ ID NO: 1711 - DNA, 864 bp, Klebsiella pneumoniae
  CDS (1)..(864): transl_table=11
ctggatcgtgaaatgatgacccgctggccctctcctgcaaaactgaatctgtttttatatatcaccggccagcgggccgatggttaccataccctgcaaacgctgtttcagtttctcgattacggcgatacgttgaccatcgaaccgcgtactgacggccaactgcgcctgctgacgccggtggccggcgtgccggacgaggagaatctgatcgttcgcgccgcgcgtctgctgatgcatgccgccagcgaaagcgatcgcctgccggcgggcagcggcgccgatatcagtatcgataagcgcctgccgatgggcggcggcctgggcggtggctcctccaatgccgccaccgtgctggtggcgctcaaccatctgtggggctgcggtctctcggaagatgagctggcgactcttggccttcagctgggggccgatgtgccggttttcgtgcgcggccatgccgccttcgccgagggggtgggtgaaatactgacgccggtagaacccgaggaaaaatggtacctggtggcccacccgggggtcagtattccgacgccgatcatttttcgcgatccggagctaccacgaaataccccgcgccggtcaattaatacgttattaaattgtgaattcagcaacgattgcgagcttatcgcaagaaaacgttttcgcgaggttgatgccgcgctttcctggctgttagaatatgcgccgtcgcgcctgaccggcacaggggcctgtgtgtttgctgaatttaacaccgaatccgctgcccgtcaggtgctggacactgccccggcatggctaaatggctttgtggcgcgcggagttaacctttcgccgctcaagcaggccctgctctga

SEQ ID NO: 1712 - protein, 287 aa, Klebsiella pneumoniae
LDREMMTRWPSPAKLNLFLYITGQRADGYHTLQTLFQFLDYGDTLTIEPRTDGQLRLLTPVAGVPDEENLIVRAARLLMHAASESDRLPAGSGADISIDKRLPMGGGLGGGSSNAATVLVALNHLWGCGLSEDELATLGLQLGADVPVFVRGHAAFAEGVGEILTPVEPEEKWYLVAHPGVSIPTPIIFRDPELPRNTPRRSINTLLNCEFSNDCELIARKRFREVDAALSWLLEYAPSRLTGTGACVFAEFNTESAARQVLDTAPAWLNGFVARGVNLSPLKQALL

SEQ ID NO: 1713 - DNA, 891 bp, Proteus mirabilis
  CDS (1)..(891): transl_table=11
ctgggatatacagcaatgacactaagttggccctctcctgccaaattaaatctttttctctacattaccgggaaacgccccgatggttaccataatctacaaaccttatttcaatttttagattatggcgatacgctaacttttacgccccgtaatgatacgcagttaaccatcttaacccccgttgaaggggttgcagatgaagataatctgattattaaagcagccaaattattacgtcaatactgccatcagcaccatattcccctacgctatcaaggggcagatattagtattgataaaaaactgcccatgggaggaggtttagggggaggctcttccaatgctgcgacaacactgatagcccttaattaccattggcaagcaggcctaagcgatgaaacattagccacactcggcgtgacgttaggcgcagatgtgccggtatttgttaaagggcatgccgcttttgctgaaggtgttggtgaaatattaaccccagcatcacccaaagagtgttggtatttagttgctcaccccggaatttctatcccaaccccgacaatcttcacagatccagaattaaaacgtaattcgcctattcgctctctgggcgcattattacaggctccgtttgcaaatgactgtgaaatgatcgcaagaaaacgttttcgtgaggttgaatatctgctttcgtggctgttagaatatgcaccgtcacgcttaactgggacaggtgcttgtgtattcggtgagtttgaatcgcaagaggccgctagtgaagtgttaattaacgcccctgagtgggtgcacggatttgtggcgcaaggcgttaacatttcccctgtgcatttattccgctcaaggatacctgtgttattgcacccgtaa

SEQ ID NO: 1714 - protein, 296 aa, Proteus mirabilis
LGYTAMTLSWPSPAKLNLFLYITGKRPDGYHNLQTLFQFLDYGDTLTFTPRNDTQLTILTPVEGVADEDNLIIKAAKLLRQYCHQHHIPLRYQGADISIDKKLPMGGGLGGGSSNAATTLIALNYHWQAGLSDETLATLGVTLGADVPVFVKGHAAFAEGVGEILTPASPKECWYLVAHPGISIPTPTIFTDPELKRNSPIRSLGALLQAPFANDCEMIARKRFREVEYLLSWLLEYAPSRLTGTGACVFGEFESQEAASEVLINAPEWVHGFVAQGVNISPVHLFRSRIPVLLHP

SEQ ID NO: 1715 - DNA, 870 bp, Enterobacter cloacae
  CDS (1)..(870): transl_table=11
atgatgacccactggccttttcccgcaaaactgaacctgtttctctacattaccggacagcgcgctgacggctatcacaccctgcaaacgctgtttcagtttgtcgattacggcgacacgatctccatcgaaccgcgtcaggacgggcagattcacctgctgacgccggtcgacggcgtggcgcatgaggataacctgatcgtgcgcgctgctcgccttctgatgaaaacggcgtcgtcgtcgggtcgtctgccagcgggaagcggtgcggatatccgtatcgacaaacgcctgccaatgggcggcggtcttggtggcggttcatcgaacgccgcgaccgtactggtggcgcttaaccacctctgggactgcggtctgacgacggacgaactggcagcgttaggattgacgctgggcgccgatgtaccggtgtttgtgcgcggccacgcggcgttcgctgaaggtgtcggtgaaatcctcacgccggtcgatccgccggaaaaatggtatctgatcgttcaccctggcgtgagcattcctaccccggtcatctttaaagatcctgacctgaaaagaaataccccggtacggtcaataaaaacgttattaaattgtgaattcagcaacgattgcgaggatatcgcaagaaaacgttttcgcgaggttgatgcggtgctttcctggctgttagaatacgcgccgtcgcgcctgaccggtacaggggcctgtgtctttgctgaatttgacaccgaaaccgccgcccgtcaggtgcttgagcaagcgccggtttggctgcatggttttgtagcgcgcgggatgaacatctcccccctacagcagaccattctggcgcagactgagtttcggtga

SEQ ID NO: 1716 - protein, 289 aa, Enterobacter cloacae
MMTHWPFPAKLNLFLYITGQRADGYHTLQTLFQFVDYGDTISIEPRQDGQIHLLTPVDGVAHEDNLIVRAARLLMKTASSSGRLPAGSGADIRIDKRLPMGGGLGGGSSNAATVLVALNHLWDCGLTTDELAALGLTLGADVPVFVRGHAAFAEGVGEILTPVDPPEKWYLIVHPGVSIPTPVIFKDPDLKRNTPVRSIKTLLNCEFSNDCEDIARKRFREVDAVLSWLLEYAPSRLTGTGACVFAEFDTETAARQVLEQAPVWLHGFVARGMNISPLQQTILAQTEFR

SEQ ID NO: 1717 - DNA, 942 bp, Haemophilus influenzae
  CDS (1)..(942): transl_table=11
atgaaatcacatcaattttctaccgcactttgccaaaatacaacacaatcaaatgggcagccattacgcttccctagccctgccaaactgaatttatttctttatatcaatggaaaattgccgaacggctatcatgaattacaaacgcttttccaatttttagattttggcgattggttagacattagtattcgggaacaagataatcaaattgttttaacgccagaaattccaaatctaaaaacggaaaataatctaatttatcgagccgcaaaacttttacaagaaaaagccaatattcaattgggtgcaaatattcatttagataaaattcttccaatgggaggcggtgttggtggtggttcatccaatgcagcaaccgcattggtcgctttaaattatttatggcaagccaatttatccattgatgaactggcaaaattgggattaacattaggcgcggatgtgccaatatttgtatacggacaggctgcttttgctgaaggcgttggggaaaaaatcacttattgtgaacctgccgaaaaatggtttgttatattaaaacccgatgattcaatatcgacggctgtcatctttcaagatccaaatttaccacgtaatacaccgaaaaaatccctaaaacaacttttgagtgaaccttataaaaacgattgcgaaaaagttgtgataaatcattattcaaacgttgaaaaagcgttaaactggttgctacaatatgcgccggcaagattaacaggaacgggagcctgtgtttttgctgaatttgatcatgaagcagaagcgcaagcggtatttagaaaaaaaccagaagcattttttggtttcgtcgctaaaggactcaatgtgtctcccttgcacgcaatgttgaagcagctatcatcaactcatactcatcgacaatctaaacctgaggttttataa

SEQ ID NO: 1718 - protein, 313 aa, Haemophilus influenzae
MKSHQFSTALCQNTTQSNGQPLRFPSPAKLNLFLYINGKLPNGYHELQTLFQFLDFGDWLDISIREQDNQIVLTPEIPNLKTENNLIYRAAKLLQEKANIQLGANIHLDKILPMGGGVGGGSSNAATALVALNYLWQANLSIDELAKLGLTLGADVPIFVYGQAAFAEGVGEKITYCEPAEKWFVILKPDDSISTAVIFQDPNLPRNTPKKSLKQLLSEPYKNDCEKVVINHYSNVEKALNWLLQYAPARLTGTGACVFAEFDHEAEAQAVFRKKPEAFFGFVAKGLNVSPLHAMLKQLSSTHTHRQSKPEVL

SEQ ID NO: 1719 - DNA, 1612 bp, Glycine max
  CDS (93)..(1283)
gaacaaaaagcacattacatgagttgacatttttccatgtactcatgttaggtatctgcagctgaactcaagtttcaatctttcacctatccatggcttcctctctctttctttgcagtaactacgtcttccccacttcccaaaaccccttcagaagcaaccatttagctcaattcagaccaaatgggccctccaattttcactcaaagcttcggtttcagagaccccacttggtcagagccatggtttctgattccaacacttccaggagacaaatagagattgtgtatgaccccgaaggaaggattaacaagttggctgatgaagtggacagggaaactcccctttcaaggcttactttgttctctccttgcaagataaatgttttcttgagaataaccaacaagagggaagatgggtatcatgatttggcatccctttttcatgtgataagtctaggtgacataattaagttctctttgtcaccttcaaaaaccaaggatagcctgtcaaccaacgtgtctggggtgccccttgatgatagaaatttgattattaaggcgcttaatctttacaggaagaagactggcagtgacaagtacttttggattcatcttgataaacgggtgcctactggggcagggcttggcggtggaagtagcaacgctgcaactacactatgggcagccaatcaatttagtggctgtcctgcctctgagaaagaactccaagaatggtcaagtgagattggatcagatattcccttctttttctctcagggagcagcctattgcactggtcgaggagaggttgttcagaatattcctccaccagtatctctagatgttccaatggttctcataaagcccccagaagcatgttcaactgccgaagtctacaagcgtctatgtttggaccagactagtaatgttgaacctttaacattgctggagaagatctcaaagattggcatctcacaagatgtttgtattaatgatttagaacctccagcatttgaagttctcccctctctcaaaagactgaagcagcgaattagtgcagctggtcgtggagaatatgatgctgtttttatgtcaggaagcggaagcaccattgttggatttggttctcctgatcccccacaatttgtttatgatgatgatgaatacaaagatgtcttcttgtcagatgcctattttctcactcgagaggaaaatcagtggtaccaagaacctgcttcaagtccttctgcctctccttcagttgtttcggagtctgtttaacctacggtcttataagataagaagatagtaatgtaaaattgcattatctagtcttttttcctgcatcatttaatgatgtaaaaaaaaataagttttgctgctttaactgctgggaatcaataaaattaaagaaagaaaaatgaatgaataaatattaggccctgcctctgagttgttacaatgcccgaataattggtcttgtagcatgcatctcgggactgatcaaagacccaaaaataatgttgtaagtttaaggttttctaagttctgtttcaaagttggataaatttgattttaaaccattaaatgtaattagaatgtgattccaa

SEQ ID NO: 1720 - protein, 396 aa, Glycine max
MASSLFLCSNYVFPTSQNPFRSNHLAQFRPNGPSNFHSKLRFQRPHLVRAMVSDSNTSRRQIEIVYDPEGRINKLADEVDRETPLSRLTLFSPCKINVFLRITNKREDGYHDLASLFHVISLGDIIKFSLSPSKTKDSLSTNVSGVPLDDRNLIIKALNLYRKKTGSDKYFWIHLDKRVPTGAGLGGGSSNAATTLWAANQFSGCPASEKELQEWSSEIGSDIPFFFSQGAAYCTGRGEVVQNIPPPVSLDVPMVLIKPPEACSTAEVYKRLCLDQTSNVEPLTLLEKISKIGISQDVCINDLEPPAFEVLPSLKRLKQRISAAGRGEYDAVFMSGSGSTIVGFGSPDPPQFVYDDDEYKDVFLSDAYFLTREENQWYQEPASSPSASPSVVSESV

SEQ ID NO: 1721 - DNA, 885 bp, Buchnera aphidicola str. APS (Acyrthosiphon pisum)
  CDS (1)..(885): transl_table=11
atgaacaaacgaaaccaaaaaaaaatgatttatacatgtttatctcccgcaaaaattaatctttttctatatgtcacaggtagacgaaaagatggatatcataatatacaaacattgtttcaatttcttgattatggtgatcaattcaaaataattgctaataaaacaggtaatattgaattattcactgaaaaaaaaatttttatgaatgtacaaaatagtattattattgctgctaaactattaaaaaaaactgcactcttacaaggtaaattacaaaattctagttatggagcaaaaatatttttaaaaaaaaacatacctatgggtagtggattaggaggaggttcttcaaacgctgcaaccactttagttgttctaaacaaattatggaatacacaatatacattgaaagaactatctttattaggactcagaataggggctgacgtacctggttttgttatgggcaatacagctgttattgaaggaataggagatatattatatcctattgtgcaaaaagaaaaatggtatttagttgtctatccttgtattaatatttcaacacgttatatgttttcaagtccatttttaatgagtaatacagctaaaaaatcactccaagtattattaaaaacaccttttaaaaatgacttcgaaaatatagcaaaaaaacaatttgtcccaataaaaaaattaattagaatgttatcttcatatgcgccttcacgcatgactggcacaggatcttgtgttttttctgaatttgataataaaaaatctgcacaaaaaattttttccgtgttacctaaaaacgtccaagggtttatagcaaaaagtgttaatatttcaccattgcataaaactctttataaacgataa

SEQ ID NO: 1722 - protein, 294 aa, Buchnera aphidicola str. APS (Acyrthosiphon pisum)
MNKRNQKKMIYTCLSPAKINLFLYVTGRRKDGYHNIQTLFQFLDYGDQFKIIANKTGNIELFTEKKIFMNVQNSIIIAAKLLKKTALLQGKLQNSSYGAKIFLKKNIPMGSGLGGGSSNAATTLVVLNKLWNTQYTLKELSLLGLRIGADVPGFVMGNTAVIEGIGDILYPIVQKEKWYLVVYPCINISTRYMFSSPFLMSNTAKKSLQVLLKTPFKNDFENIAKKQFVPIKKLIRMLSSYAPSRMTGTGSCVFSEFDNKKSAQKIFSVLPKNVQGFIAKSVNISPLHKTLYKR

SEQ ID NO: 1723 - DNA, 852 bp, Escherichia coli O157:H7 EDL933
  CDS (1)..(852): transl_table=11
  misc_feature (302)..(302): r is g or a
atgcggacacagtggccctctccggcaaaacttaatctgtttttatacattaccggtcagcgtgcggatggttaccacacgctgcaaacgctgtttcagtttcttgattacggcgacaccatcagcattgagcttcgtgacgatggggatatccgtctgttaacgcccgttgaaggcgtggaacatgaagataacctgatcgttcgcgcagcgcggttgttgatgaaaactgcggcagacagcgggcgtcttccgacgggaagcggtgcgaatatcagcattgacaagcgtttgccgatggrcggcggtctcggcggtggttcatccaatgccgcgacggtcctggtggcattaaatcatctctggcaatgcgggctaagcatggatgagctggcggaaatggggctgacgctgggcgcagatgttcctgtctttgttcgggggcatgccgcgtttgccgaaggcgttggtgaaatactaaccccggtggatccgccagagaagtggtatctggtggcgcaccctggtgtaagtattccgactccggtgatttttaaagatcctgaactcccgcgcaatacgccaaaaaggtcaatagaaacgttgctaaaatgtgaattcagcaatgattgcgaggttatcgcaagaaaacgttttcgcgaggttgatgcggtgctttcctggctgttagaatacgccccgtcgcgcctgactgggacaggggcctgtgtctttgctgaatttgatacagagtctgaagcccgccaggtgctagagcaagccccggaatggctcaatggctttgtggcgaaaggcgctaatctttccccattgcacagagccatgctttaa

SEQ ID NO: 1724 - protein, 283 aa, Escherichia coli O157:H7 EDL933
  misc_feature (101)..(101): The Xaa at location 101 stands for Asp, or Gly.
MRTQWPSPAKLNLFLYITGQRADGYHTLQTLFQFLDYGDTISIELRDDGDIRLLTPVEGVEHEDNLIVRAARLLMKTAADSGRLPTGSGANISIDKRLPMXGGLGGGSSNAATVLVALNHLWQCGLSMDELAEMGLTLGADVPVFVRGHAAFAEGVGEILTPVDPPEKWYLVAHPGVSIPTPVIFKDPELPRNTPKRSIETLLKCEFSNDCEVIARKRFREVDAVLSWLLEYAPSRLTGTGACVFAEFDTESEARQVLEQAPEWLNGFVAKGANLSPLHRAML

SEQ ID NO: 1725 - DNA, 945 bp, Synechococcus sp. WH 8102
  CDS (1)..(945): transl_table=11
atgcggcctccgctgatgggcacgatcacggtgacggctccggccaaggtgaatcttcacctggaggtgctcgggatcagatctgacggttttcacgagctggcgatggtgatgcagagcatcgatctcgccgatcgcctcagctttcaaaccacggccgatgccgcactgacgctcagctgtgacgatccgtccctcagccttggtgaggacaacctggtgatcagggccgctcagttgctgcgcagccgctccggtttcaacgaattgggtgctgccatccacctggagaaacgcattcccattggtgccggcctcgccggagggtccagtgatggtgccgctgccctggtgggtctgaatgcgctctggggtctgggccacagccgttcagacctgcagcggtttgcggctgaactcggttctgacatgcccttctgtgtggcggggggcagtcagctctgtttcggtcgcggcgagctgctggagccgttgccggctgtgcaggaatccctggcggtgctgctggtgaaggatccacgcgtgagtgtgtcgactccctgggcctatcgccgctgccgggagttgcagggtgatcgctacctctcgggagaggacgccttcgagcaacgccgacaggtcttgcgagacatggcctggacccaaccgatccgtgcggcggagccgccaccgttgcaaaacgatctgcaggaggttgtggagcctgagaccccagcggttcaggcggcgcttcgcttgctgtccacccttgaaggcacccttgccgtcgccatgagcggatcgggccccagttgttttgcactgtttgcagatccaaccagctgtgcggctgcccaggccacgcttgaacagcaacttgctgcggagggattgcaaagctggtgctgcaatttgcgaccggacggcgtgaggatcgaagcatga

SEQ ID NO: 1726 - protein, 314 aa, Synechococcus sp. WH 8102
MRPPLMGTITVTAPAKVNLHLEVLGIRSDGFHELAMVMQSIDLADRLSFQTTADAALTLSCDDPSLSLGEDNLVIRAAQLLRSRSGFNELGAAIHLEKRIPIGAGLAGGSSDGAAALVGLNALWGLGHSRSDLQRFAAELGSDMPFCVAGGSQLCFGRGELLEPLPAVQESLAVLLVKDPRVSVSTPWAYRRCRELQGDRYLSGEDAFEQRRQVLRDMAWTQPIRAAEPPPLQNDLQEVVEPETPAVQAALRLLSTLEGTLAVAMSGSGPSCFALFADPTSCAAAQATLEQQLAAEGLQSWCCNLRPDGVRIEA

SEQ ID NO: 1727 - DNA, 1044 bp, Chlamydomonas reinhardtii
  CDS (1)..(1044)
atgttacaatcaggagctgcccagcgtggcgtctcgcggacgagttcgcttgcacggaaagttgcccctgctcgaattgcgggcgcgcgcagacgcacatcagcagttgtggttcacgcgaactataagcctaacgcggtccagcttttttcgccctcaaagatcaacctgttcctgcgtgtcgttcgtcgtcgtgaggatgggtaccatgacctggcgtcgctgttccacgtgattgacctgggtgactacatggagttcgagaccacccctcacgcgctgcaagacacgttggagtgctccgaccccaccatccccaccgacgagtccaacctggtcatcaaagcgctgaacctgtaccggcgcaagacgctgcagaccatgtactataaggtcaagctgcacaagcgcgtgccgcacggcgccggcctgggcggcggcagcggcaacgctgccaccacgctgttcgcggccaacaagctcatgggcggcatcgcctccaacgaggacctgctggagtggtcgggcgagatcgggtcggacatctcggtcttcttctccaacaccggcgccgcctactgcaccggccgcggcgaggtggtggaggacgtgccgccgcccgtgccgctggacacgcccatgctgctggtcaagccgccggtggggctggccacgcccaagatcttcaagtcgttggacctggaccgccgctccagcgccgacccgcgcggcctgcttgacaccatcgccgccgccaagggcgtggaccaggccgccgccgtgaacgacctggagcagcccgccttcgacaacctgcccgagcttgccgcgctaaaacagcggctgatcgagagcgggcagttcaggtccgtgttcatgaccggcagcggctccaccatcgtgtgcttcggctccgacgccgtgccggccttcttgcgcgaggagcctcagtacaaggacctcttcatctcgcccacccgcctcatcacgcgcaagcccaacggctggtatgagcacagtgggatgtggaaggagcagctgtga

SEQ ID NO: 1728 - protein, 347 aa, Chlamydomonas reinhardtii
MLQSGAAQRGVSRTSSLARKVAPARIAGARRRTSAVVVHANYKPNAVQLFSPSKINLFLRVVRRREDGYHDLASLFHVIDLGDYMEFETTPHALQDTLECSDPTIPTDESNLVIKALNLYRRKTLQTMYYKVKLHKRVPHGAGLGGGSGNAATTLFAANKLMGGIASNEDLLEWSGEIGSDISVFFSNTGAAYCTGRGEVVEDVPPPVPLDTPMLLVKPPVGLATPKIFKSLDLDRRSSADPRGLLDTIAAAKGVDQAAAVNDLEQPAFDNLPELAALKQRLIESGQFRSVFMTGSGSTIVCFGSDAVPAFLREEPQYKDLFISPTRLITRKPNGWYEHSGMWKEQL

SEQ ID NO: 1729 - DNA, 936 bp, Prochlorococcus marinus str. AS9601
  CDS (1)..(936): transl_table=11
atgcaagattttgctaaaaagaaaattaatataaaatctcctgccaaaataaatttgcaccttgaagtgattggtaaaagagaggatggatttcacgagttagcaatgattatgcaaaatatcgatcttgctgattatttagaatttgaaattaataatgaaggtttaattaaacttgagtctgattgtaatgatttaagcctatctgatgataacttaattgttaaatcggcaaacctattaaggaaaaaatcaaatatagattacggtgcgaatatatttttaagaaaaaatatcccaattggtgcaggattagctggtggatccagtaatgcagcagcaacattaattggtcttaataatttatgggatttgaaattagatcaagaaactttatgttcattagcatcaactttaggatctgatattcccttttttataaatggtggtattcaattatgttttggaagaggcgaaattttggagaaattagattcaacccttgaatatggagcaattcttttaaaaaatcctaatgtatcagtatccacagctgaaacttataaaaaatatagtaatagattttgtgatcaatatcttactgatagagaaatgattgagaacataagaaaaaatttaagagataatggtttaaataacttaaattttgataatcaacatttatctattaaaaatgatttgcagttagttgttgaaaatgaaaatgattctgtaaagcaggcattatatttactttctaaattagaaaattgtctaacattttcaatgagtggatcaggacctacatgctttgcactctttaaagataaagagactgctaaaaaagaattaactgcaaattctaaattatttaaagataaaggctatgattcatgggtttgcactttccttgaaaagggaataacattcatataa

SEQ ID NO: 1730 - protein, 311 aa, Prochlorococcus marinus str. AS9601
MQDFAKKKINIKSPAKINLHLEVIGKREDGFHELAMIMQNIDLADYLEFEINNEGLIKLESDCNDLSLSDDNLIVKSANLLRKKSNIDYGANIFLRKNIPIGAGLAGGSSNAAATLIGLNNLWDLKLDQETLCSLASTLGSDIPFFINGGIQLCFGRGEILEKLDSTLEYGAILLKNPNVSVSTAETYKKYSNRFCDQYLTDREMIENIRKNLRDNGLNNLNFDNQHLSIKNDLQLVVENENDSVKQALYLLSKLENCLTFSMSGSGPTCFALFKDKETAKKELTANSKLFKDKGYDSWVCTFLEKGITFI

SEQ ID NO: 1731 - DNA, 939 bp, Prochlorococcus marinus str. MIT 9515
  CDS (1)..(939): transl_table=11
atgacaaaattatctacaactaaaatttgtgtgaaatcacctgcgaagataaacctccatcttgaaattatcggaaaaagagaggatggatatcatgaattagcaatgataatgcagaatattgatctttttgactatatagaatttgagaataatcaaataggtgatattgaattaaagtctaataacaaagatttaagtctcaaggatgataacttaataataaaagcagcaaattatgtaaaagatatatcaaaaaaaaaagatttaggagctaatatctttcttaaaaaaaatattcctattggtgctggtttagctggaggttccagcaatgcagccgcaacaataattggacttaataaattatgggatttggatcttgataacgaaactatgctttcactttcctcaaaactaggatcagatgtacctttttttataaacggaggatgccaattttgttttggaaggggagaaattcttgaaaattataattctaaatttgattatggcgtaatactcttaaaaaatccaaatatttcaatctcaactgcagatacttacaaaaaatatagtaaggaatattgctcaaattttttaactgaatctgaaaaaacaaatgatatcagaaatgatttgagaataaacggatttaatgatcttaattcttcaaatcagattataaaagtaaaaaatgatttacaaattatcgttgaaaaagaaaatgattctgtaaagaaggcattatatcttctctcaaatttgcaaaattgtttatctttttcaatgagtggatctggcccaacatgttttgctctttttaaagatataaataaggctaatgaagtttttgaacaaaatcataaaatgtttaataataatggatttgaagcgtgggtctgtaaattaattaatagtggcataacctttttgtaa

SEQ ID NO: 1732 - protein, 312 aa, Prochlorococcus marinus str. MIT 9515
MTKLSTTKICVKSPAKINLHLEIIGKREDGYHELAMIMQNIDLFDYIEFENNQIGDIELKSNNKDLSLKDDNLIIKAANYVKDISKKKDLGANIFLKKNIPIGAGLAGGSSNAAATIIGLNKLWDLDLDNETMLSLSSKLGSDVPFFINGGCQFCFGRGEILENYNSKFDYGVILLKNPNISISTADTYKKYSKEYCSNFLTESEKTNDIRNDLRINGFNDLNSSNQIIKVKNDLQIIVEKENDSVKKALYLLSNLQNCLSFSMSGSGPTCFALFKDINKANEVFEQNHKMFNNNGFEAWVCKLINSGITFL

SEQ ID NO: 1733 - DNA, 960 bp, Prochlorococcus marinus str. NATL1A
  CDS (1)..(960): transl_table=11
atggaaccttccaaagcaaatgaagattttcttatcgcaaaagcacatgcaaaaattaatctacatttagaggttttaggtattaggagcgatggctttcatgaattagcaatggtcatgcaaagtattaatttaagtgatcagttgaagatgataaaaagagtagataatactattaatctaaaatctaataataaagaaattagtaatggtgacgataatctaataataaaagcttcaaagctgttgagaaataaagtagaaaatcaagaattaggtgttgatattgaacttgagaaaaacattcctattggagcaggattggcagggggatctacagatgcagctgcaaccttacttggattaaataaactctggaagctaaatcttaagactgatgaattagagaacctatcaaaagaaataggatcagatatccctttttgcatatcaggagggaggcaaatatgttttggtagaggtgaaattttagaaaaattgaaatttgatcaaattcagttaggtcttattttggttaaagacccttcaatacaagtatctactccagttgcatacaaaaaatataaagatcagtttggtgaaagctatcttgaagatgatagggattttgaaatcaaaagaaactctattagatctattgactggtctgatcagtcgctttttgataatcgtaaagaaatacaaaatgatttacaaaaaagcgttcggcctataacaccagaggttgagaagtcattggatttattgtctagtttgccagattcacgtcttgtttcaatgagtggttctggtccaagttgttttgccttgtttcaaaattatgaccaagcaaataaagtactcaaagaacatgttaatgaatttgaaagggctggtttatcagcttgggcatgttcaatgatgtctaatggagttgaattaagaaatgaattcatctag

SEQ ID NO: 1734 - protein, 319 aa, Prochlorococcus marinus str. NATL1A
MEPSKANEDFLIAKAHAKINLHLEVLGIRSDGFHELAMVMQSINLSDQLKMIKRVDNTINLKSNNKEISNGDDNLIIKASKLLRNKVENQELGVDIELEKNIPIGAGLAGGSTDAAATLLGLNKLWKLNLKTDELENLSKEIGSDIPFCISGGRQICFGRGEILEKLKFDQIQLGLILVKDPSIQVSTPVAYKKYKDQFGESYLEDDRDFEIKRNSIRSIDWSDQSLFDNRKEIQNDLQKSVRPITPEVEKSLDLLSSLPDSRLVSMSGSGPSCFALFQNYDQANKVLKEHVNEFERAGLSAWACSMMSNGVELRNEFI

SEQ ID NO: 1735 - DNA, 960 bp, Prochlorococcus marinus str. MIT 9303
  CDS (1)..(960): transl_table=11
atgagcatatctagcccttctgctgcttcagggcatctggttagcgtctcggcgccagccaagatcaatctccatcttgaggtgcttggcctcaggtctgatggttttcatgagctagcgatggtgatgcaaagcatcgaactcgctgatcaacttcatttccgcaatacggctgatggcaccatcagcctgcgctgcgatgattccagcctcagcactgctggcgataatttgatcgtgcaagctgcgcatttattacgtgagcgctcagggttctctgaacttggtgccgcgattgaattgcaaaaacgcatcccaattggagctggtcttgcgggcggctcaagtgatggtgcagcaacactggtggggttaaacggtctctggaatctcaatttttctcagggtcaacttgaaggttttgcggctgagcttggctccgatatgcccttttgcctggcaggtggaagccaattgtgtttcggtcgtggggaaaggttggaatcgctacaagcgatgcaagcatcaatggccgtggtgttggtgaaggatccatcagtgagcgtttcaaccccttgggcttatggacgctgtaaggaacttttcaggagtcgttatctttcacaggaatctgattttgagcaacgtcgtcagcagctcagagaatcttcttggctgaatcctttgcgggctgatgatccaccacctctgcacaacgatcttcaggctgtggttgcacccgaagtatttgctgtgcaaaccacattgaagttgctcagtgatttgcctggttctcttgctgtagcgatgagtggatctggtccaagctgttttgccctttttgctgacgttgattcagctcaggcagcccttaagcgccaacagcctgccttcgacgcagctggtttaagcagttggtgctgcgcgttccgctctgaaggcatcaaactggaagcatga

SEQ ID NO: 1736 - protein, 319 aa, Prochlorococcus marinus str. MIT 9303
MSISSPSAASGHLVSVSAPAKINLHLEVLGLRSDGFHELAMVMQSIELADQLHFRNTADGTISLRCDDSSLSTAGDNLIVQAAHLLRERSGFSELGAAIELQKRIPIGAGLAGGSSDGAATLVGLNGLWNLNFSQGQLEGFAAELGSDMPFCLAGGSQLCFGRGERLESLQAMQASMAVVLVKDPSVSVSTPWAYGRCKELFRSRYLSQESDFEQRRQQLRESSWLNPLRADDPPPLHNDLQAVVAPEVFAVQTTLKLLSDLPGSLAVAMSGSGPSCFALFADVDSAQAALKRQQPAFDAAGLSSWCCAFRSEGIKLEA

SEQ ID NO: 1737 - DNA, 852 bp, Clostridium thermocellum ATCC 27405
  CDS (1)..(852): transl_table=11
atggaatcaataagtttgaaagcccatgcaaaaattaatttgtcccttgatgtaattggaaagagacaggatggttatcatgaggtcagaatgattatgcagtccatagctttgcatgacgaagttgtaatcgaaaaaagggctgcaggaatcaaagtggaatgcgacaagccgtgggtgcccgaaggaagcggcaatattgcttataaagcggcaaacctcatgatggaaaggtataagattgaaagcggcgttggcattaaaatcctaaagagaattcccgtggcggcaggccttgcagggggaagtgccgatgcggcggcggtaattaaagggatgaatgaactttttaatttgaatgctgatgaagccgaacttatggacatcggaaagcaggtgggagcggatgtgcctttctgcatcaagggaggaaccatgctctccgaaggaatcggggagaagcttacaaaaatcccttcttttgagggagtgaatattgtattggtaaaacccaaagtcggcgtgtcgacagcctgggtatacagcaatttaaagctgaatgaaatatcctcaagacctgataccgaacttttgataaaagcaatttatgagaaaaatattggctgtctggcgcaaaacatgacaaatgtgctggagacagttacaataaaaaagtatggagttataaatgatattaaaaacgagctcttgaggctcggagctttgggaagcatgatgagcggaagcggtccttccgtgtttggcatatttgaaaatgaaaaacaggcttgtcttgcttatgaaggccttaaaaacagtgagtgggaatgctttgttacacaaacaatataa

SEQ ID NO: 1738 - protein, 283 aa, Clostridium thermocellum ATCC 27405
MESISLKAHAKINLSLDVIGKRQDGYHEVRMIMQSIALHDEVVIEKRAAGIKVECDKPWVPEGSGNIAYKAANLMMERYKIESGVGIKILKRIPVAAGLAGGSADAAAVIKGMNELFNLNADEAELMDIGKQVGADVPFCIKGGTMLSEGIGEKLTKIPSFEGVNIVLVKPKVGVSTAWVYSNLKLNEISSRPDTELLIKAIYEKNIGCLAQNMTNVLETVTIKKYGVINDIKNELLRLGALGSMMSGSGPSVFGIFENEKQACLAYEGLKNSEWECFVTQTI

SEQ ID NO: 1739 - DNA, 891 bp, Clostridium difficile 630
  CDS (1)..(891): transl_table=11
atggattttataagactaaagagtagagcaaaaataaatttatccattgatgtcttgggaaaaaggcaagacggttatcattttgttgaaatgataatgcaaacgatagatttatacgatatagtaaagataaaagaattagacgaagatgaaataaaggtaaaaagcactagtttagatattcctttagatgaagataatattgtttataaagctgccaaaatacttaaaaataaattttatataaaaaaaggtgtagaaatattcatagaaaaaaatattcctgtagcagcagggatggctggaggaagttctaatgcagccgcagtattagtaggtttaaatcacctatgggaacttagattatctgaagatgaattaaaagaaataggacttaatttgggcgcagatgttcctttttgtatatcaggaagacctgccttagctcaaggtattggagaaaagctaacaaacatcaaaggtttaccatgtgatacaaatatattgatatgcaaaccagacttattcgtttctactaaagaagtttatcaaggattagatttgaataatattaaaaaaagaccaaataataaatatttgatagagtgtttaaaatctgaagatataaaagctgtatcagaaagcatggtaaatattcttgaaaatgttactataggtaaacacaaagaaataagtgatataaaacaagtaatgatgaaaaataatgctttaggttctatgatgagtggaagtggtcctacagtttttggactatttaaaaataaagaagatgctctaattggaaaaaaagaattattaaaaaaatataaacaggtgtatgttgttaatagcagtcaaaaaggggttgaaatttgtggagaatttaactaa

SEQ ID NO: 1740 - protein, 296 aa, Clostridium difficile 630
MDFIRLKSRAKINLSIDVLGKRQDGYHFVEMIMQTIDLYDIVKIKELDEDEIKVKSTSLDIPLDEDNIVYKAAKILKNKFYIKKGVEIFIEKNIPVAAGMAGGSSNAAAVLVGLNHLWELRLSEDELKEIGLNLGADVPFCISGRPALAQGIGEKLTNIKGLPCDTNILICKPDLFVSTKEVYQGLDLNNIKKRPNNKYLIECLKSEDIKAVSESMVNILENVTIGKHKEISDIKQVMMKNNALGSMMSGSGPTVFGLFKNKEDALIGKKELLKKYKQVYVVNSSQKGVEICGEFN

SEQ ID NO: 1741 - DNA, 936 bp, Prochlorococcus marinus str. MIT 9301
  CDS (1)..(936): transl_table=11
atgcaagatttagctaaaccgaaaattaagataaaatctcctgccaaaataaatttgcaccttgaagttattggtaaaagagaggatggatttcatgagttagcaatgattatgcaaaatatcgatctttctgattatttagaatttgaaataaataatgaaggtttaattaaacttgagtctgattgtaatgatttaagcttgtctgatgataacttaattgttaaatcggcaaatctattaagaaaaaattcaaatataaattacggtgcgaatatatttttaagaaaaaatattccaattggcgcaggattagctggtggatccagtaatgcagcagcaacattaattggtcttaataagttatggaatttggacttagatcatggaacattatgttcattagcatcaactttaggatctgatattcccttttttataaatggtggcattcagttatgttttggaagaggagaaattttggagaaattagattcaaactttgaatatggagtaattcttttaaaaaatccaaatgtatcagtatctacagctgaaacttataaaaaatatagtaatagattttgtgataatcatcttaatgatagaaaaatgattgagaacataagaaaaaatttaagggataatggtttgaataaattaaattttgataatcaacatttatttattaaaaatgatttgcagttagttgttgaaaatgaaaatgattctgtaaagcaggcattatatttactttctaaactagaaaattgtctcacattttcaatgagtggatcaggacctacatgctttgcactctttaaagatatagagactgcaaaaaaagaattaactgctaattctaaattttttaaagataaaggctatgattcatgggtttgcactttccttgaaaagggaataacattcatttaa

SEQ ID NO: 1742 - protein, 311 aa, Prochlorococcus marinus str. MIT 9301
MQDLAKPKIKIKSPAKINLHLEVIGKREDGFHELAMIMQNIDLSDYLEFEINNEGLIKLESDCNDLSLSDDNLIVKSANLLRKNSNINYGANIFLRKNIPIGAGLAGGSSNAAATLIGLNKLWNLDLDHGTLCSLASTLGSDIPFFINGGIQLCFGRGEILEKLDSNFEYGVILLKNPNVSVSTAETYKKYSNRFCDNHLNDRKMIENIRKNLRDNGLNKLNFDNQHLFIKNDLQLVVENENDSVKQALYLLSKLENCLTFSMSGSGPTCFALFKDIETAKKELTANSKFFKDKGYDSWVCTFLEKGITFI

SEQ ID NO: 1743 - DNA, 861 bp, Herminiimonas arsenicoxydans
  CDS (1)..(861)
atggttcgcacactcaacaactgcccggcgccggccaagctgaatctttttttgcacgtcaccgggcgacgcgcagatggttaccacctgctacaaagcgtattccagctgatcgatcgcggcgatgtactgcatttttccgtacgcgacgatggcctcatccatcgcagcacggaattggcaggcgtgccggctgacagcgatctggtcgtgcgtgccgcgagactgttgcaaacggaagcaaaaaaacaaggcaagactcccggcgcggatatcgccatcgaaaaaaaactgcccatgggcggcggtctgggcggcggctcgtccgatgccgcgaccacgctgctcgccctcaaccatctttggcaaaccggattgacgcgcgccgaattaatggcgctcggactgcaactaggggcggacgtgccgttttttctattcggccagaatgcatttgccgagggcataggcgaggctttaatggcggtaaaaacaccggaatcctggttcctggtgatcgaacccggcgtgtcggtaccgacccagcagatattttcttcattggaattgacaagggatacgaaacccgtcaaaatatcggacttttccagagctcaagaaagcttcggtaaaaacgacctgcaagtcgtggctgcaaacttgtttccgccgatagccgacgccattaaatggctgcagcaattcggagatgcgagaatgacggggtccggcgcttgtgtgttttgtccgtttaaggaagaacaacaagtcgatgcagtactggcaacggtaccgcagcaatggaaagcatggaaagccaaagcgatcacgcatcatccgctcgcttatttggcaacgtaa

SEQ ID NO: 1744 - protein, 286 aa, Herminiimonas arsenicoxydans
MVRTLNNCPAPAKLNLFLHVTGRRADGYHLLQSVFQLIDRGDVLHFSVRDDGLIHRSTELAGVPADSDLVVRAARLLQTEAKKQGKTPGADIAIEKKLPMGGGLGGGSSDAATTLLALNHLWQTGLTRAELMALGLQLGADVPFFLFGQNAFAEGIGEALMAVKTPESWFLVIEPGVSVPTQQIFSSLELTRDTKPVKISDFSRAQESFGKNDLQVVAANLFPPIADAIKWLQQFGDARMTGSGACVFCPFKEEQQVDAVLATVPQQWKAWKAKAITHHPLAYLAT

SEQ ID NO: 1745 - DNA, 882 bp, Burkholderia vietnamiensis G4
  CDS (1)..(882): transl_table=11
atgaccgattcgacccgctcgctgcgcaactgccttgcgcccgcgaaactcaacctgttcctgcacatcaccggccgccggccgaatggctatcacgatctgcagagcgtgttccagttgctgaactggggcgacacgctgcacttcacgctgcgcgacgacggccgcgtcgcacgcgcgaccgacgtgccgggcgtgccagaggaaagcgatctcgtcgtgcgcgcggcgaacctgctgaaagcacacaccggcaccgtcgcgggcgtcgacatcgagatcgacaagtgcctgccgatgggcgcgggccttggcggcggcagctcggatgcggcgacgacgctgctcgcgctgaaccgtctgtggcaactcgacctttcgcgtgcggagctgcagtcgctcgcggtgaaactcggcgcggacgtgccgttcttcgttttcggaaaaaatgcgttcgcagagggtatcggagaagaattagctgaggtacaattgccgactcgctggttcctggttgtgacgccgcgagttcatgtccccaccgctgagattttttcagatgagctgttgacaagggacacaaagccagtcacaattgctgactttcttgcacggcgtaacagcgatgcgggatggccagacagtttcggccggaacgatatgcagcaagttgtgacaagtaagtacgcggaagttgcacaggtggtcaaatggttgtataatgtgaccccttcaaggatgaccggctccggagcaagcgtgtttgcggtgtttcgaagcaggcacgaggcagaagcggtgaaagccaatctgcccaccggttggaatggtgcagttgccgagagcctgaacgagcatccgctcttcgctttcgcgtcatga

SEQ ID NO: 1746 - protein, 293 aa, Burkholderia vietnamiensis G4
MTDSTRSLRNCLAPAKLNLFLHITGRRPNGYHDLQSVFQLLNWGDTLHFTLRDDGRVARATDVPGVPEESDLVVRAANLLKAHTGTVAGVDIEIDKCLPMGAGLGGGSSDAATTLLALNRLWQLDLSRAELQSLAVKLGADVPFFVFGKNAFAEGIGEELAEVQLPTRWFLVVTPRVHVPTAEIFSDELLTRDTKPVTIADFLARRNSDAGWPDSFGRNDMQQVVTSKYAEVAQVVKWLYNVTPSRMTGSGASVFAVFRSRHEAEAVKANLPTGWNGAVAESLNEHPLFAFAS

SEQ ID NO: 1747 - DNA, 903 bp, Bradyrhizobium sp. ORS278
  CDS (1)..(903): transl_table=11
atgttggcgtccacggtcaccggcgcgctgcaggagcagggccgcgccaaggtcaatctcacgctgcgcgtcgtcggccgccgcgccgacggctatcatgatctcgaaagcgtggtggcgttcgccgactgcgccgaccagctcacgctggcgccgagcccggagctcacgctgaccaccaccgggccgctggcggacgcgtgcggcgacacttcggacaatctcgtgctcaaggcggcgcgcctgctcgctgaggccgttcccggcctgacgctcggcgccttcactctggagaaggtgctgccggtggccgccggcatcggcggcggctcggccgacgcggcggccgcgctgcggctgctggcgaggctgaacggtctgtccctcgatgatccgcgcctgcaggcggtggcgctgaagaccggtgccgacgtgccggtctgcgtgccctcgcgcgcctgcaccatgaccggcgtcggcgagaacctgcagccgctggcgttgcccgtcctgccgtgcgtgatgatcaacccgcgcgtgccggtcgcgaccaaggacgtgttccaggcgctcgggctgaagccgggcgatctgctggtcggggtgagcgacgtgctggcggcgccagcgtggccgaaggctggcgcgtcgattggcgattgggtcgcggcgctcgaccaggtgaagaacgatctcgagcccccggcgctgaaggtgcagccgatcatcggtaccgtgctcgatgcgctgcgtgcgagcaacggagtgctgctggcgcggatgtccggctccggcgcgacgtgctttgcgatctatggcggcgatgctgatgcgaagatcgcgggtgccgcgatcgcagcggcgcatcccgaatggtgggtgcatgcgggcacgctgagctaa

SEQ ID NO: 1748 - protein, 300 aa, Bradyrhizobium sp. ORS278
MLASTVTGALQEQGRAKVNLTLRVVGRRADGYHDLESVVAFADCADQLTLAPSPELTLTTTGPLADACGDTSDNLVLKAARLLAEAVPGLTLGAFTLEKVLPVAAGIGGGSADAAAALRLLARLNGLSLDDPRLQAVALKTGADVPVCVPSRACTMTGVGENLQPLALPVLPCVMINPRVPVATKDVFQALGLKPGDLLVGVSDVLAAPAWPKAGASIGDWVAALDQVKNDLEPPALKVQPIIGTVLDALRASNGVLLARMSGSGATCFAIYGGDADAKIAGAAIAAAHPEWWVHAGTLS

SEQ ID NO: 1749 - DNA, 930 bp, Synechococcus sp. WH 7803
  CDS (1)..(930): transl_table=11
atgacggctccggtctgcgtcactgcacccgccaagatcaatttgcatcttgaggtgcttggcctgcgtgccgatggttttcacgagctggccatggtgatgcagagcatcgaccttcaggatcagctgcattgcgaaaacacctcagacggaagcatttccctgcggtgtgatgcttctgaactcagttgtggtgaagacaacctgattgtccgcgctgcccgattgctcagggaacggtcaggtttcagtgaactgggagcacggatgcatctgaaaaagcacattccaatcggtgcaggactggcgggtggttccagcgatggagcggcggctcttgtggcactcaatgagctctgggggttgagcctggatgcaagccaactggagcgttttgctgctgagctgggctctgatatgccgttttgcgttgccggtgggacacaactgtgctttggacgcggtgaacgactggaacctctgccgcctttggaggctcagctagggattcttcttgtgaaagatcccgacgtgagtgtgtcgactccctgggcgtacagcgagtgccgccgccaacgtggcagcacctatctccaagatgaagctgcatttgaagcacgtcgtgaagcgctcagggcggcgcagtggctgcatcccctcggtggggaggcgccgccattgcgcaacgatctccaaaccgtggtggagcccctcacgccctctgtgcgcgatgcgttgcagtgtcttgcgtccttaccaaactgccttcaggcggcgatgagcggttcggggcccagttgttttgcgctgtttcacaaccggggtgaggcggatcgtgccaaggaccaggtgcagacccaattggatcagttgggtttacgcagttggagttgctcgttgatcccccacggggtcaagctgatggcatga

SEQ ID NO: 1750 - protein, 309 aa, Synechococcus sp. WH 7803
MTAPVCVTAPAKINLHLEVLGLRADGFHELAMVMQSIDLQDQLHCENTSDGSISLRCDASELSCGEDNLIVRAARLLRERSGFSELGARMHLKKHIPIGAGLAGGSSDGAAALVALNELWGLSLDASQLERFAAELGSDMPFCVAGGTQLCFGRGERLEPLPPLEAQLGILLVKDPDVSVSTPWAYSECRRQRGSTYLQDEAAFEARREALRAAQWLHPLGGEAPPLRNDLQTVVEPLTPSVRDALQCLASLPNCLQAAMSGSGPSCFALFHNRGEADRAKDQVQTQLDQLGLRSWSCSLIPHGVKLMA

SEQ ID NO: 1751 - DNA, 852 bp, Klebsiella pneumoniae subsp. pneumoniae MGH 78578
  CDS (1)..(852): transl_table=11
atgatgacccgctggccctctcctgcaaaactgaatctgtttttatatatcaccggccagcgggccgatggttaccataccctgcaaacgctgtttcagtttctcgattacggcgatacgttgaccatcgaaccgcgtactgacggccaactgcgcctgctgacgccggtggccggcgtgccggacgaggagaatctgatcgttcgcgccgcgcgtctgctgatgcatgccgccagcgaaagcgatcgcctgccggcgggcagcggcgccgatatcagtatcgataagcgcctgccgatgggcggcggcctgggcggtggctcctccaatgccgccaccgtgctggtggcgctcaaccatctgtggggctgcggtctctcggaagatgagctggcgactcttggccttcagctgggggccgatgtgccggttttcgtgcgcggccatgccgccttcgccgagggggtgggtgaaatactgacgccggtagaacccgaggaaaaatggtacctggtggcccacccgggggtcagtattccgacgccgatcatttttcgcgatccggagctaccacgaaataccccgcgccggtcaattaatacgttattaaattgtgaattcagcaacgattgcgagcttatcgcaagaaaacgttttcgcgaggttgatgccgcgctttcctggctgttagaatatgcgccgtcacgcctgaccggcacaggggcctgtgtgtttgctgaatttaacaccgaatccgctgcccgtcaggtgctggacactgccccggcatggctaaatggctttgtggcgcgcggagttaacctttcgccgctcaagcaggccctgctctga

SEQ ID NO: 1752 - protein, 283 aa, Klebsiella pneumoniae subsp. pneumoniae MGH 78578
MMTRWPSPAKLNLFLYITGQRADGYHTLQTLFQFLDYGDTLTIEPRTDGQLRLLTPVAGVPDEENLIVRAARLLMHAASESDRLPAGSGADISIDKRLPMGGGLGGGSSNAATVLVALNHLWGCGLSEDELATLGLQLGADVPVFVRGHAAFAEGVGEILTPVEPEEKWYLVAHPGVSIPTPIIFRDPELPRNTPRRSINTLLNCEFSNDCELIARKRFREVDAALSWLLEYAPSRLTGTGACVFAEFNTESAARQVLDTAPAWLNGFVARGVNLSPLKQALL

SEQ ID NO: 1753 - DNA, 978 bp, Kineococcus radiotolerans SRS30216
  CDS (1)..(978): transl_table=11
atgcccggcagtcccgaccccgcgccccccgagctcgcctcggtcaccgcgcgcgcccccgcgaaggtcaacctgctgctgcaggtgggcccccgacgcgacgacggctaccacgacctcgtcaccgtcttccaggccgtctcgctgcacgaggaggtgaccgtcacccccgccgacgagttcgggatcaccgtcgagggggtcgggggcaccgacgtcggcggcgtcccgctggacgggacgaacctggccctgcgcgccgcccggctgctcgccgagcgcgccggggtggaccgggccgtgcacgtgcacgtgcgcaaggaggtccccgtggccggcgggatggccggcggctccgccgacgccgccgccgccctcgtggcctgcgactccctgtggcgcctgcgcctgggcctggacgccctcgccgagctgggcgccgagctgggctccgacgtccccttcggcctgcacgggcgcaccgcggtcggcaccgggcgcggcgagcacctcgtcccggtgctgaccggcgcctcctccgcgtgggtgttcgtcctcgccgagggcggcctctccaccccggccgtcttcgccgagtgcgaccgccggcgcgaggccaccggccacgacgcgccgccgggacgcctggaggccgtcgaggcggccctgcgcggcggggacgtcgacgccctcggcgcggcgttgtccaacgacctgcaggacgccgcctgcgcgctggaccccgccctggccggcaccgtcgcggccgggcgccgcgccggggccgtggccgggatcgtctccggctccgggcccaccgtcgccctgctcgcccgctcgcccgccgcggcccgccgcctcgccctcgacctcgaacccctgttcggggccgagcggctgcgcaccgccaccggaccggcccccggtgcccgggtcctcgaagccgtctccaccccgtctcccggagggaggtcctga

SEQ ID NO: 1754 - protein, 325 aa, Kineococcus radiotolerans SRS30216
MPGSPDPAPPELASVTARAPAKVNLLLQVGPRRDDGYHDLVTVFQAVSLHEEVTVTPADEFGITVEGVGGTDVGGVPLDGTNLALRAARLLAERAGVDRAVHVHVRKEVPVAGGMAGGSADAAAALVACDSLWRLRLGLDALAELGAELGSDVPFGLHGRTAVGTGRGEHLVPVLTGASSAWVFVLAEGGLSTPAVFAECDRRREATGHDAPPGRLEAVEAALRGGDVDALGAALSNDLQDAACALDPALAGTVAAGRRAGAVAGIVSGSGPTVALLARSPAAARRLALDLEPLFGAERLRTATGPAPGARVLEAVSTPSPGGRS

SEQ ID NO: 1755 - DNA, 882 bp, Xanthobacter autotrophicus Py2
  CDS (1)..(882): transl_table=11
atggaactgatgcgcgcgcgcgccccggcgaagatcaacctgacgttgcgcatcgaaggccgtcgcgccgacggctttcacgatctcgcgagcctcgtcgcctttgccggcgccggcgacctcgttttcctccatcccgatgcgcccttggcgctggaggtctgcggccccacggccgccgccgccggcccggacgacgacaatctggtgctgcgcgcggcccgtgcctttgcggaacgggtgcccggcgcgcggctcggccgtttcgtgctggaaaagcggctgccggtggcggcgggactggggggcggctcgtccgatgccgccgccgcgctgcgcctgctcgccggcctcaacgggctggcgctggatgatccgcgcctgtttgcggccgcccgcgccaccggatcggacgtgccggtgtgccttgatccacgggcgcggctgatgcgcggggtgggcgatgtgctctcggccccgctcgccctgccgcccttgtcggcggtgctggtgaattgccgggtcgccgtgcccactgccggcgtgttccgtgcgctgggccttgcgccgggcgcggctttggctggtcccgagcacccggccggtctgccggagacgacgatggggaatgcggcggccgtgtgcgccttcctgtccggcctgccgaacgatctggagccgccggccctggcgctggcgccggagatcggccgggccatggccctgctttccgaagcgcccgaggcgcggctggtgcgcatgtccggctccggcgcaacggtgttcgccctcaccgacagctgccgcaccgccgcatcgctggcacggcgcctgcttgcgcagcagcccggctggtgggtgaagcccacacttctgcgatag

SEQ ID NO: 1756 - protein, 293 aa, Xanthobacter autotrophicus Py2
MELMRARAPAKINLTLRIEGRRADGFHDLASLVAFAGAGDLVFLHPDAPLALEVCGPTAAAAGPDDDNLVLRAARAFAERVPGARLGRFVLEKRLPVAAGLGGGSSDAAAALRLLAGLNGLALDDPRLFAAARATGSDVPVCLDPRARLMRGVGDVLSAPLALPPLSAVLVNCRVAVPTAGVFRALGLAPGAALAGPEHPAGLPETTMGNAAAVCAFLSGLPNDLEPPALALAPEIGRAMALLSEAPEARLVRMSGSGATVFALTDSCRTAASLARRLLAQQPGWWVKPTLLR

SEQ ID NO: 1757 - DNA, 936 bp, Prochlorococcus marinus str. MIT 9215
  CDS (1)..(936): transl_table=11
atgcaagatttagctggaaagaaaattattataaaatctcctgccaaaataaatttgcaccttgaagttattggtaaaagggaggatggattccatgagttagcaatgattatgcaaaatattgatctttttgattatttagaatttcaaataaataatgaaggtttaattaaacttgaatctgattgtactgacttaagcttatcaagtgataacttaattgttaaatcggcaaatctattaaggaaaaaattaaatatagattgcggtgcgaatatatttttaagaaaaaatattccaattggagcaggattagctggtggatctagtaatgcagcagcaacattaataggtcttaataaattatgggatttgaatgtagatcaaaaaactttgttttcattagcatcaactttaggatctgatattcctttttttataaatggtggtattcaattatgttttggaagaggcgaaattttagagaaattagattcaaactttgattatggtgtaattcttttaaaaaatccaaatgtatcggtatctactgctgaaacttatagtaaatatagcaacagattttgttatcaatatcttactaatggagaaatgattgagaacataagaaataatttaagagataatggcttaaataacctaaattttgataaacaacatttaactataaaaaatgatttgcagttagttgttgaaaatgacaatgattctgtaaaagaggcattatatttactttctaaattagagaattgtctgacattttccatgagtggatcaggccctacatgctttgcaatctttaaagatatagagactgctaaaaaagaattaaatgcaaactctaaattatttgaagataaaggttacgatgcatgggtttgcactttctttgaaaagggaataacattcatttaa

SEQ ID NO: 1758 - protein, 311 aa, Prochlorococcus marinus str. MIT 9215
MQDLAGKKIIIKSPAKINLHLEVIGKREDGFHELAMIMQNIDLFDYLEFQINNEGLIKLESDCTDLSLSSDNLIVKSANLLRKKLNIDCGANIFLRKNIPIGAGLAGGSSNAAATLIGLNKLWDLNVDQKTLFSLASTLGSDIPFFINGGIQLCFGRGEILEKLDSNFDYGVILLKNPNVSVSTAETYSKYSNRFCYQYLTNGEMIENIRNNLRDNGLNNLNFDKQHLTIKNDLQLVVENDNDSVKEALYLLSKLENCLTFSMSGSGPTCFAIFKDIETAKKELNANSKLFEDKGYDAWVCTFFEKGITFI

SEQ ID NO: 1759 - DNA, 858 bp, Desulfococcus oleovorans Hxd3
  CDS (1)..(858)
atgaaggtgctgtcccctgccaaaatcaacctgtttttgcacgtcaccggaaagcgggccgacgggtatcacgatctttttaccctgatgtgctgcatcggcctgtttgacgagctgacattcgaactcaccgacagcggcgtttcggtccggtgtgaccattcagcggttccctccgatgcttccaacctggcccaccgggccgcgaccctcttttttgagcgtaccggcattcaggccggggtctccatcacccttgtcaagcacattcctgtggccgccggcctgggcggcggcagcagcaacgccgcaacggtcctggtgtggctcaacaaccggttcgggcggccgctctccatggaccgccttctggagatgggggcccttctgggcgcggatgtgccgtttttcatctttggccggccggcccttgccaccggcatcggaaaccgccttgtcgcctaccctctcctgccctccctgccggtggtgctgatccatccggacattcctgtttccaccggcgatatctacaaaagtttcaatttaacattgacaaataacaaaaaaatttctacgatccattcttttacaaaacagacgccttttgagtttgcaaaacaccttgaaaacgatctggaaacggttactctggagcgatatccggagataggggccgccaaaaaaagactggtggccgccggcgcgcggggtgttctgatgtccggcagcggccctgccgtgttcggcgtttttaaggacccggcggcggcggaacaggcctatgcgacgattccccggcagacgggagaacggctgttttgcgcgacattactgacggcgggacatacggcttga

SEQ ID NO: 1760 - protein, 285 aa, Desulfococcus oleovorans Hxd3
MKVLSPAKINLFLHVTGKRADGYHDLFTLMCCIGLFDELTFELTDSGVSVRCDHSAVPSDASNLAHRAATLFFERTGIQAGVSITLVKHIPVAAGLGGGSSNAATVLVWLNNRFGRPLSMDRLLEMGALLGADVPFFIFGRPALATGIGNRLVAYPLLPSLPVVLIHPDIPVSTGDIYKSFNLTLTNNKKISTIHSFTKQTPFEFAKHLENDLETVTLERYPEIGAAKKRLVAAGARGVLMSGSGPAVFGVFKDPAAAEQAYATIPRQTGERLFCATLLTAGHTA

SEQ ID NO: 1761 - DNA, 954 bp, Prochlorococcus marinus str. MIT 9211
  CDS (1)..(954): transl_table=11
atgaataaggtctcttcctctatagcagagtctttgaaagtttatgcatcagcaaagataaatttgcatttagaagttttgggattacgtaaagatggctttcatgagttagctatggttatgcaaagcattgatttagttgatgagattgagataactaagacaaatgatgaactgattagccttaattcagataatccagagttagacaatggagatggaaatttgattattaaggctgcaaagctaattcgaagtcgatcaggattaagggatttaggggccttaatttatttaagaaaaaaaattcctattggcgcaggcttggctggaggttcgagtgacggagcagcaactttggtaggtcttaactctctttggggactaaatttctctaataatcagttggaagatatggcggctgagcttggttcagatgttccattttgcatctcagggggagctcaattgtgctttggtcgaggtgaatgcctggaacctttagataaatcagatccaactttggcaatagttcttgtaaaagatccatctgtatctgtgtccactccatgggcctattcaaggtacaagcaattaaatgagagtacttacttaagcaaagaaattgatttccaagagaagcgaatggctcttaggaaagcctcttggttaagaccacttaatgcatcaaaccctcctcctttgattaatgaccttcaagaggttgttgcaccagccactccagcggttgagaaagctttgcaattccttcgctcattaaaaggtgttctttcggtagcaatgagtggatcaggcccaagctgctttgcaattttctctgatttggatcaggctagaattgctcttgaggagaatcaagaggagcttcgaaaacaatgcttagaaggctggtgttgtgctcttaattcgaaaggagtgaggttcgcgaagtga

SEQ ID NO: 1762 - protein, 317 aa, Prochlorococcus marinus str. MIT 9211
MNKVSSSIAESLKVYASAKINLHLEVLGLRKDGFHELAMVMQSIDLVDEIEITKTNDELISLNSDNPELDNGDGNLIIKAAKLIRSRSGLRDLGALIYLRKKIPIGAGLAGGSSDGAATLVGLNSLWGLNFSNNQLEDMAAELGSDVPFCISGGAQLCFGRGECLEPLDKSDPTLAIVLVKDPSVSVSTPWAYSRYKQLNESTYLSKEIDFQEKRMALRKASWLRPLNASNPPPLINDLQEVVAPATPAVEKALQFLRSLKGVLSVAMSGSGPSCFAIFSDLDQARIALEENQEELRKQCLEGWCCALNSKGVRFAK

SEQ ID NO: 1763 - DNA, 879 bp, Bacillus anthracis str. Sterne
  CDS (1)..(879): transl_table=11
atgaatagattgaagctactagtgaaagcaccagcaaagattaatctgtcgttagatgtactgggaaaaagacaagacggatatcatgaagtgaaaatgattatgacaacaatcgatttagcggatcgtttagaactaatggaattagcagaagaccgtattgaaattttatcccataatcggtatgtcccagacgaccaaagaaatctggcttatcaagcagcgaaattattaaaagagaagtttaatgtgaaaaaaggtgtatctattactattgaaaaaacgattccagtagcagctggattagcgggtggaagtagtgatgcagcagcgacattacgtggtcttaataaattatggaatttaggccttacgattgatcaattagcagagcttggcgcagaaattggatcagatgtatcgttttgtgtatatggtgggacagcaattgccactggaagaggagagcagattgagcacataaaaactccaccttcttgttgggttattttagcaaagcctcatattggtgtatttactgctgatgtatatggaaatttaaagttaaatcgagttacacatccaaatgtagataaaatggtggatgtcataaacgctggagactacaaagggatttgcgatactgttggtaacgttttagaagatgtaacgtttgctatgcatcctgaagttgcacgtattaaagcacaaatgaagcgatttggagcagatgctgtattaatgagtggaagtggtccaactgtattcggcctagtgcaccatgattcgcgaatgcatcgtatatataacggattaaaaggattttgtgaacaagtatacgcagtacgtttattaggagagcgagaaacgcttgaataa

SEQ ID NO: 1764 - protein, 292 aa, Bacillus anthracis str. Sterne
MNRLKLLVKAPAKINLSLDVLGKRQDGYHEVKMIMTTIDLADRLELMELAEDRIEILSHNRYVPDDQRNLAYQAAKLLKEKFNVKKGVSITIEKTIPVAAGLAGGSSDAAATLRGLNKLWNLGLTIDQLAELGAEIGSDVSFCVYGGTAIATGRGEQIEHIKTPPSCWVILAKPHIGVFTADVYGNLKLNRVTHPNVDKMVDVINAGDYKGICDTVGNVLEDVTFAMHPEVARIKAQMKRFGADAVLMSGSGPTVFGLVHHDSRMHRIYNGLKGFCEQVYAVRLLGERETLE

SEQ ID NO: 1765 - DNA, 972 bp, Propionibacterium acnes KPA171202
  CDS (1)..(972): transl_table=11
atggtgatgatggacgatccgtttgacttgctccggccgatgaccgtgacggtgcgggtcagcgccaaggtcaatctggcgctcggggttggtggccttgcgcccgacggctttcacccgttggcgactgtcttcgaagctatctgcatttacgatgaggtggcggtgactcgtcgcgacgattcgcgcatcaccctcaccgtctcaggagaggacgccgatcaggtccctaccgacgagacgaatttggcctggcgagctgtagaactcgttcgcgaggaattcgcttcagaatgggggaaacgtggccatggcgccgacattcacatcgataaatcgatcccggtcgctggtgggatggctggaggatcagctgacgcagcgggcgccctcatggcagcggccgcgctgtgtcggctcccttactcccccgaggaattacaaccgttggctgctcagcttggctccgacgtgcccttctgtctcaccggtggagtggcgttagggcgaggtcgaggagaccgtcttgcgccagtgatctgccgaggacgtcatcgctgggtgttcgcgacatcgaatcagggactgtccaccccggctgtctaccgacgtttcgacgagttgggcggcacccctgggggagaaacggtgcccaatgacctcatctcggccttgacccgcggcgatcttgatgctgtcgctgccagtttgagcaatgacttacaggccgctgccatcgaccttcggcccgaactcgaagaggtgttgacggttgggcgagaggtgggtgcgttgaccgctttggtttctggatcggggccgacctgcgccttcctcgtccgggacaccgctggcgccaaaaaggtgagcgctgctgtgtccaatctgcctcaggttcatcgcacccgaactgcccgcggtccagctgcgggagcgcagctcctgcctggcccggtggggagctttgcatga

SEQ ID NO: 1766 - protein, 323 aa, Propionibacterium acnes KPA171202
MVMMDDPFDLLRPMTVTVRVSAKVNLALGVGGLAPDGFHPLATVFEAICIYDEVAVTRRDDSRITLTVSGEDADQVPTDETNLAWRAVELVREEFASEWGKRGHGADIHIDKSIPVAGGMAGGSADAAGALMAAAALCRLPYSPEELQPLAAQLGSDVPFCLTGGVALGRGRGDRLAPVICRGRHRWVFATSNQGLSTPAVYRRFDELGGTPGGETVPNDLISALTRGDLDAVAASLSNDLQAAAIDLRPELEEVLTVGREVGALTALVSGSGPTCAFLVRDTAGAKKVSAAVSNLPQVHRTRTARGPAAGAQLLPGPVGSFA

SEQ ID NO: 1767 - DNA, 1032 bp, Frankia sp. CcI3
  CDS (1)..(1032): transl_table=11
atgcgagcccccgccaaggtcaacctgcatctcggcgtcggaccgctccgaccggacggctaccacgacgtcatcacagtgctgcaggccgtctcgctgttcgacgacgtctcggcgacgtccgtcgatcccccgcggttccacgacccggggccatcgaccaccgacgggaacggcgggtccgacgggaacggccggtccagcggggacatcgtcgtgaccgtcgaggtgtccggggagggcgccgacccggcgtcgctgggtccggcgacgtccacgccggaggtctccatcgtccccaccggccgggacaacatcgccgtccgggccgctcacctggttgccgaggccgcgggcatcacctcggaacgggttcatctcaccctgacgaagggcatccccgtcgccgcggggatggccgggggcagcgccgacgcggcggcggcgctcgtcgcctgcgacgcgctctggcagaccggcctggaccgggcgaccctgacccgactcgccgcccagctcggcagcgacgtcccgttccccctggccggcggcaccgcactcggcaccgggcgcggcgagcagctcaccgacgtcctggcgacgggcgagtactactgggtgttcgcgctcgccgacggcggcctgtccacccccgcggtctacaaggagttcgaccggctgaccgagggcaaactgcggaccggcccgacccccgccgacgacgtgctcgccgcgctgcgcaccggcgaccccggccagctcggagccgccctggtcaacgacctgcagccggcagcactgcggcttcggccgtccctgcgccgcgtcctggaggcgggccgggagctgggagccgtcggggcgatcgtgagcggctccggcccgacctgcgccttcctcacggccggagcgcaggagagcatcgcgctcgcggcgagcctcgccgggatgggggtcgcccgcgcggtacgccgggcctccgggccggcgagcggcgccaggatggtggagggagcaggcgaagcgccgtga

SEQ ID NO: 1768 - protein, 343 aa, Frankia sp. CcI3
MRAPAKVNLHLGVGPLRPDGYHDVITVLQAVSLFDDVSATSVDPPRFHDPGPSTTDGNGGSDGNGRSSGDIVVTVEVSGEGADPASLGPATSTPEVSIVPTGRDNIAVRAAHLVAEAAGITSERVHLTLTKGIPVAAGMAGGSADAAAALVACDALWQTGLDRATLTRLAAQLGSDVPFPLAGGTALGTGRGEQLTDVLATGEYYWVFALADGGLSTPAVYKEFDRLTEGKLRTGPTPADDVLAALRTGDPGQLGAALVNDLQPAALRLRPSLRRVLEAGRELGAVGAIVSGSGPTCAFLTAGAQESIALAASLAGMGVARAVRRASGPASGARMVEGAGEAP

SEQ ID NO: 1769 - DNA, 891 bp, Anaplasma phagocytophilum HZ
  CDS (1)..(891): transl_table=11
atgtcgaagtattttattagcgcgcctgcgaagataaacttgtttctccatatagtcggtaaagctccgtgtgggtatcacttaatagagtctgtctttgcatttgtagagttatacgatgttttagagtttgacattggctctagaaaccgagggataaggtttctcaaaccttcgtgtattaatagacgtgataacactatacagcgagctattggacatttggtgaggagatgctcgccgggcactacggataatgtttatgttaaagttttgaagaatattcctgtatcgtctggattggcaggcgggtcagcagatgccgctgctgctattaatctgctaagcaagctgtggggcataaatgaaaaagaaactgagagggtagcttttagggttggaagcgatgttcctgtgtgtttagaatctaaaactgcgtttgttgcgggcatgggagacgtagtggaattgctagaagactcattcttgcctaggcacgttattttggtagggcccaaagtggaattgagcacaaaaagtgtctttgacatgtacaatcccaaagcgttttctccaagtataggtaagttgcctggtaattctgaggattggctttctttattgaaggaagctcgtaatgacttaacggaggtttctgtagaattggtaccggagattcgtatcatattggatgtgctgggttcattagatgggtgttgcttttccagaatgagtggaagtggggctatgagcttcgctatttttgaggatgagaattcagctgagttagccactaggtatctgaggagaaattacccagactggtttattttcaaaactaggattattaggtcgagtgatcaggaagataataatatgggtaatctttga

SEQ ID NO: 1770 - protein, 296 aa, Anaplasma phagocytophilum HZ
MSKYFISAPAKINLFLHIVGKAPCGYHLIESVFAFVELYDVLEFDIGSRNRGIRFLKPSCINRRDNTIQRAIGHLVRRCSPGTTDNVYVKVLKNIPVSSGLAGGSADAAAAINLLSKLWGINEKETERVAFRVGSDVPVCLESKTAFVAGMGDVVELLEDSFLPRHVILVGPKVELSTKSVFDMYNPKAFSPSIGKLPGNSEDWLSLLKEARNDLTEVSVELVPEIRIILDVLGSLDGCCFSRMSGSGAMSFAIFEDENSAELATRYLRRNYPDWFIFKTRIIRSSDQEDNNMGNL

SEQ ID NO: 1771 - DNA, 840 bp, Neorickettsia sennetsu str. Miyayama
  CDS (1)..(840): transl_table=11
atgttaaccctaagagcgccggcaaagattaatctttttctgcttatcacaggaaggaatgaatccgggtttcacctgctcgatagtgttttctgtttcacgcatgatctgtatgacgagataataattgttcctacgtctgcaactgagaactcagtcaaattcattggtgcatcccaagcgataggtgcggataactcggtaagtcgtgttctcagatttgttaatgattatgcaaagcgttatttcaatgttactctagtgaagaatcttcctgttgctgccggtataggtggtggttcagcagatgcagcagcgttgctgagatatttcggtgggctacacaatatctcggaagtattactcagtcaagtggctttgtctgttggctttgatacgttggcctgcctttatagccatccgtgtcacgtaacgggaatgggtgaaaaaatcgttgcattgccagagtcgaagcttgtatatccaatactcctagtctgtccaaactttcctgtcagctctgctgaagtttataaaaatttccgcgaaagaagaagtattttttcagctgagtccaatcttgcaggggatcatcaggcgtttgaagatatgctttctcttcctaatgatttaactgatgctgctatcgaaatcgcaccagtgataagcgacgtacttaaaagtattaaaaattgtaaaggaaataaggtcaccaaactatgtgggagcggtccaacatgtataggtgttttcgacactgtagaaaatctaagagacgcccactcagaattaatacgtcatcataagtggtgggttaagatcgcacatatttcgctgtaa

SEQ ID NO: 1772 - protein, 279 aa, Neorickettsia sennetsu str. Miyayama
MLTLRAPAKINLFLLITGRNESGFHLLDSVFCFTHDLYDEIIIVPTSATENSVKFIGASQAIGADNSVSRVLRFVNDYAKRYFNVTLVKNLPVAAGIGGGSADAAALLRYFGGLHNISEVLLSQVALSVGFDTLACLYSHPCHVTGMGEKIVALPESKLVYPILLVCPNFPVSSAEVYKNFRERRSIFSAESNLAGDHQAFEDMLSLPNDLTDAAIEIAPVISDVLKSIKNCKGNKVTKLCGSGPTCIGVFDTVENLRDAHSELIRHHKWWVKIAHISL

SEQ ID NO: 1773 - DNA, 849 bp, Ehrlichia chaffeensis str. Arkansas
  CDS (1)..(849): transl_table=11
atgttaaagtttttagttaaagcaccagcaaaagttaatttatttttgcatattactggtaaacggagtgatcaacatcattacttagagtcattgtttgtctttgttaatgtttacgatatcttagaggttgatgttggtggttcgaaacggggagtatatttctcaaatctgaggattagcaaatataataatactgtatataaagcaatagagttgttattgaaacacagtgctgtatgtcctaatgtttctgtgagtattataaaaaatattttagtatctgcaggtttagcaggtggatcagctgatgctgctgctattatgcgtttactaggtaatatgtggaacattgattacacattgttacaggatttagccttaaaaattggaagtgatgttccagcatgtttggaatcaaagaccctttttgctaaaggggtaggggaagatatattgttattacctgatttgttattgccaaaatatattatacttgttgctccaaggggaaagacgttaagtacagcaaaggtctttaataattaccagagtgctacttactctccttccatatgtgataagcttcctgtaaagcaagatgattggatggaattaatttgtaatgctaaaaatgatttattagaagtagcgttgaaatttgttcctgagatagaagaaatattatttgtattaaagcaattaaaaaattctgtaattgctcgtatgactggtagtggagcaacttgttttgctttatttaatgaattaagtcatgctgaagatgcagctagaaaattgcagatgacacgtcctgattggataatttttaatgctaaaatactttga

SEQ ID NO: 1774 - protein, 282 aa, Ehrlichia chaffeensis str. Arkansas
MLKFLVKAPAKVNLFLHITGKRSDQHHYLESLFVFVNVYDILEVDVGGSKRGVYFSNLRISKYNNTVYKAIELLLKHSAVCPNVSVSIIKNILVSAGLAGGSADAAAIMRLLGNMWNIDYTLLQDLALKIGSDVPACLESKTLFAKGVGEDILLLPDLLLPKYIILVAPRGKTLSTAKVFNNYQSATYSPSICDKLPVKQDDWMELICNAKNDLLEVALKFVPEIEEILFVLKQLKNSVIARMTGSGATCFALFNELSHAEDAARKLQMTRPDWIIFNAKIL

SEQ ID NO: 1775 - DNA, 828 bp, Francisella tularensis subsp. holarctica
  CDS (1)..(828): transl_table=11
atggcaaatataaaagctaaaaaatactatagttatgcaaagataaatctatttttgcatatattaaacaaacgtacagatggttaccataatttacagacttggtttacctttttggacttaaaagatcaactaacttttagttttaataattcacgagaaattaatatttcgagtaatattagtattgctgcaaaacaagataatttagtatataaggctatcaaaaaatttcagcaaagctatagagtgcaagatataggtgttgatattgaaattaagaaaaatattccaatgggagcaggacttggcggtggaagctcaaatgctgctactacacttatagctttacgtgattattatttgccgcagttgtcaaatgaggagatgattccattagcggtaaaacttggtgccgatgtgccgatatttgtttatggtaaatctgcgtgggcagaaggtataggtgagatattataccataaggattttagtccgcagtatgcgctattgattaaaccggatatccatattagtacaaaagagttttttacaagtgaggatttaattaagtcatcggttctaatatctaaagatttaggctttgataagagcattatgcataacgattttgagaatgttttttatgcaaaatatccagagtttagtcaatatctaaaagagttagatagtgattttagaatgacaggtacaggttcttgtttttatttactctcagcagataaaaataaacttgagcaacttacaagaaaaattaataaacctcttgacaaatggctagtcaaaacattaaactatgtctactaa

SEQ ID NO: 1776 - protein, 275 aa, Francisella tularensis subsp. holarctica
MANIKAKKYYSYAKINLFLHILNKRTDGYHNLQTWFTFLDLKDQLTFSFNNSREINISSNISIAAKQDNLVYKAIKKFQQSYRVQDIGVDIEIKKNIPMGAGLGGGSSNAATTLIALRDYYLPQLSNEEMIPLAVKLGADVPIFVYGKSAWAEGIGEILYHKDFSPQYALLIKPDIHISTKEFFTSEDLIKSSVLISKDLGFDKSIMHNDFENVFYAKYPEFSQYLKELDSDFRMTGTGSCFYLLSADKNKLEQLTRKINKPLDKWLVKTLNYVY

SEQ ID NO: 1777 - DNA, 867 bp, Saccharophagus degradans 2-40
  CDS (1)..(867): transl_table=11
atgctgcaaacaagccttacactgcccgcccccgccaagctgaacctatttttgcacattaccggccggcggcccgacggttaccacaacctacaaaccgtgtttcagctattggattttggcgacgaacttacctttacccccaaccaaagcggcgaaataaccataaccccagccatagagggagtacccctagagcaaaatctagtatacaaggcggccaatattttgcgcagccatgtaaaccggcctgaattgggtgcaacaatacacttaaccaaacgcctacctatgggcggagggattggcggcggcagcagtgatgccgccacaacactcgtaggcttaaactatttgtggcaaaccggcgttagccctaccaccctcgcacagcttggccgccagctaggcgcagacgtgcctgtttttgtagaaggtaacagtgcatgggcagaaggcataggggaacaattaatagccttagatttaccccaatattggtatgttgtgcttactcctgcctgtcatgtgtccacagtagaaattttttcacataaagatttgacaagggacactctcgccattacagtagcggccttctttgagaagggtggaaaaaacgactgccaaccactggttgaaagactttttccacaggtaagggatgcggttgactggctcaataaatttggcccagcgaagcttacaggtacgggcgcaagtgtatttgcagccttcccctctaaagatgctgcgcaaaaagttttcgccaacaaaccaaaacatttgaatggttttgtagctcaaggcgttaacgagtcaccactgcatcaacgcctcccggagcagtgtataactggggtgtag

SEQ ID NO: 1778 - protein, 288 aa, Saccharophagus degradans 2-40
MLQTSLTLPAPAKLNLFLHITGRRPDGYHNLQTVFQLLDFGDELTFTPNQSGEITITPAIEGVPLEQNLVYKAANILRSHVNRPELGATIHLTKRLPMGGGIGGGSSDAATTLVGLNYLWQTGVSPTTLAQLGRQLGADVPVFVEGNSAWAEGIGEQLIALDLPQYWYVVLTPACHVSTVEIFSHKDLTRDTLAITVAAFFEKGGKNDCQPLVERLFPQVRDAVDWLNKFGPAKLTGTGASVFAAFPSKDAAQKVFANKPKHLNGFVAQGVNESPLHQRLPEQCITGV

SEQ ID NO: 1779 - DNA, 873 bp, Methylobacillus flagellatus KT
  CDS (1)..(873): transl_table=11
atgatgcaagacttccacgcttaccccgcgccagcaaaaatcaacctgttcctgcatatcacgggccgccgccctgatggctaccacctgctgcaaagcgtattccgcctactggactttggtgataccgtgcatatcaggccgcgagccgaccatctcatccggcgcacggaaaacacacccggcgtaccagaggaaagcgatttgtgcatccgcgcggcaacactgctgcaacgccattccggctgcaaactaggggccgatatctacgtgaccaagcgcacgccgatgggcggcggactgggcggaggcagttcagacgctgcaagcgttttgctcgccctcaaccagttatggcatcttcacttgcgtcgcgaggaattgatcacgctgggcctcagtctgggagcagacgttcccttcttcattttcggagaaagcgcctgggtagagggcattggggaaaaactgcaatcaattcaattaccccaagcctattatgtcgtcatcacgccgcgcatccatatctcgaccgcggaaatttttgcatcgaagcaattgacaagagacacgaatcccacgacaatagcggcctttctgagggacttggttcacaacgatctcgaaaccgtggtcagacaacagcacccggaagttgaaaaatgcctgcaatggctttctcgattctccaaggcgcgcatgagtggttctggcgcttcggtattcgcagcattcgatagccaggaatctgcagaagctgtacttgcaagagtgaatgaggcacgcgagttgccacaattcgtaggttgtgaagtttcaggcttctgcgcaaaagggttggatcaacatcccctgcgcagttttgcaacctga

SEQ ID NO: 1780 - protein, 290 aa, Methylobacillus flagellatus KT
MMQDFHAYPAPAKINLFLHITGRRPDGYHLLQSVFRLLDFGDTVHIRPRADHLIRRTENTPGVPEESDLCIRAATLLQRHSGCKLGADIYVTKRTPMGGGLGGGSSDAASVLLALNQLWHLHLRREELITLGLSLGADVPFFIFGESAWVEGIGEKLQSIQLPQAYYVVITPRIHISTAEIFASKQLTRDTNPTTIAAFLRDLVHNDLETVVRQQHPEVEKCLQWLSRFSKARMSGSGASVFAAFDSQESAEAVLARVNEARELPQFVGCEVSGFCAKGLDQHPLRSFAT

SEQ ID NO: 1781 - DNA, 882 bp, Burkholderia xenovorans LB400
  CDS (1)..(882): transl_table=11
atgattgaaacgaccgattcgctgcgcgattgcctcgcgccagcgaaactcaacctcttcctgcacatcaccggccgccggccggatggctatcacacgctgcaaacggtgttccagttgctcgattggggcgacacgctgcacttcacgcgacgcgacgacgggctcatcacgcgccgcaccgaaatcgccgacgtgccgccggaacacgatctgaccgtgcgcgccgcgacgctgctcaaaacgcatacgggctcgcccgaaggcgtcgatatcgaaatcgacaaacgcctgccgatgggcgccggcctcggcggcggcagctccaacgcagcgacgacactgctcgcgctcaaccgtctgtggaagctcaacctgccgcgcctcgaattgcaggcgctggcgttgaaactcggtgcggatgtaccgttttttgtgtttggaaaaaatgcgttcgctcagggtgtcggagaggctttagacgttgtacaattgccgccgcgccatttcctggtagtgacgccgagggttcatgttccgactgcagcgattttctccgaaaaagcgttgacaagagattcaaaacccctcacaattacggactttcctgcagaacttagctgcaacactgaatggccagaaagttttggccggaacgacatgcagcaggttgtcgtaggaaagtacgcggaagtagcgcaagtgctgcgatggtttgaaaacgtcgcgccagcgcggatgtctggatcaggtgcaagtgtctttgcagcgttccgtagtaaagctgaagcagaagcggtgcaagccaaactgccagccgaatggaacagcgcagtggccgcaagtctcgatcagcatccactctttactttcgcgtcataa

SEQ ID NO: 1782 - protein, 293 aa, Burkholderia xenovorans LB400
MIETTDSLRDCLAPAKLNLFLHITGRRPDGYHTLQTVFQLLDWGDTLHFTRRDDGLITRRTEIADVPPEHDLTVRAATLLKTHTGSPEGVDIEIDKRLPMGAGLGGGSSNAATTLLALNRLWKLNLPRLELQALALKLGADVPFFVFGKNAFAQGVGEALDVVQLPPRHFLVVTPRVHVPTAAIFSEKALTRDSKPLTITDFPAELSCNTEWPESFGRNDMQQVVVGKYAEVAQVLRWFENVAPARMSGSGASVFAAFRSKAEAEAVQAKLPAEWNSAVAASLDQHPLFTFAS

SEQ ID NO: 1783 - DNA, 879 bp, Ralstonia metallidurans CH34
  CDS (1)..(879): transl_table=11
atgaccgtcggcacggccctgccgccacccgagctgcgcaactgcccggccccagccaagctcaacctgttcctgcacgtgaccggccgccgccccgacggctaccacacgttgcagaccgtgttccagctcatcgactggtctgacacgctgcacttccatcgccgtgacgatggcgtgatcacgcgtgttaccgacatccccggggtgccggccgataccgacctcgtcgtgcgcgcggcccgcgcaatgcaggcggccagcggcacgcgtttcggcgtggacatcgccatcgacaagatcctgcccatgggtggcggcatcggcggcgggtcgtccgacgccgccaccacgctgctggcgctgaaccgcctgtggggcgtgaacctgccgcgcgaagaactgatgcgtatcggcctttcgctcggcgcggacgtgcccgtattcgtgttcggccagaacgcgttcgccgagggcgtgggcgaggaattgacgcccgtggcgctgccggacagctggttcgtggtcatccatccacggcaacatgtgccgaccgcagcaatattttcggacgaacgcttgacaaggaattcgccaatctctatagttgcggacttcgctgcttgcacaaacaaattcgctttcggtcgcaacgatctggaaacgatagcaacagcgaagttcggcgaagttgcccgagcccttgagtggctgaaaaattacagtccacatgcaaggatgaccggttccggagcctgcgtatttgcccgctttgaagacgagcagactgcgcagagagtgatggaaaggttgccatccgagtgggatggcaggtgtgtgaaaagtttgtcacatcacccgctcgcaacgttcgcgtag

SEQ ID NO: 1784 - protein, 292 aa, Ralstonia metallidurans CH34
MTVGTALPPPELRNCPAPAKLNLFLHVTGRRPDGYHTLQTVFQLIDWSDTLHFHRRDDGVITRVTDIPGVPADTDLVVRAARAMQAASGTRFGVDIAIDKILPMGGGIGGGSSDAATTLLALNRLWGVNLPREELMRIGLSLGADVPVFVFGQNAFAEGVGEELTPVALPDSWFVVIHPRQHVPTAAIFSDERLTRNSPISIVADFAACTNKFAFGRNDLETIATAKFGEVARALEWLKNYSPHARMTGSGACVFARFEDEQTAQRVMERLPSEWDGRCVKSLSHHPLATFA

SEQ ID NO: 1785 - DNA, 939 bp, Acidobacteria bacterium Ellin345
  CDS (1)..(939): transl_table=11
atgtccacctttgtccgttcatacgcgaagatcaatcttgggctgcgcattgggccgcggcgcgcggatgggtttcacgatctgcgcacgatgtacacgacgatcgcgttgcacgagcttgtttcggttgaagtcgaagacggcgacgggatcgagatccggtgtgacgatccgcgggtgccttgcgattcgacgaatacgtgccacaaggcggcggcgctggtgttggaggcgctcggtctgcgctctaaggtattgatttccatcgagaagcggctgccggtacagggtggactcggggcagcttctgggaatgcgattgcgacgatttttgggctggagcggatgctggggaaggagctttcggccaaagaaagggcagagattgccgagaagatcggatccgaccttaacttgttcttatacggtgggttaacgttgggtaccgggcgcggcgaggaggtctggccgctgccggatttgccatcgctgccgctggtgatcgtgacgccggaggtcggagtgtcgacgccggtggcatttaaggcgtgggattcattgacccatccggagggctccgttacaataaatgagttcaaccatctcgtttacgagtggttgtctgcatccggtgttcccgccttgagcggggaccgggccgagacgctgcttctcgaccttgtccgaaccgggatttcgaacgacttcgaacgcgttgtctttccagaaattcccgtattacgagaggtcaagtgtgcgctcgagcgcgaaggcgctttgtatgcgtcgctttccggctcaggttcaaccttgtatgggttgtttcgttcgtctgcggaagcatcgacagcggcggagcggttgaactcgagcgggctgaaagcgacggcgacacagaccttgccgcgtgagcagtactggcgggaaatgtttcagtaa

SEQ ID NO: 1786 - protein, 312 aa, Acidobacteria bacterium Ellin345
MSTFVRSYAKINLGLRIGPRRADGFHDLRTMYTTIALHELVSVEVEDGDGIEIRCDDPRVPCDSTNTCHKAAALVLEALGLRSKVLISIEKRLPVQGGLGAASGNAIATIFGLERMLGKELSAKERAEIAEKIGSDLNLFLYGGLTLGTGRGEEVWPLPDLPSLPLVIVTPEVGVSTPVAFKAWDSLTHPEGSVTINEFNHLVYEWLSASGVPALSGDRAETLLLDLVRTGISNDFERVVFPEIPVLREVKCALEREGALYASLSGSGSTLYGLFRSSAEASTAAERLNSSGLKATATQTLPREQYWREMFQ

SEQ ID NO: 1787 - DNA, 825 bp, Silicibacter sp. TM1040
  CDS (1)..(825): transl_table=11
atgacgatcactgaggtttttgcgccggccaaggtaaacctttccctgcatgtgacggggcgccgcgcagatgggtatcacctgctggacagtctggttgcatttgcaagcataggcgaccgattgcgcctgtccccggctgaggagctttcgctttctgtttcggggctttttgcggacggggtcccggaggactcgcgtaatctggtctggcgcgccgccgaaggcgcggattggcgcgggcatatcgggctggagaaatctctgcctcatggggcgggtatcggcggcggctcttctgatgcgggtgctgttttgaacgcatttcgatcgcagggacacactgtgccaaaagccttggccttgtcgcttggggcggatgttccggtctgcatgcatgcctcagccgcgcggatgcaggggatcggcgaggagatcactccgatcccgctgcccaaactgcccgcgctattggtgaaccccggcgttgaagtgcccacgggggcggtgttctccgggcttgcgtcgcgtgagaatgaccctatgccctcggaggtcccacgttttgacggtgtcgcggattgtgcgggatggctcggagcgcagcgcaacgatctggaacccgcagcgatcgcggcggcccccctgatcgagcgcgttctgagtgatctgcgtgcctctcgcgctgcgcttctggcccgaatgtcggggtccggatcgacatgctttgcgatctacccgacgttgaaggcggcgcattttgcagcctatgagatcggcgcagagcacccagagtggtggtgtgtggcaaccgaactcagctga

SEQ ID NO: 1788 - protein, 274 aa, Silicibacter sp. TM1040
MTITEVFAPAKVNLSLHVTGRRADGYHLLDSLVAFASIGDRLRLSPAEELSLSVSGLFADGVPEDSRNLVWRAAEGADWRGHIGLEKSLPHGAGIGGGSSDAGAVLNAFRSQGHTVPKALALSLGADVPVCMHASAARMQGIGEEITPIPLPKLPALLVNPGVEVPTGAVFSGLASRENDPMPSEVPRFDGVADCAGWLGAQRNDLEPAAIAAAPLIERVLSDLRASRAALLARMSGSGSTCFAIYPTLKAAHFAAYEIGAEHPEWWCVATELS

SEQ ID NO: 1789 - DNA, 969 bp, Mycobacterium sp. MCS
  CDS (1)..(969): transl_table=11
atgcgcaacggcaacaccgcctccgagtgggtgcccaccgggtcggtcaccgtgcgggtgcccggcaaggtcaacctgttcctgggcgtcggtgatctgcgcgacgacggctaccacgatctgacgacggtcttccacgccgtatccctgctcgacgaggtcaccgtctcgaccgccgacacgctgtcgctggatctggccggcgagggcgccgagtcgctgcccaccgatcgtcgcaacctcgcctggaaagcggccgaactgatggccgagcacgtcgggagatcacccgatgtggcgatctcgatcgagaagtcgattccggtggcaggcggcatggccgggggcagcgccgacgccgcgggggtgctggtcgcgatgaatcacctctgggagatcggcgtaccgcgacgcgatctgcacgcgatggccgccgaactgggcagtgacgtcccgttcgcgctgcacggcggtaccgcactgggcaccggtcgcggcgaggagctcgcgaccgtactggcccgcagcacgttccactgggtgctcgccttcgcgtacaagggcctctcgacgccgaaggtgtttcgtgagctcgaccggttgcgtgccacggccggcgccgccagggccgaacccgcccggctgggcgatccggagccgatgctggccgcgctggcgtccggggatgcccggcaactggcgccgctgctcggcaacgacctgcaggcggccgcgctgagcctgagcccggacctgcggcggacgctgcgggccgggctggacgcgggtgcgctggccgcgatcgtgtccgggtcggggccgacgtgcgcgttcctgtgcgcctcgtcgccgcaggcgatcgacgtcggcgcccgcctggccggtgccggggtgtgccggaccgtgcgggtggccagtggacccgtgcagggtgcgcgggtggtccccgcaccctcgccgtcggtgtga

SEQ ID NO: 1790 - protein, 322 aa, Mycobacterium sp. MCS
MRNGNTASEWVPTGSVTVRVPGKVNLFLGVGDLRDDGYHDLTTVFHAVSLLDEVTVSTADTLSLDLAGEGAESLPTDRRNLAWKAAELMAEHVGRSPDVAISIEKSIPVAGGMAGGSADAAGVLVAMNHLWEIGVPRRDLHAMAAELGSDVPFALHGGTALGTGRGEELATVLARSTFHWVLAFAYKGLSTPKVFRELDRLRATAGAARAEPARLGDPEPMLAALASGDARQLAPLLGNDLQAAALSLSPDLRRTLRAGLDAGALAAIVSGSGPTCAFLCASSPQAIDVGARLAGAGVCRTVRVASGPVQGARVVPAPSPSV

SEQ ID NO: 1791 - DNA, 879 bp, Rubrobacter xylanophilus DSM 9941
  CDS (1)..(879): transl_table=11
atgaggggctcgctcagggtgagggccttcgccaaggtcaactacgccctggaggttctgggcaggagggcggacggctaccacgagatccgtacggtcctgcagagcgtctcgctgtgggacgagctggagatctcgggccccgaggggcgcttcggcctcgtcgtggagccggagggcgccggggtggggccggagcgggagaacacggtctaccgggcgtggcggctgctggccggggaggcgggcgccccgccggtgagggtcaccctgcgcaagggcatccccgccggttcggggctcggcggggggtcggcggacgcggcggcgctgctctggggggcgaacgagctcctcgggctcgggctcggggaggcggacctcgcggcgctcgcgctgcgggtgggggccgacgttccgttctgcctcgttgggggcaccgcgctcggggagggggtgggggagcgcctctttcccctccccgcgccgccggagcaccggctggtggtcgccatgccgccccgcggggcctccacggcggaggtgtacggggcgtacggggggctcgggggcgccgctccgggcgggtggtccgggcgggtggtccgggcgctccgggccggggatttgggggccctgggcgcggcggtggggaacgacctgacgccggtcaccgccgggctggcgccggaggtggagaagctgctcgccgggcttagggaggcgggggcgctcggggcctgcatgagcgggaccgggagcgcggtctacgggctcttccgggaggaggcggccgcccacgaggcggcccggcgtcttgggggcgccgccttcgtgcgcgtctgccgcccggtgggtcgcgggctcgcgggcggctga

SEQ ID NO: 1792 - protein, 292 aa, Rubrobacter xylanophilus DSM 9941
MRGSLRVRAFAKVNYALEVLGRRADGYHEIRTVLQSVSLWDELEISGPEGRFGLVVEPEGAGVGPERENTVYRAWRLLAGEAGAPPVRVTLRKGIPAGSGLGGGSADAAALLWGANELLGLGLGEADLAALALRVGADVPFCLVGGTALGEGVGERLFPLPAPPEHRLVVAMPPRGASTAEVYGAYGGLGGAAPGGWSGRVVRALRAGDLGALGAAVGNDLTPVTAGLAPEVEKLLAGLREAGALGACMSGTGSAVYGLFREEAAAHEAARRLGGAAFVRVCRPVGRGLAGG

SEQ ID NO: 1793 - DNA, 882 bp, Mesorhizobium sp. BNC1
  CDS (1)..(882): transl_table=11
atgaagctggaatgcattgctccggcaaaaataaatcttgcgctgcacgtcatcggccgccggactgacggctatcatcttctggaatcccttgtcgccttcgctgcattcggcgaccggctctcggtcgagaaggcagaagctgacacgtttctgttggcaggaccgttccgcgacgggcttgagggatcaggcaattttgtcctcaacgcgcgtgacctcctcagagaaaagttcgcaagccgggcgagcagtcccgtcgccatcacattggagaagaacctgccggtggcatcaggaatcggcggcgggtcgagtgatgcggcgacggggctcaagctcctgacgcgttattgggaaatcgaaaccgaaccggccgaacttgcgcagatcgggctggggcttggagccgacgttccgatgtgcctttttggccagccgctgatcgcaagcggcatcggcgagaagctggagccggtttcaacgctcccttctcttcccatccttcttgtcaatcccggccttccgttggcgacgcccgctgttttctcgtcgcttgtcgagcgcgagaatgcacctctcccgcctgctccgcgcaataagagcgccgccgagcttgtaaattggctcaggcttacccgaaacgatctcgaaccggcggcactttcaatcatgccggttatcggcatcgtgctcagacttctgcagacggagggcgcactcatcgcccggatgtccggctccggggccacctgcttcgggattttcgaaaccgcgagcaaagcccggcaggcgggcgagatgatctcccggagacatcccggctggtttgtccgcgcgacccagacgagggcctccatgccggagttgagtcatgtctga

SEQ ID NO: 1794 - protein, 293 aa, Mesorhizobium sp. BNC1
MKLECIAPAKINLALHVIGRRTDGYHLLESLVAFAAFGDRLSVEKAEADTFLLAGPFRDGLEGSGNFVLNARDLLREKFASRASSPVAITLEKNLPVASGIGGGSSDAATGLKLLTRYWEIETEPAELAQIGLGLGADVPMCLFGQPLIASGIGEKLEPVSTLPSLPILLVNPGLPLATPAVFSSLVERENAPLPPAPRNKSAAELVNWLRLTRNDLEPAALSIMPVIGIVLRLLQTEGALIARMSGSGATCFGIFETASKARQAGEMISRRHPGWFVRATQTRASMPELSHV

SEQ ID NO: 1795 - DNA, 813 bp, Cytophaga hutchinsonii ATCC 33406
  CDS (1)..(813): transl_table=11
atgatctcatttccaaatgccaagatcaatcttggtttatctgttttaagcaaacgtccggatggataccataacattgaaacgtgtttttatccaatcccgtggaacgacatgcttgagatcattccggcaaaagaaaccgtatttaccagttcgggcaataacataccgggaacatctgcttctaatctgtgccttaagacgtataccctgctgaaagaaaagtatccgctctcacctgttcacattcacttgcataaacgcatccccatcggtgcaggcctgggcggcggctcttcagacgcagcctttacctgtaagcttttaaacgatgtgtttgcactcaaactttctgccgcagaaatggaagatattgttcggcccgttggtagtgactgtgcattttttattgaaaacacatctattctggcacacgaaaaaggtgattacttttcacatccgggtatcgtgaatctaagtggaaaatggatttacctgatccatccgggcattcatgtggcaacaaaagaagcgtatgatggtgttgtacccaatacagacagaaaaccgatcggtgatattttaaaacaaccattgagtgtctggaaagcagaacttgtaaacgattttgaacgtagtgtatttgaaaaatatccggctataaaaaccttaaaagaacagatgtacaaacagggtgcagcatatgcggcaatgagtggctccggttcaacggtattcggtatatttaatacaaaaccggaaacttttcatgaaaacacatccaacatacagagttgtattgccccattataa

SEQ ID NO: 1796 - protein, 270 aa, Cytophaga hutchinsonii ATCC 33406
MISFPNAKINLGLSVLSKRPDGYHNIETCFYPIPWNDMLEIIPAKETVFTSSGNNIPGTSASNLCLKTYTLLKEKYPLSPVHIHLHKRIPIGAGLGGGSSDAAFTCKLLNDVFALKLSAAEMEDIVRPVGSDCAFFIENTSILAHEKGDYFSHPGIVNLSGKWIYLIHPGIHVATKEAYDGVVPNTDRKPIGDILKQPLSVWKAELVNDFERSVFEKYPAIKTLKEQMYKQGAAYAAMSGSGSTVFGIFNTKPETFHENTSNIQSCIAPL

SEQ ID NO: 1797 - DNA, 867 bp, Clostridium perfringens ATCC 13124
  CDS (1)..(867): transl_table=11
atgaaaatgaaggcttatgcaaaaataaatatagccttagatgctattggaaaaagagaagataactatcatttattaagaatgataatgcaaacagtagatttgtatgacgttatagatatagagaaaagtaatgatagtaatataagcatttcttgtaataagcattatgtccctacagatgaaagaaacttagcatacaaagcggcagtgttatttagagatgaatttaatataaaagatggtgtaaaaattaatattaagaagaatatacctgtagctgcaggtatggctggtggaagtactaatgcggcggcagttttagttataatgaataagctttttaatgtaaatgctagtttagaagtgttaaaagaaataggactaaaaataggagcagatgttccatattgtattgaaggtggaactgctttatgtgaaggaattggagagattataacacctttaaaaccttttgaaaataaaatattagttgtattaaaacctaattttggggtatctactaaagaagtttatacaaatttagatataaataagataagaaaacatgttaatatagaaggcttaattcaagctatggaaaatgatgatttagattatgtatcaaaaaatatgaaaaatgttttagaaaatgtaactttaaagaagcatactatattaaaaaatataaaagaagatatgagaaaaagtggagccttaggtgcaatgatgagtggaagtggacctactgtatttgctttttttgatgatatgctaacagctcaaagagcttttgaatttttaaaaggaaaatataaatattcagatgtatatataacaagaactataaatagcaataatttataa

SEQ ID NO: 1798 - protein, 288 aa, Clostridium perfringens ATCC 13124
MKMKAYAKINIALDAIGKREDNYHLLRMIMQTVDLYDVIDIEKSNDSNISISCNKHYVPTDERNLAYKAAVLFRDEFNIKDGVKINIKKNIPVAAGMAGGSTNAAAVLVIMNKLFNVNASLEVLKEIGLKIGADVPYCIEGGTALCEGIGEIITPLKPFENKILVVLKPNFGVSTKEVYTNLDINKIRKHVNIEGLIQAMENDDLDYVSKNMKNVLENVTLKKHTILKNIKEDMRKSGALGAMMSGSGPTVFAFFDDMLTAQRAFEFLKGKYKYSDVYITRTINSNNL

SEQ ID NO: 1799 - DNA, 936 bp, Rhodococcus sp. RHA1
  CDS (1)..(936): transl_table=11
atgctttccgtcgttcctcgccccgtcgtagtcagggccccgtccaaggtcaatctgcatctggccgtcggggacttgcgtgacgacggctatcacgagctgaacacggtgttccaggcgctctcgctcagcgacacggtgtcggtggcccccgcggagacgctgtcggtgacggtccgcggtgaggacgcccgcgtcgtgccgaccgacagcagcaacctcgtgtggcaggccgccgagatgctcgcggccgagtcggggcggcgcccggacgtcgagatcgccatcgacaagggcatcccggtggccgggggcatggccggcggcagcgcggacgccgcggcgacgctggtcgggctgaacgcgctgtggcaactcgacctgtcgcgggaggaactcgacgggttcgccgcgaagctcggcagcgacgttccgttctccctccacggtggcaccgcggtcggcacgggacgcggcgagcgacttctgccggtgctctcccgcagcacgttccactgggtgctcgcgctcgcgaaggtcggcttgagcacaccgaccgtgttccgggagctggaccggttgcgtgccgacgggaatccgccgcgactcggcggacccgaagacctgatgcacgcgctaacgacgggcgacgccgcgacgctggccccgttgctgggcaacgatttgcagtcggccgcgctgtcgctgaatccgggcctgcggcggacgctgcgagccggggtcgcggcgggcgcactggccggaatcgtctccgggtccggtccgacctgtgcctttctttgtgctgaagcggatgccgcggtccgggtcagcgcagaactcgcaggtgcgggggtgtgtcgcacggtgcgggtcgccagcggacccgtaccgggcgcccgaataatcaacgacgcggcggagggatcgcactga

SEQ ID NO: 1800 - protein, 311 aa, Rhodococcus sp. RHA1
MLSVVPRPVVVRAPSKVNLHLAVGDLRDDGYHELNTVFQALSLSDTVSVAPAETLSVTVRGEDARVVPTDSSNLVWQAAEMLAAESGRRPDVEIAIDKGIPVAGGMAGGSADAAATLVGLNALWQLDLSREELDGFAAKLGSDVPFSLHGGTAVGTGRGERLLPVLSRSTFHWVLALAKVGLSTPTVFRELDRLRADGNPPRLGGPEDLMHALTTGDAATLAPLLGNDLQSAALSLNPGLRRTLRAGVAAGALAGIVSGSGPTCAFLCAEADAAVRVSAELAGAGVCRTVRVASGPVPGARIINDAAEGSH

SEQ ID NO: 1801 - DNA, 942 bp, Haemophilus somnus 129PT
  CDS (1)..(942): transl_table=11
atgaaaaactatcaattttcgaccgcacttttatcatcgcaaatacaaggaaaaaaattacgttttccttgccctgcaaagataaatttgtttttatatataacttctcaacgccccgacggttaccatgaactgcaaaccttatttcaatttttaaattttggcgattggttaagtattgagatacgcactgacggaaaaataatcttaacatccgaaatacctcatctaaaaaacgaggataatttaatctatcgagccgctaaattattacaacaaaaaacagggtgtacattaggggcaaatttacatttagataaaattttgccaataggcggaggagttggcggaggatcatcaaatgcagccacagcactcgttgcactcaactatttatggaatacacaactttcactctcaacacttgctgaaataggattacagctcggtgctgatgtgcctgtttttgtatatggaaaagccgcttttgccgaaggtgttggtgaaaaacttactttttgtcaaccgccacaaaaatggtttttagtattaaaacccgaaacatctatttctacagctattatatttaaagatcctaacttacctcgcaataccccaaaacgacctttagcggaattattaataacaaaatatgaaaacgattgcgaaaaagttgttttaaatcattattcagaggttgaagaagcccttggctggttgttacaatatgcaccggcaagattaacaggaactggagcttgtgttttcgctgaatttgctaacgaacaggcggcacaatctgcatttcttgataaacctgaaaaatacgttggttttgttgctcagggaacaaatatttcaccattacatcaaatgattgaatatttatcgcaacaaaaacaaacactttgtcttcctaacaatacaaattccagaggttaa

SEQ ID NO: 1802 - protein, 313 aa, Haemophilus somnus 129PT
MKNYQFSTALLSSQIQGKKLRFPCPAKINLFLYITSQRPDGYHELQTLFQFLNFGDWLSIEIRTDGKIILTSEIPHLKNEDNLIYRAAKLLQQKTGCTLGANLHLDKILPIGGGVGGGSSNAATALVALNYLWNTQLSLSTLAEIGLQLGADVPVFVYGKAAFAEGVGEKLTFCQPPQKWFLVLKPETSISTAIIFKDPNLPRNTPKRPLAELLITKYENDCEKVVLNHYSEVEEALGWLLQYAPARLTGTGACVFAEFANEQAAQSAFLDKPEKYVGFVAQGTNISPLHQMIEYLSQQKQTLCLPNNTNSRG

SEQ ID NO: 1803 - DNA, 945 bp, Trichodesmium erythraeum IMS101
  CDS (1)..(945): transl_table=11
atgcgttcctactcattaattgctcctggcaaaattaatctgtatctggaaattatcggcgatcgcccagacggttatcacgaattagcaatggtcttgcaaagcattagtctagcagacaaaatacatattcgttcgattggcattgagactattgtagtgcgatgcgaccatcctttagtgcctcaagatgtagacaatattgcttaccgagcagcttccctgatgagcaaagaatttccagaagtatttgctcgatacggaggtgttgaaattactatcaataagtatattcctatggcagccgggttagcaggaggttcgacaaatgcagcggcagtattagttggtctagacttaatgtgggaactgggtttaactcacagggaattacaagagttgggagcacggttgggttcagacgttcctttctgtattggtgggggaactgcattgggaacgaggcgaggtgaaatactttctccactgccaaatttagaccatatttatgtggttttagctaaatacaaaaatctctctatttctacaccttgggcatataaaacttatcgtcaaaagtttggccatacttatattagcgatacagaaagtcagaaaagtagtaggcaaagagtacattctggaccgatggtatcggcgatcgttgagcacaactataaggaagttggtgaactattgcataatgatctagaaaaggtggctttgtcagaatatccccaattattaaaattaagggaggcttttgcctcggaaaatgtattaggaactatgatgtctggttcaggaccaactatgtttgctttaacagaatctcaatctcaagcagaagaagtgagggcagcggtaaaagagaaaatggctgacccagatttagaattttggatagcacagtttaattctagtggtattagtattgcacattaa

SEQ ID NO: 1804 - protein, 314 aa, Trichodesmium erythraeum IMS101
MRSYSLIAPGKINLYLEIIGDRPDGYHELAMVLQSISLADKIHIRSIGIETIVVRCDHPLVPQDVDNIAYRAASLMSKEFPEVFARYGGVEITINKYIPMAAGLAGGSTNAAAVLVGLDLMWELGLTHRELQELGARLGSDVPFCIGGGTALGTRRGEILSPLPNLDHIYVVLAKYKNLSISTPWAYKTYRQKFGHTYISDTESQKSSRQRVHSGPMVSAIVEHNYKEVGELLHNDLEKVALSEYPQLLKLREAFASENVLGTMMSGSGPTMFALTESQSQAEEVRAAVKEKMADPDLEFWIAQFNSSGISIAH

SEQ ID NO: 1805 - DNA, 933 bp, Synechococcus sp. CC9311
  CDS (1)..(933): transl_table=11
atgaccgccaccgttcgcgtcaccgctcccgccaaaatcaatcttcatcttgaggtgctcggtcagcgctctgatggatttcacgaattggcgatggtgatgcaaagcatcgacctcgctgatcagctggactgttccaacagagctgatggattgattcaactgagctgtgatcagcccggtcttagttgcggcaatgacaacctcgtgttccgtgccgccgcactgcttcggcagcggtctggctttcatgagcttggcgctcaaattcatctgcgcaaacgcattcccataggagctgggcttgctggaggttccagtgatggtgctgcagctttgctggcgctaaatacgctctgggggctcggacacacccatgaccatttatgcgccatggctgctgaacttggctccgacatgccgttttgtcttgccggtgggattcagctctgcttcggtcgaggcgaatgtcttgaatcagtcccggcggctgagcagtctttaggggtggtactggtgaaaaatcccaccgtcagcgtttcgacgccctgggcctatggcgagtgtcgtcgtctcaagggcgaccattatttgagcgatgaagtggcttttgcacaacggcggcaggatctgcgtgcagcgtcatggttgaaccctctgcgagccgctgagccacctccacttcgcaatgatttgcaggatgttgtggaacctcaaacagcttcagtgcaaatggccctgcgcttgctccaggatcttcctggtcaactaagaacagcgatgagtggatccggccctagctgcttcgccctgtttcctaatcgattggatgctgatcaggctctggatgtagcccgtgactccttcgcacaagccggttttgacgcgtggagttgttcatttgtggggcatggcgccaagctgatgccatga

SEQ ID NO: 1806 - protein, 310 aa, Synechococcus sp. CC9311
MTATVRVTAPAKINLHLEVLGQRSDGFHELAMVMQSIDLADQLDCSNRADGLIQLSCDQPGLSCGNDNLVFRAAALLRQRSGFHELGAQIHLRKRIPIGAGLAGGSSDGAAALLALNTLWGLGHTHDHLCAMAAELGSDMPFCLAGGIQLCFGRGECLESVPAAEQSLGVVLVKNPTVSVSTPWAYGECRRLKGDHYLSDEVAFAQRRQDLRAASWLNPLRAAEPPPLRNDLQDVVEPQTASVQMALRLLQDLPGQLRTAMSGSGPSCFALFPNRLDADQALDVARDSFAQAGFDAWSCSFVGHGAKLMP

SEQ ID NO: 1807 - DNA, 855 bp, Shewanella sp. MR-4
  CDS (1)..(855): transl_table=11
atgtcgaatgagatttcacgcaattggcccgcgcccgccaaattaaatctgtttctgcatatcaacggacgccgcgccgacggttaccatgagttgcaaaccctgtttcagtttatcgattgttgcgatctgctcgattttcgggtgacacaaacacctgagcagatattgcactcggacatgtcagccgttgtcgcggatagcgataacttaattctgcgagccgcaaaatcattacaacaggcgacaggttatcctggcggtgccgaaatctggctcgaaaaacgtttacctatgggtggcggtttaggcggcggctcctcggatgctgccaccacgctcgtggcgttaaatcaattgtgggatacccaattatctaacgatgaattggcgacgattggattaaaactcggtgccgatatccctgtttttattcgcggtttcgcggcatttgccgaaggtgttggcgaacgtttacaggcggtgacgcccactgagttttggtatttagtgatagcgcccgatgcccatgtttcaaccgctgctgtgttccaagatcctttgctaccccgcaatacacctaagcttggcatcgacacgttaatgagccaaccttgggcaaatgattgccaagatctggtcgtttccaaataccctcaagttgccaaggccttagcctggctgctagaatatgcgccgtcgagaatgaccggaacgggcgcatgcgtgtttggggagttttcttcgcagcagcaagctctcgcagccttggcgaaattaccgtctgatatgcaaggatttgttgcaaaagggatgaatatttcgccgctcatagtgcgactcaatcgtccataa

SEQ ID NO: 1808 - protein, 284 aa, Shewanella sp. MR-4
MSNEISRNWPAPAKLNLFLHINGRRADGYHELQTLFQFIDCCDLLDFRVTQTPEQILHSDMSAVVADSDNLILRAAKSLQQATGYPGGAEIWLEKRLPMGGGLGGGSSDAATTLVALNQLWDTQLSNDELATIGLKLGADIPVFIRGFAAFAEGVGERLQAVTPTEFWYLVIAPDAHVSTAAVFQDPLLPRNTPKLGIDTLMSQPWANDCQDLVVSKYPQVAKALAWLLEYAPSRMTGTGACVFGEFSSQQQALAALAKLPSDMQGFVAKGMNISPLIVRLNRP

SEQ ID NO: 1809 - DNA, 855 bp, Shewanella sp. MR-7
  CDS (1)..(855): transl_table=11
atgtcgaatgagatttcacgcaattggcccgcgcccgcaaaattaaatctgtttttgcatatcaacgggcgccgcgccgacggttaccatgagttgcaaaccctgtttcaatttatcgattgttgcgatctgctcgactttagggtgacgcagacgccagagctgatattgcactcggacatgtcggccgttgtcgcggatagcgataacttaattctgcgagccgcaaaatcattacagcaagcaacaggctatcccggcggcgccgaaatctggcttgaaaaacgtttacctatgggcggcggtttaggcggcggttcctccgatgcggccactacactcgtggcgttaaatcagttgtggaacacccaattatctaacgatgaattagccacaattggtttaaaactcggtgccgatatccctgtttttattcgcggtttcgcggcatttgccgaaggcgttggcgaacgtttacaggcggtgacgcccactgaattttggtatttagtgatagcgcccgatgcccatgtttccaccgcagctgtgttccaagatcctttgctaccccgcaatacacctaagcttggcatcgacacgttaatgagccaaccttgggcaaatgattgccaagatctggtcgtttccaaataccctcaagttgccaaggccttaggctggctgttagaatatgcgccgtcgagaatgaccggaacgggcgcatgcgtgtttggggagttttcttcgcagcagcaagctctcgcagccttggcgaaattaccgtctgatatgcaaggatttgttgcaaaagggatgaatatttcgccgctcatagtgcgactcaatcatccataa

SEQ ID NO: 1810 - protein, 284 aa, Shewanella sp. MR-7
MSNEISRNWPAPAKLNLFLHINGRRADGYHELQTLFQFIDCCDLLDFRVTQTPELILHSDMSAVVADSDNLILRAAKSLQQATGYPGGAEIWLEKRLPMGGGLGGGSSDAATTLVALNQLWNTQLSNDELATIGLKLGADIPVFIRGFAAFAEGVGERLQAVTPTEFWYLVIAPDAHVSTAAVFQDPLLPRNTPKLGIDTLMSQPWANDCQDLVVSKYPQVAKALGWLLEYAPSRMTGTGACVFGEFSSQQQALAALAKLPSDMQGFVAKGMNISPLIVRLNHP

SEQ ID NO: 1811 - DNA, 876 bp, Alkalilimnicola ehrlichei MLHE-1
  CDS (1)..(876): transl_table=11
atgagctggtcccgccactggccggccccggccaagattaaccttttcctgcacatcctcggccgccgccccgacggctatcatcggctgcagaccgccttccagatcctggaccggggtgacgaactggcgttccgggtccgccccgacggtgagctgcggcgccggggcggactggatcacgtgccgccggaccaggacctgaccgtgcgtgccgcccgcctgctgcaacagaccaccggttgccggctcggcgcggacatcgtgctggacaaacgcctgcccgatggcggcggcctgggcggcggcagctccaacgccgccaccgtgctgcaagccttgaaccggctctggggcaccggcctgtcgaccctggagctggctggcctgggtctgcggctgggcgccgatgtgccggtcttcgtgcatggccgaaccgcctgggcggagggggtgggcgagcggcttacccccattgagaccccgtcgcgctggtttctggtggtgcatcccgggtgccgcgtgtccaccgccgaggtcttcgccgcggagggtttgacaagggacagcgcgccgagcacaatatcggcccttcgcgccgggagggtccgcaatgactgcgagccctgggtgcgtgcccactaccgcgccgtggacgaggccctgggttggctgtcgcggtttgcgccggcacgcatgaccggcacgggggcctgcgtgttcgcgcccttcgagcgcgaggcgcaggcccgggccgcgctggacaggctgccggccgcctggcagggtttcgtggcgcaaggcgttgcgtgctcctccttgcttgggcggttgcgtggtgagcaggacagcgccgacagggatggcccgacatag

SEQ ID NO: 1812 - protein, 291 aa, Alkalilimnicola ehrlichei MLHE-1
MSWSRHWPAPAKINLFLHILGRRPDGYHRLQTAFQILDRGDELAFRVRPDGELRRRGGLDHVPPDQDLTVRAARLLQQTTGCRLGADIVLDKRLPDGGGLGGGSSNAATVLQALNRLWGTGLSTLELAGLGLRLGADVPVFVHGRTAWAEGVGERLTPIETPSRWFLVVHPGCRVSTAEVFAAEGLTRDSAPSTISALRAGRVRNDCEPWVRAHYRAVDEALGWLSRFAPARMTGTGACVFAPFEREAQARAALDRLPAAWQGFVAQGVACSSLLGRLRGEQDSADRDGPT

SEQ ID NO: 1813 - DNA, 897 bp, Hyphomonas neptunium ATCC 15444
  CDS (1)..(897)
atgagcacagcagacaaaagcctttcgggctgggcgcctgccaaggtgaacctctatctgcatgtcggcccgccaaaacccaatggccgccatgaccttgagtctcttgtaatgttctcgggttctggtgcggcagaccatctgacggcagagcctgccgaagggctcagcctttcggttgccggccccttcgccgctgcggccggggcgggcgatgacaatctggtccttcaggcggcccgcgcgctacaggccgcctccggcacgcaacaaggcgcccgtctttcgctcaagaaatggctgcccgtcgccgccggcatcggcggtggctcctccgacgccgccacagccctccgtctgctgacaaaactctgggcgcttgacccaaaccatgccatcgcccttgcgccgggccttggaggggatgtgccggtagcgttggcggggcagccatcactcatgcgcggggaaggggagcgcgtcacgccgctgcccgcgctgccgcccgtttatgccgtgctggtcaatcccggcgtcccatgccccacaggcccggtcttccgcgaccatgacgcggcagggggcggcgcgggctttgccgagattgatccgccaccggagttttcagggcccaaagcattcgccgcctggctcggccagcaacgcaacgatctggaaagccctgccatcgcgcgcgtgccggaaatcggcgccgtgctcgaattcctgcgcgcccagcccggcgtattgctggcgcgcatgagcgggtcaggtgccacctgttttgccctctgtgaagcgctcgcctttgcggagcgcgcaaccgccgtcatcgcccatgatgcgcacaaggcgcattggtggaccgctgcctcccggctcggggcggcgccatga

SEQ ID NO: 1814 - protein, 298 aa, Hyphomonas neptunium ATCC 15444
MSTADKSLSGWAPAKVNLYLHVGPPKPNGRHDLESLVMFSGSGAADHLTAEPAEGLSLSVAGPFAAAAGAGDDNLVLQAARALQAASGTQQGARLSLKKWLPVAAGIGGGSSDAATALRLLTKLWALDPNHAIALAPGLGGDVPVALAGQPSLMRGEGERVTPLPALPPVYAVLVNPGVPCPTGPVFRDHDAAGGGAGFAEIDPPPEFSGPKAFAAWLGQQRNDLESPAIARVPEIGAVLEFLRAQPGVLLARMSGSGATCFALCEALAFAERATAVIAHDAHKAHWWTAASRLGAAP

SEQ ID NO: 1815 - DNA, 849 bp, Pseudomonas aeruginosa UCBPP-PA14
  CDS (1)..(849): transl_table=11
atgagcgtgcgcctcagcctgccagccccggccaagctcaatctgttcctgcatatcctaggccgccgcgacgatggctatcacgagttgcagaccctgttccaattcctcgaccacggcgacgagctgcatttcgaagcccgccaggacggccaggtacgcctgcacacggaaatcgccggggtgccgcacgacagcaacctgatcgtgcgcgccgcgcgcgggctgcaggaagcctccggcagcctgcaaggcgtcgacatctggctggacaagcgcttgcccatggggggcggcatcggcggcggcagctccgacgccgccacgacgctcctggccttgaaccatctctggcaactcggctgggacgaggaccgcatcgccgccctgggcctgcgcctgggcgccgacgtgccggtcttcacccgcggacgcgcggctttcgccgagggcgtgggcgaaaagctcaccccggtggacatcccggagctctggtatctcgtcttggttccgcaagtacttgtcagcacagcagaaattttttcagatccactgttgacacgcgattctcccgccattaaagtgcgcaccgttctcgagggggacagccgaaacgactgtcagccggtagtcgagaggcgttacccagaagttcgtaacgctttgatcttgctaaacaaatttgtttcagctagattaaccggcactggaggttgtgtgtttgggagcttcccaaacaaagctgaagctgataaagtctcggcccttcttccagaccaccttcagaggttcgtcgccaaaggaagcaacgtctcgatgttgcaccggaagctggaaactctggtctga

SEQ ID NO: 1816 - protein, 282 aa, Pseudomonas aeruginosa UCBPP-PA14
MSVRLSLPAPAKLNLFLHILGRRDDGYHELQTLFQFLDHGDELHFEARQDGQVRLHTEIAGVPHDSNLIVRAARGLQEASGSLQGVDIWLDKRLPMGGGIGGGSSDAATTLLALNHLWQLGWDEDRIAALGLRLGADVPVFTRGRAAFAEGVGEKLTPVDIPELWYLVLVPQVLVSTAEIFSDPLLTRDSPAIKVRTVLEGDSRNDCQPVVERRYPEVRNALILLNKFVSARLTGTGGCVFGSFPNKAEADKVSALLPDHLQRFVAKGSNVSMLHRKLETLV

SEQ ID NO: 1817 - DNA, 852 bp, Pediococcus pentosaceus ATCC 25745
  CDS (1)..(852): transl_table=11
atggaaatcaccgagaaagctccagccaagttaaacctatttttggatacgccgtttaatcatcctgatggattaccagaatggaacatgattatgacctcggtcgatttagcggattatgtaaaaatcgaaagtattcctggtaaaatgggaattaaagttcgaacgaataccggttttttacctaacgatagtcgtaatttggcgtatcaagctgcccggattttacaagaaaaatatcacgtacgtgccaaagtaattatagaaatacgtaaacacattccggttgcagctggattaggcggaggttcgtctgatgctgctgccgttttacgaggattaaataaactatggaatcttgagcttagcttagaagtattagctaaaattggtttagaaattgattccgatgtaccattttgtgtatatagtcgcacggcacatgttttgggaaaaggtgaaaaagtaattcctttaaaaaaattacctcctatgtgggtggtgattgccaaaccgaaacttagtgtgtcgacgccgtatatccttagtaaaatcgaacacaaagagctccaacattctaatattgaatcaattttagatgcaattgagcgtgaagattatacagacatttgtcgttatatgggcaatgttttagagcaagtaaccggaaaagaacatccggaagttttaaaaattaaaaatcgaattaaacaatacggggcagatgcagctcaaatgagtgggactggaccaacggtgtttggagttgcgtcaaaatcaagccgagccaagcacatcgtaaatagcttgaagggcttttgtcatgaagtatatttagttcgaattttgtga

SEQ ID NO: 1818 - protein, 283 aa, Pediococcus pentosaceus ATCC 25745
MEITEKAPAKLNLFLDTPFNHPDGLPEWNMIMTSVDLADYVKIESIPGKMGIKVRTNTGFLPNDSRNLAYQAARILQEKYHVRAKVIIEIRKHIPVAAGLGGGSSDAAAVLRGLNKLWNLELSLEVLAKIGLEIDSDVPFCVYSRTAHVLGKGEKVIPLKKLPPMWVVIAKPKLSVSTPYILSKIEHKELQHSNIESILDAIEREDYTDICRYMGNVLEQVTGKEHPEVLKIKNRIKQYGADAAQMSGTGPTVFGVASKSSRAKHIVNSLKGFCHEVYLVRIL

SEQ ID NO: 1819 - DNA, 951 bp, Solibacter usitatus Ellin6076
  CDS (1)..(951): transl_table=11
atgagcaccacccgccacgcgcacttgcgtgccctggccaaaattaatctcgatctccgcgtgctcggcaaacgcccggatggcttccacgagctgcgcaccatttttcagaccatctcgctcgccgacacgctcgagatctcgttcaccccggcgcgcaagaccacgatcgagctcactgacgtgttgaatattgccgataacctggttgtccgcgccgcgcgcatggtcatggatgccatgcgcgccaccggccgcatcgagatgcggctcaccaagcggattccgatgggggccgggctgggtggcggttcgagcgacgccgccgccgtgctgctcgcgcttccggtgctcgccggccgcgtcctgcctctgccgaaattgagccacatcggcgaacagctgggcagcgatgtacccttttttcttctcggcggcgccgccactggcatcgggcgagggtcggagcttttccccctcccagacgtgccggcgcaatcgggcgtggtggtcgcccccggaatccacgtcaacaccgcccaggcctatcgcgatctaagtcggcgtttgagcggtagtttgacaacggaattacaacaaaataaaatatttagtttccagtcgcttacgtgggacacgggccgtctcgctgaagcccgtaatgactttgaggcggtcgtattcgagcagcatcccaagctggccgccatcaagaggcgattggtgcgtgcaggcgccagtgcggccatgatgtccggcagcggcagcgccctgtatgggctgtttcgagatcgtaacgcaattttccgcgcaatcgaattactgggagaggacacgacgtaccgtatctcgctggtcagccgcaagcgttatcgcgctttgtggcggcgggcgatgtcggagcacacgcgatcaaacgtatggccgcttcaaagccggtacaacccatga

SEQ ID NO: 1820 - protein, 316 aa, Solibacter usitatus Ellin6076
MSTTRHAHLRALAKINLDLRVLGKRPDGFHELRTIFQTISLADTLEISFTPARKTTIELTDVLNIADNLVVRAARMVMDAMRATGRIEMRLTKRIPMGAGLGGGSSDAAAVLLALPVLAGRVLPLPKLSHIGEQLGSDVPFFLLGGAATGIGRGSELFPLPDVPAQSGVVVAPGIHVNTAQAYRDLSRRLSGSLTTELQQNKIFSFQSLTWDTGRLAEARNDFEAVVFEQHPKLAAIKRRLVRAGASAAMMSGSGSALYGLFRDRNAIFRAIELLGEDTTYRISLVSRKRYRALWRRAMSEHTRSNVWPLQSRYNP

SEQ ID NO: 1821 - DNA, 891 bp, Magnetococcus sp. MC-1
  CDS (1)..(891): transl_table=11
atgatggagcccgcaccacttatctatgcggcgcccgccaagcttaacttaaccctacgggtggtgggacggcgtgccgatggctatcatctgttggaaacggtgatggcctactttcccttgcaggacacgttgcagtttagcttggatagaggcggtggaatccatctaagctgtgaaccagcggtaacggccagtgtggcggataacttggtctatcgggcggcagaacgcttaaaaacaggctttggggtggagcagggggtggcgattcaactgcgcaagcagattccccacggtgccgggctgggtgggggttcgtccgattgcgcaaccaccctgttggcgctcaaccggctctggggattgcagctaagcgcggcagaattggcggaaattgggctggggttaggcgcggatgtgcccatttttctctaccagcgggccgctttggcgcagggtattggcgaacgactcagccccatgccagccttgccggcttggcatctggtggtggtcaatccgggtgttgcgctctcaacggtggcggtgtttaaggcccatgccgcgcaggtggggggctgttatacgccgcccggagcggcacaggcgtggcttgatgggggtattcagcatgcccatcagttgcataatgatctccaacaggcggcggtgcagctctgcccgcaggttgggagcgtgcttgaggcgttgctggaacagggggcggatggggtttgcatgtccggcagtggtaccacctgttttggggtttttgacgacgaagtgaacgcggtgaatgcggcgcaaacgttacgccaaaataatgctcaatggcttgtaatcgaaggtaaaatgttacatacgcacccctgccttggacagttctag

SEQ ID NO: 1822 - protein, 296 aa, Magnetococcus sp. MC-1
MMEPAPLIYAAPAKLNLTLRVVGRRADGYHLLETVMAYFPLQDTLQFSLDRGGGIHLSCEPAVTASVADNLVYRAAERLKTGFGVEQGVAIQLRKQIPHGAGLGGGSSDCATTLLALNRLWGLQLSAAELAEIGLGLGADVPIFLYQRAALAQGIGERLSPMPALPAWHLVVVNPGVALSTVAVFKAHAAQVGGCYTPPGAAQAWLDGGIQHAHQLHNDLQQAAVQLCPQVGSVLEALLEQGADGVCMSGSGTTCFGVFDDEVNAVNAAQTLRQNNAQWLVIEGKMLHTHPCLGQF

SEQ ID NO: 1823 - DNA, 855 bp, Shewanella sp. ANA-3
  CDS (1)..(855): transl_table=11
atgtcgaatgagatttcacgcaactggcccgcgcccgccaaattaaatctgtttttgcatatcaacgggcgccgcgccgacggttaccatgagttgcaaaccctgtttcaatttatcgattgttgcgatcaactcgattttagggtgacgcagacgcctgagctgatattgcactcgaacatgtcggccgttgtcgccgatagcgataacttaattctgcgagccgcaaaatcattacagcaagcgacaagttatcctggcggcgccgaaatctggctcgaaaaacgtttacccatgggcggtggtttaggtggcggctcctccgatgcggccaccacactcgtggccttaaatcagttgtggaacacccaattatctaacgatgaattagcggcgattggtttaaaactcggtgccgatatccctgtttttattcgcggtttcgcggcatttgccgaaggcgttggcgaacgtttacaggcggtgacgcccactgaattttggtatttagtgatagcgcccgatgcccatgtctccaccgctgcggtgttccaagatcctttgctaccccgcaatacacctaagcttggcatcgacaccttaatgagccaaccttgggcaaatgattgccaagatctggtcgtttccaaataccctcaagttgccaaggccttaggctggctgctagaatatgcgccgtcgagaatgaccggaacgggcgcatgcgtgtttggggagttttcttcgcagcagcaagctctcgcagccttggcgaaattaccgtctgatatgcaaggatttgttgcaaaagggatgaatatttcgccgctcatagtgcgactcactcatccataa

SEQ ID NO: 1824 - protein, 284 aa, Shewanella sp. ANA-3
MSNEISRNWPAPAKLNLFLHINGRRADGYHELQTLFQFIDCCDQLDFRVTQTPELILHSNMSAVVADSDNLILRAAKSLQQATSYPGGAEIWLEKRLPMGGGLGGGSSDAATTLVALNQLWNTQLSNDELAAIGLKLGADIPVFIRGFAAFAEGVGERLQAVTPTEFWYLVIAPDAHVSTAAVFQDPLLPRNTPKLGIDTLMSQPWANDCQDLVVSKYPQVAKALGWLLEYAPSRMTGTGACVFGEFSSQQQALAALAKLPSDMQGFVAKGMNISPLIVRLTHP

SEQ ID NO: 1825 - DNA, 951 bp, Mycobacterium avium 104
  CDS (1)..(951): transl_table=11
atgtctgacggcaacaccgccgcggcttgggtgcccaccgggtcggtcaccgtccgggtgcccggaaaagtcaacctctacctggccgtcggcgatcgccgcgaggacggctaccacgagctgaccacgatttttcaggccgtctcgctgctcgacgaggtgaccgtgcgcaacgccgacgtgctctcgctcgacatcgtcggcgagggcgccgacaagctgcccaccgacgaacgcaacctggcctggcaggccgccgagctgatggccgaacacgtcggccgggcgccggacgtgtcgatcatgatcgacaagtccatcccggtggccggcgggatggccggcggcagcgccgacgcggcggcggtgctggtcgcgatgaactcgctgtgggagctcaacgtgccccgccgcgatctgcgcatgctcgccgcgcagctgggcagcgacgtgccgtttgcgttgcacggcggcaccgcgctgggcaccggccgcggagaggagctggcgacggtattgtcccgcaacacctttcactgggtgctggcgttcgccgacggcgagctgctgacccgcaaggtgttcgccgagctggaccggctgcggcgggcgggcgatccgccgcggctgcccgggccgggcccggtgctggccgcgctcgccgccggcgacgccgaccagttggcgccgctgttgggcaatgaaatgcaggccgccgcggtgagcctgaaccccggcctgcgccgcaccctgcgcgccggcgtacaggccggcgcgctggcgggcatcgtgtcgggctccggcccgacgtgtgccttcctgtgcccgtcggcggccgcggcggtggacgtcggcaccgaggtgtccggggtgggggtgtgccgcacggtgcgggtcgccagcggaccggtggccggtgcccgcgtggtcccggcaccgaccgaggtgtga

SEQ ID NO: 1826 - protein, 316 aa, Mycobacterium avium 104
MSDGNTAAAWVPTGSVTVRVPGKVNLYLAVGDRREDGYHELTTIFQAVSLLDEVTVRNADVLSLDIVGEGADKLPTDERNLAWQAAELMAEHVGRAPDVSIMIDKSIPVAGGMAGGSADAAAVLVAMNSLWELNVPRRDLRMLAAQLGSDVPFALHGGTALGTGRGEELATVLSRNTFHWVLAFADGELLTRKVFAELDRLRRAGDPPRLPGPGPVLAALAAGDADQLAPLLGNEMQAAAVSLNPGLRRTLRAGVQAGALAGIVSGSGPTCAFLCPSAAAAVDVGTEVSGVGVCRTVRVASGPVAGARVVPAPTEV

SEQ ID NO: 1827 - DNA, 969 bp, Mycobacterium smegmatis str. MC2 155
  CDS (1)..(969): transl_table=11
atggccgtgcccgcatccgatggcagtaccgcttccgaatgggtgaccaccggctcggtcaccgtgcgcgtccccggcaaggtgaacctgtacctgtccgtgggcgatctgcgcgacgacgggtaccacgatctgacgacggtgttccacgcggtctcgctgctcgacgaggtgacggtccgcaacgccgacgtgctgtcgctgcggatgatcggggagggcgccgagtcgctgccggccgacgagcgcaatctggcgtggcgcgccgccgagttgatggccgagcacgtcggccgcgcccccgatgtcgagatcacgatcgagaagtccatcccggtggccggcgggatggccggtggctcggcggatgccgcgggcgtgctggtcgcgatgaacacgctgtgggagctcggcgtgccgcggcgggatctgcacgcgctggccgcacagctgggcagtgatgtgccgttcgcgctgcacggcgggaccgcgctggggtccgggcgcggcgaggacctcgccacggtactcgcgcgcaacacgttccactgggtgctggcgttcgcgcaccgtggcttgtcgacgcccaaggtcttcggggaactggaccggttgcgcgccgacaccacccgtggtctgccgcgcaccgacgagcccgagcccgtgctggccgcgctggcctcgggcgatccggccgagctggcggccctgctgggcaacgatctgcagcccgcggcgctgagcctgtatcccgacctgcgtcgcacgctgcgtgccggtgtcgaggcgggtgcgctcgcgggcatcgtgtcggggtccggtccgacgtgtgcgttcctgtgtgcgtcggccccggccgcactggatgtcggcacgcagctgtcgggggccggggtgtgccgcaccgtgcgcgtggcgagcgggcctgtacacggcgcgcacgtcgttcccgcgccgtcggcatcgtga

SEQ ID NO: 1828 - protein, 322 aa, Mycobacterium smegmatis str. MC2 155
MAVPASDGSTASEWVTTGSVTVRVPGKVNLYLSVGDLRDDGYHDLTTVFHAVSLLDEVTVRNADVLSLRMIGEGAESLPADERNLAWRAAELMAEHVGRAPDVEITIEKSIPVAGGMAGGSADAAGVLVAMNTLWELGVPRRDLHALAAQLGSDVPFALHGGTALGSGRGEDLATVLARNTFHWVLAFAHRGLSTPKVFGELDRLRADTTRGLPRTDEPEPVLAALASGDPAELAALLGNDLQPAALSLYPDLRRTLRAGVEAGALAGIVSGSGPTCAFLCASAPAALDVGTQLSGAGVCRTVRVASGPVHGAHVVPAPSAS

SEQ ID NO: 1829 - DNA, 894 bp, Nocardioides sp. JS614
  CDS (1)..(894): transl_table=11
atgcgcgcgcccgccaaggtcaacctgcacctcggggtcggcgcgccccgcgaggacggcttccatccgctggtgacggtctaccaggcggtcgggctctacgacgacgtcacggcgcgcgcggcgccggactggagcgtgggcgtgggcctgccggactggatggacgacgacgccgtacccctcaacggcgccaacatcgtggaccgggccgcggacctgctcgcggcccatcacggcgtcgaacggaccggggagctgcacatcgccaaggcgatcccggtcgcgggcggcatggccggcggctccgccgacgccgccgcggccctggtcgccctggaccggctctgggggctggacacctccgacgacgacctcctcgcgctcgccgcccggctgggcagcgacgtgccgttcgccctgctcggcggcaccgcgctcggcaccggccggggcgaggtggtcacgccggtgcaggaccgcggcacctggtggtgggtggtcgtcccctccgacaccgggctgtcgacccccgaggtctaccggcacttcgaccggatgttccccgacgcaccctcccagccggtgccggccgacgcgctgctcggcgcgatcgccgccggcgacacctgggcgctcgcggacgccctgcacaacgacctcgaggcggccgcgatcgacctgcgccccgagctcggccggctgatcgagcgcggcgaggaggccggggcgctgcgcggcctggtgtccgggtccggcccgacctgcgtcttcctgtgcggctccgccgaccacgctcgctcgctggccgccgacctgtccggcgccggtcatcccgtcgtcctcgccgccaacgggccggtcgccggcgcgcacctggtctcctatgcctag

SEQ ID NO: 1830 - protein, 297 aa, Nocardioides sp. JS614
MRAPAKVNLHLGVGAPREDGFHPLVTVYQAVGLYDDVTARAAPDWSVGVGLPDWMDDDAVPLNGANIVDRAADLLAAHHGVERTGELHIAKAIPVAGGMAGGSADAAAALVALDRLWGLDTSDDDLLALAARLGSDVPFALLGGTALGTGRGEVVTPVQDRGTWWWVVVPSDTGLSTPEVYRHFDRMFPDAPSQPVPADALLGAIAAGDTWALADALHNDLEAAAIDLRPELGRLIERGEEAGALRGLVSGSGPTCVFLCGSADHARSLAADLSGAGHPVVLAANGPVAGAHLVSYA

SEQ ID NO: 1831 - DNA, 849 bp, Azoarcus sp. BH72
  CDS (1)..(849): transl_table=11
atgaccatcagcggtgtcctcgccggctgccccgcgccggccaagctgaacctgttcctgcatgtcgtcggacgccgcgacgacggctaccacctgctgcagaccgcgttccggctgctcgactggggcgaccgcctggacttccgcgtgcgcgacgacggtctcatccgccgcaccaaccaggtggccggcgtcgccgaggacgacgatctggtcgtgcgcgccgcgcgccgcctgcagcaggccacaggcacgccgctcggtgcggacatcacgctgcacaaggtattaccgatgggagggggcgtcggcggtggcagttcggacgccgcgaccacactgattgcgctcaaccatctgtggcagaccggcctcacccgcgccgacctgcaacagctcgggctcgcgctcggcgccgacgttccgttcttcatctatggccgcgacgcctttgccgagggcgtgggcgaagccttccagccgctggcgctgcctgcagccgtgtatgtggtgctgtcaccggaggtcagcgtgcccaccgccgagattttttcagcaaagggcttgactcgggatacacccccaatcagaatagcggacttcgcagcgagccctacccgaaacgacttacaagcaacggcctgtagtcgatatccggaagtagcacgggcaataaactggctggagcactacgcgccagcgcggatgaccggctcaggcgcatgcgtgtttgccgaggtggcttcggaaatcgaagcagacgaaatcgtcagcctctgtcctgcacgctggaaagcctggaaggcaaaaagcctggcgcggcatccgttgtacggtttgctcgactag

SEQ ID NO: 1832 - protein, 282 aa, Azoarcus sp. BH72
MTISGVLAGCPAPAKLNLFLHVVGRRDDGYHLLQTAFRLLDWGDRLDFRVRDDGLIRRTNQVAGVAEDDDLVVRAARRLQQATGTPLGADITLHKVLPMGGGVGGGSSDAATTLIALNHLWQTGLTRADLQQLGLALGADVPFFIYGRDAFAEGVGEAFQPLALPAAVYVVLSPEVSVPTAEIFSAKGLTRDTPPIRIADFAASPTRNDLQATACSRYPEVARAINWLEHYAPARMTGSGACVFAEVASEIEADEIVSLCPARWKAWKAKSLARHPLYGLLD

SEQ ID NO: 1833 - DNA, 846 bp, Neisseria meningitidis FAM18
  CDS (1)..(846): transl_table=11
atgaatattgcggacggacggcaggcgtttcccgcacctgcaaaactgaatctcgatttgaggattaccggcaggcgggaagacggttatcacaatatcgaaagcatattctgcctgatagatttgcaggataccgtatatttgaaatcgagggatgacggcaaaatcatcctgcacaatccggttgatggaatgccgcaggaagcggatttaagctaccgtgccgcatcgttgctgcaaaaatatgcgcgcaaccccgccggcgtggaaatatggctggacaaaaaaatcccgacaggggcgggtttgggcggcggaagctcggatgcggcaaccgttttgctggtgttgaaccgttggtggcagtgcggtctgacgcagcggcagctcattgattcgggcgcggctctgggggcggacgtaccgttttttattttcggcaaaaatgcgtttgcgcggggtataggcgacaggctggacgaaatggatattccgaaacagtggtatgtcatcgtcaaaccgcccgtccacgtttccactgcaaaaattttcacacacgaaggcttgacacgaaattccgcctcaagcataatgccgactttccaaaacctgcaaccgtttagaaatgatatgcaggcagttgtatttaaagaataccctgaagtttggaaagcctattccgagttgtcccgatatggatttgccttaatgacaggttctggtgcgtgtgtattcacggcgtgtcaagataggaatagcgcatacaatatataccgacaagtttcagatttgtacgaggcatatttggcagagggtctttcaaaacatccttggttgtccgtataa

SEQ ID NO: 1834 - protein, 281 aa, Neisseria meningitidis FAM18
MNIADGRQAFPAPAKLNLDLRITGRREDGYHNIESIFCLIDLQDTVYLKSRDDGKIILHNPVDGMPQEADLSYRAASLLQKYARNPAGVEIWLDKKIPTGAGLGGGSSDAATVLLVLNRWWQCGLTQRQLIDSGAALGADVPFFIFGKNAFARGIGDRLDEMDIPKQWYVIVKPPVHVSTAKIFTHEGLTRNSASSIMPTFQNLQPFRNDMQAVVFKEYPEVWKAYSELSRYGFALMTGSGACVFTACQDRNSAYNIYRQVSDLYEAYLAEGLSKHPWLSV

SEQ ID NO: 1835 - DNA, 852 bp, Acidovorax sp. JS42
  CDS (1)..(852): transl_table=11
atgcaagccctgtacgacgtgccggcgccggccaaactgaacctgtttctgcatgtcacgggtcgcaggcccgatggctatcacctgctgcagtcggtcttcatgttgatcgattggtgcgatgttctgcatttcgaggtgggcggcaatggggccgtcacacgtgaagaccttaccagcgccctgcctgcggacgatctggtcgtgcgcgccgcacgtgcgctgcaaaaggccaccggttgcccgcaaggggtacatatcggcgtctctaaacacatccccgcacaagccggcttgggtggcggatcttcggacgcggccagcacactgctggcgctcaaccgcttgtggaagttgaaactgtctcggcagcagttgcactcgatcgccctgacgctgggcgccgatgttccgttttttttgtgcggcgcaagcgcctgggtcgagggaattggtgacataattcgccctcttgagttggagcaccaacttccgcctgcggctttcgcggtggtcaagcccgaagcggggctggatacgagaatgattttttcgcatccctcccttaaacgtgattcgagttgtgctacaatttcaggctttgctgcaacacactaccaatttggaagcaatgacctgcagccagtcgcacaggccttgtgccctgagattacgcaagccatcaattggcttgaatcaaaagggttgcaaggacgcatgacaggctctggaagtgcggtgtttgcacaaatcacacacgctgtcgatctgcacgatgcacccgctgcttggcatgtcaaagtgtgtgaaaatctaaagtctcatccgctagcggattgggtttttggatga

SEQ ID NO: 1836 - protein, 283 aa, Acidovorax sp. JS42
MQALYDVPAPAKLNLFLHVTGRRPDGYHLLQSVFMLIDWCDVLHFEVGGNGAVTREDLTSALPADDLVVRAARALQKATGCPQGVHIGVSKHIPAQAGLGGGSSDAASTLLALNRLWKLKLSRQQLHSIALTLGADVPFFLCGASAWVEGIGDIIRPLELEHQLPPAAFAVVKPEAGLDTRMIFSHPSLKRDSSCATISGFAATHYQFGSNDLQPVAQALCPEITQAINWLESKGLQGRMTGSGSAVFAQITHAVDLHDAPAAWHVKVCENLKSHPLADWVFG

SEQ ID NO: 1837 - DNA, 861 bp, Magnetospirillum magnetotacticum MS-1
  CDS (1)..(861): transl_table=11
atgaccagcttcacgatcgaggcgccagccaaggtcaatctgaccctccatgtggtcggcaagcgcgaggacggctatcacctgctggattccctggtggcctttgccggcgtgggcgacaccctggaattcagcccgtcgggcaccttgagcctggacgtcagcggccctacggcaagccagatccccaccgaaggcgagaacatcatcctcaaggccgcccgcctgctggccgaggccacgggcgtgagcaagggtggcgccatccgcctgaccaagcgcctgccggtggccgccggaatcggcggcggctcggccgatgccgctgcggcgctgaaaggcctgatgcgcttgtgggatgtttccctggcccccgaagccttgcgcaatctggccctgtccatcggcgccgacgtgccggtctgcttggccggaacgcccatgcgcatgatgggagtaggcgaagtgctcgaacccgcccccgccttgccgcccgcttggcttgtcctggtcaatcccatggtgccgctgcacacgccgccggttttcaaggcccgcaccggccccttctcatccgccgatcccttgcgcgaaagccccggtgatgcgaaggccctggccctggccctggccgccaggcgcaacgacctgacgccgccggccatcaccatcgagccggtggtgggtgaagtcctggccgccatcgccaccaccgccgattgcctgctgccgcgcatgtcgggttcaggggccacctgcttcggcctttatgcccaggaagcccaggcccggctcgccgccgcccaacttatcgccgcccatcccggctggtggatcgcgcccgcgcaattgctgtcttga

SEQ ID NO: 1838 - protein, 286 aa, Magnetospirillum magnetotacticum MS-1
MTSFTIEAPAKVNLTLHVVGKREDGYHLLDSLVAFAGVGDTLEFSPSGTLSLDVSGPTASQIPTEGENIILKAARLLAEATGVSKGGAIRLTKRLPVAAGIGGGSADAAAALKGLMRLWDVSLAPEALRNLALSIGADVPVCLAGTPMRMMGVGEVLEPAPALPPAWLVLVNPMVPLHTPPVFKARTGPFSSADPLRESPGDAKALALALAARRNDLTPPAITIEPVVGEVLAAIATTADCLLPRMSGSGATCFGLYAQEAQARLAAAQLIAAHPGWWIAPAQLLS

SEQ ID NO: 1839 - DNA, 954 bp, Nostoc punctiforme PCC 73102
  CDS (1)..(954): transl_table=11
atgcgttcctacagcttaattgcccctgctaaaatcaacttgtatctggaaatcattggcgatcgccccgatggttatcatgagttagccatgatacttcaaagtatcggactttcagatcaaattgatgtgcgttccatcagcactgacagcattcgtgttcactgtaaccacccacaagtaccgacagataaaagtaatctggcataccgggcagcagaattaatggtcaggcaatttcccgaagcctttgctaaatatggcggtgtggagattaccgtcaataagcagattcctgtagcggctgggttggctgggggttcgacgaatgcagcagctgtgttagtgggcatagatttactgtggaagttgggattaactcagtctgaattagaagagttaggaggtacactcggttctgatgtcccattttgtgtagcaggtggaactgcgatcgcaacaggtaggggtgagcaactttctcccctgccgagtttagataacatatatatagtattggggaaataccgcagtctggaagtttccacaccttgggcatacaaaacctatcgacagcagtttggccattcttatattatagataccgataatttggcagcccgtgctagtgcagttcattcaggagcaatagtcaaagctattttgcataaagatacgagggaaattgcccaaaaattgcacaatgatttagagcgtgtggtattgccagcctatccccaagttttgcatttgcgagaagtgtttgcaaatcaggaaggcgttttaggaacaatgatgtccggttctggcccaacagtatttgctctttttgaatctcaacagcaagcagaactagttttgcagcaagtaagggaagcaattattgatgaggacttagaattgtttgtaactcggacaattacgcatggtattaaagtgacatcatctgtttaa

SEQ ID NO: 1840 - protein, 317 aa, Nostoc punctiforme PCC 73102
MRSYSLIAPAKINLYLEIIGDRPDGYHELAMILQSIGLSDQIDVRSISTDSIRVHCNHPQVPTDKSNLAYRAAELMVRQFPEAFAKYGGVEITVNKQIPVAAGLAGGSTNAAAVLVGIDLLWKLGLTQSELEELGGTLGSDVPFCVAGGTAIATGRGEQLSPLPSLDNIYIVLGKYRSLEVSTPWAYKTYRQQFGHSYIIDTDNLAARASAVHSGAIVKAILHKDTREIAQKLHNDLERVVLPAYPQVLHLREVFANQEGVLGTMMSGSGPTVFALFESQQQAELVLQQVREAIIDEDLELFVTRTITHGIKVTSSV

SEQ ID NO: 1841 - DNA, 951 bp, Bifidobacterium longum DJO10A
  CDS (1)..(951): transl_table=11
atgagtccggtaatctcacatccacgctcagccgctgcccgacatcagtccgatgagctctcccccatcaccattacggtggattgcccggcgaaaaccaatctcaccttggaagtgggacctgctcacgacgaatggggcggacgccacgaactggacaccacctactgtgcaatcggcgtatacgacaccgtcaccgcaaccgccaagcaacccggagcgggattctctctggagctcgaaggcgcttatttgggcgacttggcctcctcacgcagcgacatgcgccgcaaccatgcggtactggccctcttcgccatggcccaggcggccgagcgcgagccggatgtggcgttgaccatcaccaagcgcattcccgtgggtgccggactaggcggcggttcagccgacgccgcggcgaccatgctggcggtcaatcgtctctgggagctgaactggcccatagagcgcctgcgcaccattgccgccacgttgggcgcggacatgccgttctgcctgaccggtggccttgcatacggcaccggtttcggcgaacgcatcacggatatcgcccccggcagccgcgatgagctggcgctgatagaacagggattcagcggcgaagtattggtcggcgcataccagtcgcaactcagcactcctgaggtctaccacacctttgacatcgtgggagccgcagaaggcgaccgcaatcatctgcaggctgcggcaatcagcctgcatccccgcagcgggcaggccatcgacgccgccacgcaggcgggtgccagccatgcattcgtctccggatccggcccctcagtggtcgctttcgccgccgacgaggcagcggcacaacgcattatcgaggtgtggcgcgatacagctgtggtcgatcgtattattcgagccaaatctcccgaacaccccaatatcagcgtcagacagtga

SEQ ID NO: 1842 - protein, 316 aa, Bifidobacterium longum DJO10A
MSPVISHPRSAAARHQSDELSPITITVDCPAKTNLTLEVGPAHDEWGGRHELDTTYCAIGVYDTVTATAKQPGAGFSLELEGAYLGDLASSRSDMRRNHAVLALFAMAQAAEREPDVALTITKRIPVGAGLGGGSADAAATMLAVNRLWELNWPIERLRTIAATLGADMPFCLTGGLAYGTGFGERITDIAPGSRDELALIEQGFSGEVLVGAYQSQLSTPEVYHTFDIVGAAEGDRNHLQAAAISLHPRSGQAIDAATQAGASHAFVSGSGPSVVAFAADEAAAQRIIEVWRDTAVVDRIIRAKSPEHPNISVRQ

SEQ ID NO: 1843 - DNA, 858 bp, Actinobacillus pleuropneumoniae serovar 1 str. 4074
  CDS (1)..(858): transl_table=11
atgacggaaaaaataattttacccagtccggccaagttaaatctgtttctttatatcactaataaacgtgcggacggttatcacgaattacagacgctgtttcagttcttagatttcggcgatgatatttcccttgaagtgaatgaaagcggtgaaatcgagttattaaacgcaatagaaggggtcgcgaaggaacaaaacctgatttaccgtgcggcaaaattattgcaaaatcataccgcttgtagcaaaggggcgaaaatcggtgtgacgaaacgtttgccgatgggcggcggtgtcggcggcggttcatcgaatgcggcgaccgtattggtcggattaaatcatttctggcaaaccggtttaagtttggaacagcttgcggaattaggactaagtttgggggcggacgtacctatttttgtacgaggttttgccgcttttgccgaaggtgtcggcgaaaaattggtggcttgccagccgcgagagtcgtggtatgtggtattaaaaccgaacgtttccatttcgaccgctgcggtttttcaagatccgaatttgccgagaaatacgccgaaaagaacattaagccgacttttatcggaagaatggacaaacgattgcgaaaaagttgtgcgagatcattatttcgaggttgaagatcttattgcagaattgttacaatatgcaacgtttcggctgacaggcacaggagcttgtattttcgccgaatttgagagtgaagcggaagcaaaagccgtttttgcacataaaccgcacaatattttcggttttattgcaaaaggacaaaatcgctctcctttacatcaaatgctcaatttaaccactttcccacaatag

SEQ ID NO: 1844 - protein, 285 aa, Actinobacillus pleuropneumoniae serovar 1 str. 4074
MTEKIILPSPAKLNLFLYITNKRADGYHELQTLFQFLDFGDDISLEVNESGEIELLNAIEGVAKEQNLIYRAAKLLQNHTACSKGAKIGVTKRLPMGGGVGGGSSNAATVLVGLNHFWQTGLSLEQLAELGLSLGADVPIFVRGFAAFAEGVGEKLVACQPRESWYVVLKPNVSISTAAVFQDPNLPRNTPKRTLSRLLSEEWTNDCEKVVRDHYFEVEDLIAELLQYATFRLTGTGACIFAEFESEAEAKAVFAHKPHNIFGFIAKGQNRSPLHQMLNLTTFPQ

SEQ ID NO: 1845 - DNA, 954 bp, Haemophilus influenzae R2866
  CDS (1)..(954): transl_table=11
atgaatacattaatgaaatcacatcaattttctaccgcactttgccaaaatacaacacaatcaaatgggcagccattacgcttccctagcccagcaaaactgaatttatttctttatatcaatggaaaattgccgaacggctatcatgaattacaaacgcttttccaatttttagattttggcgattggttagacattagtattcgggaacaagataatcaaattgttttaacgccagaaattccaaatctaaaaacggaaaataatctaatttatcgagctgcaaaacttttacaagaaaaagccaatattcaattgggtgcaaatattcatttagataaaattcttccaatgggagggggggttggtggtggttcatccaatgcagcaaccgcattagtctctttaaattatttatggcaagccaatttatccattgatgaactagcaaaattgggattaacattaggcgcggatgtgccaatatttgtacatggacacgcagcttttgctgaaggcgtcggggaaaaaatcacttattgtgaacctgccgaaaaatggtttgttatattaaaacccgatgattcaatatcgacggctgtgatatttcaagatccaaatttaccacgtaatacaccgaaaaaatccctcgaacaacttttgagtgaaccttataaaaacgattgcgaaaaagttgtgataaatcattattcaaacgttgaaaaagcgttaaactggttgctacaatatgcgccggcaagattaacaggaacgggagcctgtgtttttgctgaatttgatcatgaagcagaagcgcaagcggtatttagacaaaaaccagaagcattttttggtttcatcgctaaaggactcaatgtgtctcccttgcacgcaatgttgaagcagctatcatcaactcatactcatagacaatctaaacctgaggttttataa

SEQ ID NO: 1846 - protein, 317 aa, Haemophilus influenzae R2866
MNTLMKSHQFSTALCQNTTQSNGQPLRFPSPAKLNLFLYINGKLPNGYHELQTLFQFLDFGDWLDISIREQDNQIVLTPEIPNLKTENNLIYRAAKLLQEKANIQLGANIHLDKILPMGGGVGGGSSNAATALVSLNYLWQANLSIDELAKLGLTLGADVPIFVHGHAAFAEGVGEKITYCEPAEKWFVILKPDDSISTAVIFQDPNLPRNTPKKSLEQLLSEPYKNDCEKVVINHYSNVEKALNWLLQYAPARLTGTGACVFAEFDHEAEAQAVFRQKPEAFFGFIAKGLNVSPLHAMLKQLSSTHTHRQSKPEVL

SEQ ID NO: 1847 - DNA, 942 bp, Haemophilus somnus 2336
  CDS (1)..(942): transl_table=11
atgaaaaactatcaattttcgaccgcacttttatcatcgcaaatacaaggaaaaaaattacgttttccttgccctgcaaagataaatttgtttttatatataacttctcaacgctccgacggttaccatgaactgcaaaccttatttcaatttttaaattttggcgattggttaagtattgagatacgcactgacggaaaaataatcttaacacccgaaatacctcatctaaaaaacgaggataatttaatctatcgagccgctaaattattacaacaaaaaacagggtgtacattaggggcaaatttacatttagataaaattttgccaataggcggaggggttggcggaggatcctcaaatgcagccacagcactcgttgcactcaactatttatggaatacacaactttcactctcaacacttgctgaaataggattacagctcggtgctgatgtgcctgtttttgtatatggaaaagccgcttttgccgaaggtgttggtgaaaaacttactttttgtcaaccgccacaaaaatggtttttagtattaaaacccgaaacatctatttctacagctattatatttaaagattctaacttacctcgcaatacctcaaaacgacctttagcggaattattaacaacaaaatatgaaaacgattgcgaaaaagttgttttaaatcattattcagaggttgaagaagcccttggctggttgttacaatatgcaccggcaagattaacaggaactggagcttgtgttttcgctgaatttgctaacgaacaggcggcacaatctgcatttcttgataaacctgaaaaatacgttggttttgttgctcagggaacaaatatttcaccattacatcaaatgattgaatatttatcgcaacaaaaacaaacactttgtcttcctaacaatacaaattccagaggttaa

SEQ ID NO: 1848 - protein, 313 aa, Haemophilus somnus 2336
MKNYQFSTALLSSQIQGKKLRFPCPAKINLFLYITSQRSDGYHELQTLFQFLNFGDWLSIEIRTDGKIILTPEIPHLKNEDNLIYRAAKLLQQKTGCTLGANLHLDKILPIGGGVGGGSSNAATALVALNYLWNTQLSLSTLAEIGLQLGADVPVFVYGKAAFAEGVGEKLTFCQPPQKWFLVLKPETSISTAIIFKDSNLPRNTSKRPLAELLTTKYENDCEKVVLNHYSEVEEALGWLLQYAPARLTGTGACVFAEFANEQAAQSAFLDKPEKYVGFVAQGTNISPLHQMIEYLSQQKQTLCLPNNTNSRG

SEQ ID NO: 1849 - DNA, 954 bp, Haemophilus influenzae R2846
  CDS (1)..(954): transl_table=11
atgaatacattaatgaaatcacatcaattttctaccgcactttgccaaaatacaacacaatcaaatggtcagccattacgcttccctagcccagccaaactgaatttatttctttatatcaacggaaaattgccgaacggctatcatgaattacaaacgcttttccaatttttagattttggcgattggttagacattagtattcgggaacaagataatcaaattgttttaacgccagaaattccaaatctaaaaacggaagataatctaatttatcaagctgcaaaacttttacaagaaaaagccaatattcaattgggtgcaaatattcatttagataaaattcttccaatgggaggcggtgttggtggcggttcatccaatgcagcaaccgcattagtctctttaaattatttatggcaagccaatttatccattgatgaactggcaaaattgggattaacattaggcgcggatgtgccaatatttgtatacggacaggctgcttttgctgaaggcgttggggaaaaaatcacttattgtgaacctgccgagaaatggtttgttatattaaaacccgatgattcaatatcgacggctgtcatctttcaagatccaaatttaccacgtaatacaccgaaaaaatccctcgaacaacttttgagtgaaccttataaaaacgattgcgaaaaagttgtgataaatcattattcaaacgttgaaaaagcgttaaactggttgctacaatatgcgccggcaagattaacaggaacgggagcctgtgtttttgctgaatttgatcatgaagcagaagcgcaagcggtatttagacaaaaaccagaagcattttttggtttcgtcgctaaaggactcaatgtgtctcccttgcacgcaatgttgaagcagctatcatcaactcatactcatcgacaatctaaacctgaggttttataa

SEQ ID NO: 1850 - protein, 317 aa, Haemophilus influenzae R2846
MNTLMKSHQFSTALCQNTTQSNGQPLRFPSPAKLNLFLYINGKLPNGYHELQTLFQFLDFGDWLDISIREQDNQIVLTPEIPNLKTEDNLIYQAAKLLQEKANIQLGANIHLDKILPMGGGVGGGSSNAATALVSLNYLWQANLSIDELAKLGLTLGADVPIFVYGQAAFAEGVGEKITYCEPAEKWFVILKPDDSISTAVIFQDPNLPRNTPKKSLEQLLSEPYKNDCEKVVINHYSNVEKALNWLLQYAPARLTGTGACVFAEFDHEAEAQAVFRQKPEAFFGFVAKGLNVSPLHAMLKQLSSTHTHRQSKPEVL

SEQ ID NO: 1851 - DNA, 867 bp, Wolbachia endosymbiont of Drosophila simulans
  CDS (1)..(867): transl_table=11
atgaaaagtttttgtgtaaaggcgcctgcaaaaatcaatctttttttgcatgttgtagacaaaaaagaaacagggtatcacttgattgaaggtttatttgtctttgctaatctctctaattttttggaaataaaagtaggtgagaaggattctagatacgataactctacagttgaatttataaactccgagtctaaaataaataaccaatataacactgtaatgaaagcggttaatctgctgcttaggcatgctcctgtacgcactaaagtcactgtaaaggttgtaaaaaacataccaattgctgcaggacttggtagcggatcctcagatgctggagctgtggtacgtacgctagggaagctgtgggagattgataggacgattttaaatgaaatagccttaaacgttggtgctgatgttcccgcaagcgtagatagcaagccagtttttgttagaggtattggcgaagaattatgccacattaaaaaattctctttacctacaaatgtggtgcttgtgaaaccgaaaaaaaggtttttgagtacaccagaggtattttccaaacatgaaggaaaattttctgagccaattaaatggagcgatgacgctgaaaaggatttgttgaagcttcttaaagagacgagaaacgatcttcaagaaatagcaataagctttgtacctgaaattaaggatgtgatatcaacacttgagtcacaagaaggctctatactttctcgcatgtcaggcagtggtgtatcatgttttggaatattcgatagtgaggaaaatgcaaaagctgctgcagttaatatcggaaaaaagcaaccagaatggtgggtatgtgacactcaattaatagtttga

SEQ ID NO: 1852 - protein, 288 aa, Wolbachia endosymbiont of Drosophila simulans
MKSFCVKAPAKINLFLHVVDKKETGYHLIEGLFVFANLSNFLEIKVGEKDSRYDNSTVEFINSESKINNQYNTVMKAVNLLLRHAPVRTKVTVKVVKNIPIAAGLGSGSSDAGAVVRTLGKLWEIDRTILNEIALNVGADVPASVDSKPVFVRGIGEELCHIKKFSLPTNVVLVKPKKRFLSTPEVFSKHEGKFSEPIKWSDDAEKDLLKLLKETRNDLQEIAISFVPEIKDVISTLESQEGSILSRMSGSGVSCFGIFDSEENAKAAAVNIGKKQPEWWVCDTQLIV

SEQ ID NO: 1853 - DNA, 1011 bp, Crocosphaera watsonii WH 8501
  CDS (1)..(1011): transl_table=11
ttgaatttacaattcaacctatatccattatccattatccattgttcaacccacgaactgaaaatgagaacttatcagttaattgccccagctaaaattaatttatatttggaaattgtcggcgatcgccccgatggttatcacgagttagtgatgattttacaaagtattgatttaggcgatcgcctggaaattcgctctaatggaactcaaaaaattaatctacattgtaatcatcctttagttcccttagataacactaatattgcttataaggctgctcaattaatgagcgaagaatttacccaagcattcgctaattatggcggagttaatattactattgataagcaaattcctgtggctgctggactagcaggaggttcaacagatggggcggcggtgttagttggattaaatctattatgggaattaggtttaactataccccaattacaaaagttaggggaaaagttgggttccgatgtgccattttgtgtcagtggtggcacggcgatcgctacaggtagaggagaaaaattagatgctattcaagatttagacaatttgtgggttgttcttgctaaatataataatctctctgtttcaaccccttgggcttacaaaacttataaacaacaatttgccgagacttatattaatgatagggaagaaattaagtctcgtagctctcatattcattctggttcgtttgtacaagcaatcagtcacaaagatggagaaaaaataggacagttattacacaatgatctagaaaaagttgttttacctgaatatacccaagttactcaattaagagatattttacaacaagcagggggactgggaacaatgatgtcaggatcaggcccaactgtatttactctatgtcagtcccaaaccgaggcagaaactatcaaaaaaatagctagagaaaaaatagaagatcctaatttggaattttgggtaactcaattatctagtaatggtgtttctattatcagtgaatag

SEQ ID NO: 1854 - protein, 336 aa, Crocosphaera watsonii WH 8501
MNLQFNLYPLSIIHCSTHELKMRTYQLIAPAKINLYLEIVGDRPDGYHELVMILQSIDLGDRLEIRSNGTQKINLHCNHPLVPLDNTNIAYKAAQLMSEEFTQAFANYGGVNITIDKQIPVAAGLAGGSTDGAAVLVGLNLLWELGLTIPQLQKLGEKLGSDVPFCVSGGTAIATGRGEKLDAIQDLDNLWVVLAKYNNLSVSTPWAYKTYKQQFAETYINDREEIKSRSSHIHSGSFVQAISHKDGEKIGQLLHNDLEKVVLPEYTQVTQLRDILQQAGGLGTMMSGSGPTVFTLCQSQTEAETIKKIAREKIEDPNLEFWVTQLSSNGVSIISE

SEQ ID NO: 1855 - DNA, 861 bp, Exiguobacterium sibiricum 255-15
  CDS (1)..(861)
atgacgattattgtaaaagctccagcgaaaatcaatttagtattggatgcgacggcgaaacgtccggatggttatcatgatgtacatatggtgatgacgacggtggatttggcagatcgtctcgaattgacggaattagcgtccggcgagattcggatgaatgcccaacatgcttacgtaccaaatgatgaacgcaacttagcgtataaagcagcagcggttttaaaggaacggttcgacatcaagagcggggttgaaatctacttagaaaaacaaatcccggtcgcagcaggtcttgcgggcggctcgagtgacgcggccgcaacactgcgtggactgaatgaattatggaagctcaacctgacgcttgaacagttggcggaaatcggatcagaagtcggatcggatgtcccgttttgtgtcatgggtggcaccgcgattgccacggggcgcggggaaaagctcgagaaattagtctctcctccgccttgttgggttgtactggcgaaaccgaccatcggtgtctcgacagcagatgtgtacggagcgcttgatttggaaacagcggaacgtccggatgtcggagcaatgatcgatgcggtcaagaaccaagatttcacggccatttgtgaatcgctcggcaatgtccttgaatccgtgacattaccgatgcatccggaagtcgaacaaatcaaagcgttcatgacaagttgtggagcagaaggtgtcttgatgagcggcagcggtccgaccgtttttgctttgacggaacacgaaaatcgggcgcagcgtctctataacggattacgaggattttgtaatgaagtctacgtcgttcgtcttttaggggaaaaccattga

SEQ ID NO: 1856 - protein, 286 aa, Exiguobacterium sibiricum 255-15
MTIIVKAPAKINLVLDATAKRPDGYHDVHMVMTTVDLADRLELTELASGEIRMNAQHAYVPNDERNLAYKAAAVLKERFDIKSGVEIYLEKQIPVAAGLAGGSSDAAATLRGLNELWKLNLTLEQLAEIGSEVGSDVPFCVMGGTAIATGRGEKLEKLVSPPPCWVVLAKPTIGVSTADVYGALDLETAERPDVGAMIDAVKNQDFTAICESLGNVLESVTLPMHPEVEQIKAFMTSCGAEGVLMSGSGPTVFALTEHENRAQRLYNGLRGFCNEVYVVRLLGENH

SEQ ID NO: 1857 - DNA, 861 bp, Prosthecochloris aestuarii DSM 271
  CDS (1)..(861): transl_table=11
atgcagagtatcagcgtcaaggcatatgctaaaatcaatcttggcctcctgattaccggcaaacggccggatggctaccatactctcgagaccgtgtttgccccgatcaactggtatgacgagctgacattttctccttcgcaggaggtgcggatgagctgtaccaatcaggatcttccctgtgacgacagcaatctctgtatcagggctgcaaaggcgttgcgtgatttctccggtgtttcatcgggcgtggagatagggctcgccaaacacattcctttcggtgccggtcttggcggcggtagcagtgatgctgcctcgacgctcagagtgctcaacagaatgtggaatatcaacgcatcatcgcatgatctgcaccgtatcgccgtcggtcttggtgccgatgttccctattttctggagtccggcggactggcctatgccgccgggattggagaggagctcgaggaccttgaactgaccctcccgttttctattgtcacgctttttcccggcgatcatatttccacggtatgggcgtaccgcaatttttatgcctgtttcgagagggagattccggatttgaaaggactggtgcggtctttgtgccaggccagggatacttccgttctggaggtgttcgacaacgattttgaaccggtggttttcgaccattatccggccgtacgagaggcaaaagacgcgcttgtgcagtcagggagtttttttgcgtctctttccggaagcggttcggctgtttttggactttttgaaaacgacagcgatgcagagcgagctgcagagcagttgtcggcaacctaccgggcaagattcactccggcatcctttgctatggcctga

SEQ ID NO: 1858 - protein, 286 aa, Prosthecochloris aestuarii DSM 271
MQSISVKAYAKINLGLLITGKRPDGYHTLETVFAPINWYDELTFSPSQEVRMSCTNQDLPCDDSNLCIRAAKALRDFSGVSSGVEIGLAKHIPFGAGLGGGSSDAASTLRVLNRMWNINASSHDLHRIAVGLGADVPYFLESGGLAYAAGIGEELEDLELTLPFSIVTLFPGDHISTVWAYRNFYACFEREIPDLKGLVRSLCQARDTSVLEVFDNDFEPVVFDHYPAVREAKDALVQSGSFFASLSGSGSAVFGLFENDSDAERAAEQLSATYRARFTPASFAMA

SEQ ID NO: 1859 - DNA, 879 bp, Xylella fastidiosa Dixon
  CDS (1)..(879): transl_table=11
atgagtgtcgtcattgatgacggtgtgggctggtcggcgtggccggcacctgccaagttgaatttgtttttgcaaattaccgggcgacgtgttgatggttaccatgaattgcagactgtttttcgtctgcttgattggggtgatacgatccatctgcgggtgcgtgaagatggtcagattcatcgcattggtgagtcagtgactggggttgttgaggccgacgacttggtggtgcgtgcggcttatttgctaaaacatgcgactaatgtttatttaggggcagatatctttgttgaaaagcgaattccagttggtggcggctttggcggtgggtcctctgatgcggcgactgtgcttcttgtgttgaatgcattgtggcacaccaggcttgacgttgcggttttggcggccttggggttacgtttgggggccgatgtgccggtatttgtacatgggtgtaatgcgtgggctgagggtgtcggtgagtgtttaacgccgatgattctgcctggagcagcttacctgctattggatccaggggtgtgtgtgccgacacgggagctgttccttgatccggatttgacgcgcgatgcgtcccccgcgacaataggcgacttcattgctggtactgcgtttggtaatgcattcgagccagttctgagacggcgcgagtctgcggttgcgggtgctcttgatatgctctcagaggttggttttgcaagggtgactggctctggcagcggttgctttgtggaattcagtacgcgtgatgaggctgaatgtgctttggagcggctgccgtacgggttgtgtgcttgggttgctgatggcgcttcccgttctccgctgcttgatgtactgaaaacaatggaattttga

SEQ ID NO: 1860 - protein, 292 aa, Xylella fastidiosa Dixon
MSVVIDDGVGWSAWPAPAKLNLFLQITGRRVDGYHELQTVFRLLDWGDTIHLRVREDGQIHRIGESVTGVVEADDLVVRAAYLLKHATNVYLGADIFVEKRIPVGGGFGGGSSDAATVLLVLNALWHTRLDVAVLAALGLRLGADVPVFVHGCNAWAEGVGECLTPMILPGAAYLLLDPGVCVPTRELFLDPDLTRDASPATIGDFIAGTAFGNAFEPVLRRRESAVAGALDMLSEVGFARVTGSGSGCFVEFSTRDEAECALERLPYGLCAWVADGASRSPLLDVLKTMEF

SEQ ID NO: 1861 - DNA, 897 bp, Xylella fastidiosa Ann-1
  CDS (1)..(897): transl_table=11
atgggacgagttgatcccgtgagtgtcgtcattgatgacggtgtgggctggtcggcgtggccggcacctgccaagttgaatttgtttttgcaaattaccgggcgacgtgttgatggttaccatgaattgcagactgtttttcgtctgcttgattggggtgatacgatccatctgcgggtgcgtgaagatggtcagattcatcgcattggtgagtcagtgactggggttgttgaggccgacgacttggtggtgcgtgcggcttatttgctaaaacatgcgactaatgtttatttaggggcagatatctttgttgaaaagcgaattccagttggtggcggctttggcggtgggtcctctgatgcggcgactgtgcttcttgtgttgaatgcattgtggcacaccaggcttgacgttgcggttttggcggccttggggttacgtttgggggccgatgtgccggtatttgtacatgggtgtaatgcgtgggctgagggtgtcggtgagtgtttaacgccgatgattctgcctggagcagcttacctgctattggatccaggggtgtgtgtgccgacacgggagctgttccttgatccggatttgacgcgcgatgcgtcccccgcgacaataggcgacttcattgctggtactgcgtttggtaatgcattcgagccagttctgagacggcgcgagtctgcggttgcgggtgctcttgatatgctctcagaggttggttttgcaagggtgactggctctggcagcggttgctttgtggaattcagtacgcgtgatgaggctgaatgtgctttggagcggctgccgtacgggttgtgtgcttgggttgctgatggcgcttcccgttctccgctgcttgatgtactgaaaacaatggaattttga

SEQ ID NO: 1862 - protein, 298 aa, Xylella fastidiosa Ann-1
MGRVDPVSVVIDDGVGWSAWPAPAKLNLFLQITGRRVDGYHELQTVFRLLDWGDTIHLRVREDGQIHRIGESVTGVVEADDLVVRAAYLLKHATNVYLGADIFVEKRIPVGGGFGGGSSDAATVLLVLNALWHTRLDVAVLAALGLRLGADVPVFVHGCNAWAEGVGECLTPMILPGAAYLLLDPGVCVPTRELFLDPDLTRDASPATIGDFIAGTAFGNAFEPVLRRRESAVAGALDMLSEVGFARVTGSGSGCFVEFSTRDEAECALERLPYGLCAWVADGASRSPLLDVLKTMEF

SEQ ID NO: 1863 - DNA, 858 bp, Sulfitobacter sp. EE-36
  CDS (1)..(858): transl_table=11
atgacgacccaagccgctgccctcggtgttgctaacgcgggtttcgcctggtccaaggtgaacctgaccctgcatgtcactgggcagcgcagcgatggctaccatctgctggatagtcttgtggtgcgcgccggcgtgggcgaccggatcgcggtatctccctctgaccagcttgagctgtttatcgatggtccctatggcggtgccgccccccatgatgaccgcaacctcgtggtgcgtgcggcacggctgctggacgcgggcgcgggcaggggggcgcggttgcatctgacgaaaaacctccccgccgcggcagggatcggcggaggatcagcggatgcggccacggcgctgcgcttgctctcggcgcattgggggctgccggtgcccgaggacgtggcgcgactgggtgccgatgttccggtttgcctgcatgacaccccccagcggatggaggggatcggcgagcgattgacgcccgcgcccaagctgccgccctgctggctggtgctgatcaacccgaataaatccgccgccacgcccgaggtcttctcgcggctcgagtcccgcgccaacgcgcccatgcccaaagagctgcccgcattcaccagcgcgcctgcgttcgccgcctggctggccacacagcgcaacgatctggaggcaccggcgatccaggtggtgccagaggtggcagagtgtctgggcagcctacaggacgcgctgctggcgcgtatgtcgggctctggtgcgacctgctttggcctttacgagaccgaggcactggcgcagcgcgccgtcacgcgtattgcggcggcacagcccggctggtgggccaccgccgcaccgatgctggggtag

SEQ ID NO: 1864 - protein, 285 aa, Sulfitobacter sp. EE-36
MTTQAAALGVANAGFAWSKVNLTLHVTGQRSDGYHLLDSLVVRAGVGDRIAVSPSDQLELFIDGPYGGAAPHDDRNLVVRAARLLDAGAGRGARLHLTKNLPAAAGIGGGSADAATALRLLSAHWGLPVPEDVARLGADVPVCLHDTPQRMEGIGERLTPAPKLPPCWLVLINPNKSAATPEVFSRLESRANAPMPKELPAFTSAPAFAAWLATQRNDLEAPAIQVVPEVAECLGSLQDALLARMSGSGATCFGLYETEALAQRAVTRIAAAQPGWWATAAPMLG

SEQ ID NO: 1865 - DNA, 825 bp, Roseovarius nubinhibens ISM
  CDS (1)..(825): transl_table=11
atggttgaggttcttgccccggccaaggtgaacctgaccctgcatgtcaccggccgccgcgccgatggctatcatctgctcgacagtctggtgatgtttgccgatatgggcgaccgtatccgcgtccgcgaggccgaagagagcaagctcaccgtgaccgggccgatggcgcgcggcgtgccggtggacgaacgcaatctggtgctgcaggccgccaccaccatgggcgcgaccgggcatttcaccctcgacaaacacctgccccatgcggcggggcttggcggtggctcggcggatgcggcggcgacgctgcgggcgctgtcggtgctcaccgggcggcccctgccggaggcgcccgagacgctcggcgccgatgtgccggtgtgcctgtcgggcgtgtcggcccggatgcgcggcgtcggcgaagaactcagccccctgcccggcctgccgcggctgcatgcgcttttggtcaatccgaacctgccggtgctcaccgccgaggtgttcaaacggctcaccaagaccgacaatccgccgatgcccgaagagatcccgcaagggctcgaccgggccgggatggtcgcctggctcgcccgtcagcgcaatgatctcgaagccgcggccatcgccgccgagccggtgattgcacaggtttttcagacgcttgaggtgacgcccggctgtcagctcacccgcatgtcggggtcgggcggcacatgtttcggcctctatatggatgcggaaaccgcccacgccgcccaaggccgcctgcgccagagccagcccggctggtggtcgaaagcggtggtgctggggggctag

SEQ ID NO: 1866 - protein, 274 aa, Roseovarius nubinhibens ISM
MVEVLAPAKVNLTLHVTGRRADGYHLLDSLVMFADMGDRIRVREAEESKLTVTGPMARGVPVDERNLVLQAATTMGATGHFTLDKHLPHAAGLGGGSADAAATLRALSVLTGRPLPEAPETLGADVPVCLSGVSARMRGVGEELSPLPGLPRLHALLVNPNLPVLTAEVFKRLTKTDNPPMPEEIPQGLDRAGMVAWLARQRNDLEAAAIAAEPVIAQVFQTLEVTPGCQLTRMSGSGGTCFGLYMDAETAHAAQGRLRQSQPGWWSKAVVLGG

SEQ ID NO: 1867 - DNA, 831 bp, Oceanicola batsensis HTCC2597
  CDS (1)..(831): transl_table=11
atgacggagaatgagccggtgcgagaaatcgcgccggccaagatcaacctgacgctgcatgtgacggggcagaggcccgacggctaccacctgctggattcgctcgtcgtctttgccgatttcggggaccgtctggaaatccgacgtgccgagcagagcagcctgagggtctcgggcccgcgtgcgcagggcgtccccgcggatgccggaaacctggcggtgcgggcggccgctctgatggattggcccgtccatatcgatcttcaaaagcacctgccctccgccgcggggatcggggggggatcggccgatgccgcggccgtgctgcgggggattcaccgcctttccggtcgcccgcttcccaatgacagccatagactgggggcggatgtgcccgtctgcctgacctcgcgcgcggcccggatgcaggggctgggcgaagacgtcatccccctgcccgcactgccggccctgcacgccgtcctggtgaacccgggcgtcgaggtgccgacgccccgtgtcttcgcgcatctgacccgcaaggagaacccggcgatgccccggacgttgcccgtctggaccacggcggacaacctggccgcctggctggccgcgatgcgcaacgacctcgaacagccggcgatccgactggccccggtcatcgccgaggtgctgaccaccctcaaagccgatccggagtgcgtgctggcccggatgtcgggatcgggcgcgacctgtttcgccctgacggacacacgcgccgcagccgaagccatgacccgccgcctcgcccgcccgggatggtgggttcagcccgttaccctgtcctga

SEQ ID NO: 1868 - protein, 276 aa, Oceanicola batsensis HTCC2597
MTENEPVREIAPAKINLTLHVTGQRPDGYHLLDSLVVFADFGDRLEIRRAEQSSLRVSGPRAQGVPADAGNLAVRAAALMDWPVHIDLQKHLPSAAGIGGGSADAAAVLRGIHRLSGRPLPNDSHRLGADVPVCLTSRAARMQGLGEDVIPLPALPALHAVLVNPGVEVPTPRVFAHLTRKENPAMPRTLPVWTTADNLAAWLAAMRNDLEQPAIRLAPVIAEVLTTLKADPECVLARMSGSGATCFALTDTRAAAEAMTRRLARPGWWVQPVTLS

SEQ ID NO: 1869 - DNA, 825 bp, Erythrobacter sp. NAP1
  CDS (1)..(825): transl_table=11
atgacgcgcctcttggcgatcaccgaaaccgcatatgccaagatcaacctcgcgctgcatgtccgcaggcggcgtgaggatggttatcatgagcttgagacgctgttcgccttcgtcgatgcaggcgatgtgcttagtgcgcgagtgtctgaccaggaccgggtgaccacgctgggtgagtttgcaggcgggatcgacgacccgctcgacaacctcgttgccaaaacgctcgcggtgctttcccgagctcaggggctcgatatcacccttgagaagaacctgcctgtcgcggcgggtctcggcggcggatctgccgatgcgggcgctgttttcaggttggtagagcaaatgcatggcttgcctgacgattggcagtctcgcgctgcaaagctcggtgctgacgtgccgtgctgtgtacgaagtgaaacggtggttgggcgaggcaccgggaccgaactggagcgcgctccacaggatctggcaggtacgcccgtgctcttggtcaatccgcgtgttccactagccaccggcccagttttcaaggcgtgggatggccgcgaccgtggcgcgttgcctgaaggctcggcccgcgagatcgccctcgaagggcgcaatgatctcaccacgcccgcgctcgaattgtgccctcccatcagcgatgtgctagacgcactcgcgaatggcgaagcatggctctcccgcatgtcgggatcaggagccacctgttttgcattgtatgacgatgaagccgcgcgcgatcacgctgccgagcggcttagaaaaaagcgccccgactggtggctgctaacagggaaattgagatga

SEQ ID NO: 1870 - protein, 274 aa, Erythrobacter sp. NAP1
MTRLLAITETAYAKINLALHVRRRREDGYHELETLFAFVDAGDVLSARVSDQDRVTTLGEFAGGIDDPLDNLVAKTLAVLSRAQGLDITLEKNLPVAAGLGGGSADAGAVFRLVEQMHGLPDDWQSRAAKLGADVPCCVRSETVVGRGTGTELERAPQDLAGTPVLLVNPRVPLATGPVFKAWDGRDRGALPEGSAREIALEGRNDLTTPALELCPPISDVLDALANGEAWLSRMSGSGATCFALYDDEAARDHAAERLRKKRPDWWLLTGKLR

SEQ ID NO: 1871 - DNA, 948 bp, Synechococcus sp. RS9917
  CDS (1)..(948): transl_table=11
atgacggccacggttcgcgtcagcgctcccgccaagatcaatctccatctggaggtgctcgggttgcgacccgacggttttcatgaactggcgatggtgatgcagagcatcgacctggccgatgaactgctctgcgagaacaccgccgatgcctcactccagctcagctgcgatcggcctgagctcagttgcggtgccgacaacctgatccttcgcgccgctgagctgctgcgacaacgctcaggctttgccgagctgggggcacgccttcatctgcgcaagcggattcccatcggtgcgggcttggccggtggttccagtgatggagcggccaccctcgtggccctgaacacgctctggggactggggcactcgcaggccgatctggagcggatggctgccgagctgggctccgacatgcccttttgcgtgtcgggaggtacccagctgtgcttcggtcgaggcgaacgcctcgagcccttgcccgctgcggctgaggcgtccgagcctttggggattgtgctggtgaaagatcccggcgtcagcgtgtcaacgccatgggcctacggcgaatgccgtcgcctgcgtggtgcctcctacctcgaaggagaagcggcgtttgagcaacggcgctccgccctgcggcaggcttcctggttgccgttggcccaggccgcttcgccaccgccaccgccactgcgcaatgacctccaggatgtggtggcgccgcagacgccggcagtgcaaacagccctcaagctgttgcaggcgcttcctggccagctgcgggtggcgatgagcgggtcggggccgagttgcttcgccctgtttccggggcgaccccaggccgacggggccctggagcaggggatgccgcagtttcaggccgccgggctggaggcctggagttgttcctttctcggccatggggccaagctgttggcatga

SEQ ID NO: 1872 - protein, 315 aa, Synechococcus sp. RS9917
MTATVRVSAPAKINLHLEVLGLRPDGFHELAMVMQSIDLADELLCENTADASLQLSCDRPELSCGADNLILRAAELLRQRSGFAELGARLHLRKRIPIGAGLAGGSSDGAATLVALNTLWGLGHSQADLERMAAELGSDMPFCVSGGTQLCFGRGERLEPLPAAAEASEPLGIVLVKDPGVSVSTPWAYGECRRLRGASYLEGEAAFEQRRSALRQASWLPLAQAASPPPPPLRNDLQDVVAPQTPAVQTALKLLQALPGQLRVAMSGSGPSCFALFPGRPQADGALEQGMPQFQAAGLEAWSCSFLGHGAKLLA

SEQ ID NO: 1873 - DNA, 1011 bp, Synechococcus sp. WH 5701
  CDS (1)..(1011): transl_table=11
atggttgatccgttctcagcgaacacccgctcggcccccctgctggttgaggcccccgccaagatcaacctgcatctggaagtgctcggactgcgggccgatggcttccatgagctggcgatggtgatgcaaagcgtcgatctggccgatcgcctggcgatccagccccgagacgatggggcgatcgtgctgcactgcccaggcagcacgctccccagcgacggcggcaacctggtggtgcgggctgccgagcgcctgagggagcacgccggcaggccggagctgggggccacgatgcagctggagaagcgcattcccatcggcgccggcctggccggcggctccagcgacggggcggcggccctgctgggcctcaaccagctctgggggctccagctcgacaacggcagcctgcagcaactggcggcggagctgggctcggatgtgccgttcactctctgcggcggcacccagctctgcttcggccgcggggagatcctcgagccggtgccactgcccgaagaaggtccccgcgtcctggggccccagggccccgaggagctggcggtgctgctgatcaaggacccggccgccagtgtctccaccccctgggcctatggccgttgccgtgagctgcggggcgatttctatctcgaacgcgagagcgacttcgaacaacggcggcagagtctgcgcgagggagcgctgctgacggctctgcatggagagcgagccctgccgcccctgcgcaacgacctgcaggtggtggtggagccggagcaggagagcgtgcgggcggggctgagactgctgcgccagacgatcgagcccctggcggtggcgatgagcgggtcagggcccagcctgtttgccctcttcgccgggctggagcgggccgaggcggcccgggaacagctgcgggacgccctggccgacggtggtttcgaggcctggtgctgccgctgcagcagccgaggggccaggatcatcgaaccaggccaggccccatga

SEQ ID NO: 1874 - protein, 336 aa, Synechococcus sp. WH 5701
MVDPFSANTRSAPLLVEAPAKINLHLEVLGLRADGFHELAMVMQSVDLADRLAIQPRDDGAIVLHCPGSTLPSDGGNLVVRAAERLREHAGRPELGATMQLEKRIPIGAGLAGGSSDGAAALLGLNQLWGLQLDNGSLQQLAAELGSDVPFTLCGGTQLCFGRGEILEPVPLPEEGPRVLGPQGPEELAVLLIKDPAASVSTPWAYGRCRELRGDFYLERESDFEQRRQSLREGALLTALHGERALPPLRNDLQVVVEPEQESVRAGLRLLRQTIEPLAVAMSGSGPSLFALFAGLERAEAAREQLRDALADGGFEAWCCRCSSRGARIIEPGQAP

SEQ ID NO: 1875 - DNA, 930 bp, Synechococcus sp. WH 7805
  CDS (1)..(930): transl_table=11
atgacggcttcggtttgcgtcactgcgcccgccaagatcaacctgcacctcgaggtgcttggcctgcgtgccgacggttttcatgagctggccatggtgatgcagagcatcgatctcaaggatgagcttcgttgcgagaacacggcggacgggactctctctctgacctgtgacgagccagatctcagctgtggtgatgacaatctgatcctccgggctgctcgactgctcagggaacgctccggcttcagtgaacttggtgcgcggatgcatctgagcaaacgcattcccatcggcgctggcttggcgggtgggtcgagcgatggtgccgctgcgctggttgcactcaacgaactctggggattgggcctggttgagagccaagtggagcgcttggctgccgacctgggatcggatatgccgttctgcgttgccggtgggactcaattgtgctttggacgtggcgaacgactggagcctctgccgcctgtggaggccgagcttggacttcttctggtgaaagatcccgaggtcagtgtgtccacgccctgggcctacggcgagtaccggcgccagcgtggccatcagtacctccaagacgaggcctcgtttgaacgccgtcgtcaggacctccgctccgcccgatggctgcacccccttggccaggacatcccgccgttacgcaacgatctccaaaccgtcgttgcgcctctaacgccgtctgtgcggaacgcgatgaagtgtctgcgaccccagcaaggctgtttgcaggtggcgatgagtggttcgggcccgagcagtttcggactctttctcgaccggagtggggccgatcgggccaaggaggctgtggaggctcaacttgatggattgggtttgcggagttggagttgctcgttaatcccccacggggtcaagctgatgtcatga

SEQ ID NO: 1876 - protein, 309 aa, Synechococcus sp. WH 7805
MTASVCVTAPAKINLHLEVLGLRADGFHELAMVMQSIDLKDELRCENTADGTLSLTCDEPDLSCGDDNLILRAARLLRERSGFSELGARMHLSKRIPIGAGLAGGSSDGAAALVALNELWGLGLVESQVERLAADLGSDMPFCVAGGTQLCFGRGERLEPLPPVEAELGLLLVKDPEVSVSTPWAYGEYRRQRGHQYLQDEASFERRRQDLRSARWLHPLGQDIPPLRNDLQTVVAPLTPSVRNAMKCLRPQQGCLQVAMSGSGPSSFGLFLDRSGADRAKEAVEAQLDGLGLRSWSCSLIPHGVKLMS

SEQ ID NO: 1877 - DNA, 852 bp, Pseudoalteromonas tunicata D2
  CDS (1)..(852): transl_table=11
atgtcatctttatcgattattgccccggcaaaactgaacctttttttacacattaatggccgccgtcccgatggctatcatgaattggagaccctgtttgtttttttaaactatggcgaccaactcgattttacccttcgtactgacaatcaaatcctgattgagtgtgaaaacccagaattaacaactcaagataatttaatttttaaggcagctcggctattacaaaatcacgccaatatcacgcaaggtatcaccatcaaactcactaaaaagttacctatgggcggtggtgttgggggcggctcatctgatgctgcgaccacgcttttagcactcaatcacctttggcattgcgatttttcgaatgaaaaactggctgaacttggcctacaacttggtgccgatgtgcctgtatttgttaaaggttttgctgctatcgcacatgggattggtgaacaactggaagctgttaacttagcaccaagttggtacttagtggtacacccaaatgtgcacattagtacacaagcaatttttacacatccagatttgccacgctcaacacccaagataaatggcccttggcaagaggctaaattgtataatgattgtgaatctctggtgaaaaagctttctcccgaggttgaaaagaccctacagtggttgttagaatacgcgccgtcaagaatgacaggcacaggtgcttgctgttttgcttcttttgccgaagaagcggacgcaaataaagcacttaatgccttgccagcacattggcaaggatttgttgcccaaagcgttaatatatctccagcacatttggagttaaacgctaaactaaacttactctag

SEQ ID NO: 1878 - protein, 283 aa, Pseudoalteromonas tunicata D2
MSSLSIIAPAKLNLFLHINGRRPDGYHELETLFVFLNYGDQLDFTLRTDNQILIECENPELTTQDNLIFKAARLLQNHANITQGITIKLTKKLPMGGGVGGGSSDAATTLLALNHLWHCDFSNEKLAELGLQLGADVPVFVKGFAAIAHGIGEQLEAVNLAPSWYLVVHPNVHISTQAIFTHPDLPRSTPKINGPWQEAKLYNDCESLVKKLSPEVEKTLQWLLEYAPSRMTGTGACCFASFAEEADANKALNALPAHWQGFVAQSVNISPAHLELNAKLNLL

SEQ ID NO: 1879 - DNA, 879 bp, Photobacterium sp. SKA34
  CDS (1)..(879): transl_table=11
atgagtcaatacatcccttttggtgtcgcgagccaatggccagcgccagcaaaactgaatttatttttatacatcactggccaacgtccaaatggctaccatgatttacagacgctatttcaatttgtcgattatggcgatactttaaccatcacgccacgtcgtgataaccaaattaatttgacgcctgtaattgaaggggttaaaaccgaagacaaccttatttatcgcgctgcacatgcacttcgtcaagcggcaaattgtgacttaggtgtcgatattcatattgataagacccttcccatgggaggtggtcttgggggtggttcctccaatgcagcaacaacattagtcgccctcaattatctttggcaaactcagctatcggttgataaattagcagatattggtcttaaattaggtgctgatgttcctgtctttgtgcgtggaagtagtgcattcgccgaaggtattggtgaaaagctgcaaccagcagaacctcaagaaaaatggtttttaatcgcaaagcctgatattagtattgcaactgtcgatattttcacccatcctgaactcccgcgtaattctaaaaaacgtagcctcgatacactgttacgtggagtttacgaaaacgattgcgaaaaaattgtaagaagtcttaatcctgaggttgatcaggcgctttcgtggctgttagaatacgcgccgtcaagattgactggcactggcgcttgtgtgttttctgaatttaacactcaacaagaagccaacgcaatcctgaacattttacctgactggctccacggatttgtcgcaaaaggtgtcaacacgtctcctctaatgacagccttaaccgcacattctacggattgtcagtaa

SEQ ID NO: 1880 - protein, 292 aa, Photobacterium sp. SKA34
MSQYIPFGVASQWPAPAKLNLFLYITGQRPNGYHDLQTLFQFVDYGDTLTITPRRDNQINLTPVIEGVKTEDNLIYRAAHALRQAANCDLGVDIHIDKTLPMGGGLGGGSSNAATTLVALNYLWQTQLSVDKLADIGLKLGADVPVFVRGSSAFAEGIGEKLQPAEPQEKWFLIAKPDISIATVDIFTHPELPRNSKKRSLDTLLRGVYENDCEKIVRSLNPEVDQALSWLLEYAPSRLTGTGACVFSEFNTQQEANAILNILPDWLHGFVAKGVNTSPLMTALTAHSTDCQ

SEQ ID NO: 1881 - DNA, 894 bp, delta proteobacterium MLMS-1
  CDS (1)..(894): transl_table=11
atgtccggcaaacccgctgagggggatgggcttgagatcctggctccggccaaggtcaatctcagcctgcggattataagccgccgtgatgatggctatcacgagcttctctccctgatgctcaagctggaattggccgatcgcctgcggctgaccccgcaatcccggccgggcctggcgctgtactgcccggacagtgatttgcccgaggatgacggcaatctggtttaccgggcggcggccgctttctaccggcagaccggtttggcgccggccctggccatcagcctgtacaaaaaaattcccaccgccgccggcctgggtggcggcagcagcgatgccgccgctgtgctgcgcggcctgcaggggctgcaccccggggttttgagcccggcccaactgcaccaactggcccgcggcctgggggccgatgtccccttttttttgcagccgcaagcggcggcctgggcccggggaatcggcgatattctaaccccggtggcgccgccgccggccattgccgccctggtgctggtcaatcccggcttcgcggtggccaccaagtgggtctatgaacagctggccggcaactttccgttgacaaatcgggccgatccctttactttaaccggctctttggcggatggcggcgagggggagatcgccctggtcaacgacctggcggcggtaaccatccggcgttacccggagctggccaccatagccgagcagttgttggccgccggggccgacgccgccctgctggccggtagcggcccgacggttttcgggatcttccggcgacggcagcaggccgccgtggcggcggagcggctgcgggagctttatccgctggtgtatctgacccggccgttgccggcccccggtgaatga

SEQ ID NO: 1882 - protein, 297 aa, delta proteobacterium MLMS-1
MSGKPAEGDGLEILAPAKVNLSLRIISRRDDGYHELLSLMLKLELADRLRLTPQSRPGLALYCPDSDLPEDDGNLVYRAAAAFYRQTGLAPALAISLYKKIPTAAGLGGGSSDAAAVLRGLQGLHPGVLSPAQLHQLARGLGADVPFFLQPQAAAWARGIGDILTPVAPPPAIAALVLVNPGFAVATKWVYEQLAGNFPLTNRADPFTLTGSLADGGEGEIALVNDLAAVTIRRYPELATIAEQLLAAGADAALLAGSGPTVFGIFRRRQQAAVAAERLRELYPLVYLTRPLPAPGE

SEQ ID NO: 1883 - DNA, 876 bp, Rickettsiella grylli
  CDS (1)..(876): transl_table=11
atgtactggccagcgcctgctaaacttaatcttttcttacatctgacaggccgtcaacccaatcgttatcatcaattgcaaacggtttttcaactcgttgattattgcgatgaattaagtttcacgttgcgttcagatcctcaaatcaattgcacctgtttatctttactaaatcctgtcagcggtgcaattatcgctcatgacgataatttaaccattaaagcggcgaaactattacaaaatagatccgccaatgtgaaaggtgtcgatatatttattaaaaaacgtattccgattggcggtggtttaggtggaggaagttctaattgcgcaactacgcttgtggtattaaatcatttatggaaacttaaactttccttcaacgaactcttacggttaggtgcgacactcggtgctgatgtgcctgtatttattcagggagaaaccagttgggctgaagggattggtgaaaaattacaagcgcttcaattacctgaaaaatggtttgttgtgatggtcccaccggtctctatttcgacaacaaaacttttttcacatccccaattgacatacagcacaacacgcctcaaaatacaaacctttttaaacggatcattcactacgcagaatgattttgaatacattgttcggcaggattatcctttgattgcagaaggtttagacttcttaaatcattatgctcctgctcgtttatcagggactggcgcgagtatttttgcaacactcgaaacaaaaatagccgctgaagcattactggaaaaaattaaagcaccttatcggggttttatatgtaaaggcttaaccacgtcgcctttacaagtaataatgaaaaattggggtgtcgccaagtggtaa

SEQ ID NO: 1884 - protein, 291 aa, Rickettsiella grylli
MYWPAPAKLNLFLHLTGRQPNRYHQLQTVFQLVDYCDELSFTLRSDPQINCTCLSLLNPVSGAIIAHDDNLTIKAAKLLQNRSANVKGVDIFIKKRIPIGGGLGGGSSNCATTLVVLNHLWKLKLSFNELLRLGATLGADVPVFIQGETSWAEGIGEKLQALQLPEKWFVVMVPPVSISTTKLFSHPQLTYSTTRLKIQTFLNGSFTTQNDFEYIVRQDYPLIAEGLDFLNHYAPARLSGTGASIFATLETKIAAEALLEKIKAPYRGFICKGLTTSPLQVIMKNWGVAKW

SEQ ID NO: 1885 - DNA, 870 bp, Oceanobacter sp. RED65
  CDS (1)..(870): transl_table=11
atgagctcctacctagtactgcccagcccagccaaactaaatctatttttacatatcaatggtcgacgtgaagatggctatcacctattacaaagtatcttccagtttattgatcgttgtgatgaactcaaattccaactgagaagcgacagcgaaattgaagtcggcccggacatccccggcgtcgccaaaactgacaacttgatatatcgcgcagcgcgactacttcaacaacatagtcattgccagcttggtgcagatattgagttacataaaatcttacccatgggcggagggctcggtggcggcagttccaacgcggcaaccgctttacttggcttaaatcacttgtggcaattaaatctcagcatagagactctagctgaactaggcttacaactgggcgctgatgtccctgtgtttgtgcgcggttttgctgcatgggcagagggtgttggcgaaatccttaaacccatgatggatcttgaagaaacctggtttgtggtggtggttccccaatgtcatgttaataccggtgaaattttttcacataaagaattgacaaggaataccccaatatggaaaatgagcgccgctctgaggggcgagggtcggaatgactgcgaagcagtggttaccaaactttataaagaagttgataactcattgaatttgctaaaaaaattcggctctgctagaatgaccggcactggcgcttgctgctatctagaatgcaattctaaagctcaggcacaatcagttcgggcccagctaccggctgatatagaggctttcatagcaaaaggtgtaaatcattcaccattgcatcaagctctccagaaggctttgaacagtcaggtcaaaaattag

SEQ ID NO: 1886 - protein, 289 aa, Oceanobacter sp. RED65
MSSYLVLPSPAKLNLFLHINGRREDGYHLLQSIFQFIDRCDELKFQLRSDSEIEVGPDIPGVAKTDNLIYRAARLLQQHSHCQLGADIELHKILPMGGGLGGGSSNAATALLGLNHLWQLNLSIETLAELGLQLGADVPVFVRGFAAWAEGVGEILKPMMDLEETWFVVVVPQCHVNTGEIFSHKELTRNTPIWKMSAALRGEGRNDCEAVVTKLYKEVDNSLNLLKKFGSARMTGTGACCYLECNSKAQAQSVRAQLPADIEAFIAKGVNHSPLHQALQKALNSQVKN

SEQ ID NO: 1887 - DNA, 873 bp, Desulfitobacterium hafniense DCB-2
  CDS (1)..(873): transl_table=11
atgattaagaatcaggttgaaatgttcgcctacgccaaaataaatcttgctctggccataacaggccgtcgtcccgatgggtatcatgaattggaaagcgttatgcagtccataggaatctatgatcggatacgggtgactttggcagaggggggaattcagtgctcctgcggagagtggagcggcccggagaatttggcttaccgggcggcggaagcttttttaagcggactgggaagcagccagggtattcacattgacatcgagaagaatatccctgtccaagcgggattgggcgggggaagcgccgatgccgctgcggccttgcaggctctgaataagctttttaaagagccctatactgaagaggaactgaagagctttgccgctcagctgggtgcggatgtggccttttgcctgaaaggcgggacccaatgggcaaccggtgtgggtgaagaattaaaaggcctgcctcatgctccgaaaatcaaccttgttctcattaaacccgaccaaggggtaaatactgctgaagcctatcgggcttttgatcaggaaggaaaattctctcatctggattatgccgggtggcaagaggctttggcatccgggagagcagaaagccttatccctcttctttataatgatttagagccggcttctatgaagcttctcccggaaatagcctgggttaaagaagaattaatgaagcagaacggctgtctgggagctttgatgtccggcagcggctccgcagtgtttggaatcgttcaaactgaagaacaagcggaaaaaattgcagcgatatggcgggaaagaaactatcatgtctgggtaacgcatactatggaaaggggaaatatttatgggtag

SEQ ID NO: 1888 - protein, 290 aa, Desulfitobacterium hafniense DCB-2
MIKNQVEMFAYAKINLALAITGRRPDGYHELESVMQSIGIYDRIRVTLAEGGIQCSCGEWSGPENLAYRAAEAFLSGLGSSQGIHIDIEKNIPVQAGLGGGSADAAAALQALNKLFKEPYTEEELKSFAAQLGADVAFCLKGGTQWATGVGEELKGLPHAPKINLVLIKPDQGVNTAEAYRAFDQEGKFSHLDYAGWQEALASGRAESLIPLLYNDLEPASMKLLPEIAWVKEELMKQNGCLGALMSGSGSAVFGIVQTEEQAEKIAAIWRERNYHVWVTHTMERGNIYG

SEQ ID NO: 1889 - DNA, 933 bp, Synechococcus sp. RS9916
  CDS (1)..(933): transl_table=11
atgacggccacggttcgtgttctggctccagccaagatcaacctgcatctggaagtgctcggtctgcgcgccgacgggttccacgaactggccatggtgatgcagagcatcgatctggccgacgaactgatctgtgacaacaccgccgatggtcagatccatctcagctgcgacgtcgaaggtctcagcaccggcggggacaacctgatcacccgcgcagcagagctgttgcgcagtcggtcgggcttcaacgaactgggtgcttcgatccagctcaagaaaaagatccccatcggggccggtctggcggggggctccagtgatggtgctgcggcgttggtggcgctcaacatcctctggggtctgggccatgcgcccgcagacctcgaagtgatggcggcagagctcggttcggacatgcctttctgtatccgcgggggcacacagctctgtttcggccggggtgaacaactcgagccctgctccccagcggatcaggccatgggcatcgtgttggtgaaggatccgagcgtcagtgtctccaccccctgggcctatggcgagtgccgcaggctgcgcggtgcgtcctatctcgaaggtgacgcagcttttgctgagcgccgccaaggtctgcgggcgtctgattggctcaacccgttgcggcctgacaccccccctccactgcagaacgatctccagacggtggtggcgccgcagacggcctcggtgcgcactgcactcgcgttgctggaagcccttccaggtcagctgcgggttgcgatgagcggttcagggccaagttgctttgctctctttgccaatcgagagcaggccgatcaagcgctggaagcccatcgcagcagctttgagcaggctggcttggcctgctggagttgttcgatgcagcctgagggcgtcaagctggccccatga

SEQ ID NO: 1890 - protein, 310 aa, Synechococcus sp. RS9916
MTATVRVLAPAKINLHLEVLGLRADGFHELAMVMQSIDLADELICDNTADGQIHLSCDVEGLSTGGDNLITRAAELLRSRSGFNELGASIQLKKKIPIGAGLAGGSSDGAAALVALNILWGLGHAPADLEVMAAELGSDMPFCIRGGTQLCFGRGEQLEPCSPADQAMGIVLVKDPSVSVSTPWAYGECRRLRGASYLEGDAAFAERRQGLRASDWLNPLRPDTPPPLQNDLQTVVAPQTASVRTALALLEALPGQLRVAMSGSGPSCFALFANREQADQALEAHRSSFEQAGLACWSCSMQPEGVKLAP

SEQ ID NO: 1891 - DNA, 858 bp, Alteromonadales bacterium TW-7
  CDS (1)..(858)
atgaatagcaaaacctttttttcacttattgcacctgcaaaactcaatttatttttacatatcaatgcgcgccgagatgacgattatcacgaattagaaaccttatttactttcttaaacttcggcgatgagctctcttttgagttaacagatgaaccatcaatttcaatcactggtgatactaaaggcataccacttgaagataatctcatctataaagctgctttaatgttacaaactgatactaaaacaaagcacggtgtaaaaataaatttgataaaacgactgcctatgggaggaggagttggagggggatcgtctgatgcggcaacaacactattagcgctcaataaactgtggaatattaattacgacattaataaacttgctaatttaggcttacaattaggggctgatgtgcctgtatttatacgtggtgaaagcgccattgcgcaaggcattggggaaaaactacaccgtgttgaacttgcgcaaaaatggtactgtgttgtgcacccaaaccagcatgtaagcaccgctaaaatattcactcaccccgacttaaaacgcgatacaccaaaaatctcaggtgattggaaacagcaaactttgcacaacgattgtgagcctttagttaaaaagctatgccccgaggttgaaaaaaccctccagtggttgctaaaatacgctccgtcgaagatgaccggaacaggttcatgttgttttgtagagtttgatacacaagctcaagctagccatgtacttgctaacctcccccatacttggcagggatttgtagcgtcaaatgctaatatctcccctgctcatacggagttaaccgccattttcgatcaatga

SEQ ID NO: 1892 - protein, 285 aa, Alteromonadales bacterium TW-7
MNSKTFFSLIAPAKLNLFLHINARRDDDYHELETLFTFLNFGDELSFELTDEPSISITGDTKGIPLEDNLIYKAALMLQTDTKTKHGVKINLIKRLPMGGGVGGGSSDAATTLLALNKLWNINYDINKLANLGLQLGADVPVFIRGESAIAQGIGEKLHRVELAQKWYCVVHPNQHVSTAKIFTHPDLKRDTPKISGDWKQQTLHNDCEPLVKKLCPEVEKTLQWLLKYAPSKMTGTGSCCFVEFDTQAQASHVLANLPHTWQGFVASNANISPAHTELTAIFDQ

SEQ ID NO: 1893 - DNA, 852 bp, marine gamma proteobacterium HTCC2143
  CDS (1)..(852): transl_table=11
atgaagacactcactgtaccgtcacccgctaaacttaacctgatgctacatatcaccggtgtcagagaggatggctatcacctgctgcaaaccgtctttcaattgctagattacggcgacaccctacgatttagcccccgaggcgataacctaatcacgctaagtccagccattgctggcgtggcctacgacgacaacctgattgtgaaagcggcacacctgctgcagcgacaggcccctcagccttgcggcgttgatatcaaactgaccaaggtactgcccatgggcggaggcataggcggcggcagttccaatgcagccactaccctgctggcgcttaatcaactatgggaactgcatctcaccattgatcatctcgctgaaataggcctgcaactgggtgccgacgtacccgtatttgtccgcggccattctgcctgggcggaaggtatcggggagcagctgcaagcgcttagtattgctgaaacctggtacctggtcataaagcctgattgtgaggtatcaacggctgaaatattttcccacaaacaattgacacggaacacctctcccatcacaatggcggcctttttcgagcaggcaacttttaacaactgtgagaatgtggtcaggcgactctatccgcaggttgacgcggcgttgaagtggctaacggactgcggtgttaacaatcgatctgctcggcttaccggtaccggagcctgcgtttatacggattttccagataaacagtcagcgcaacaagcttttaacaagctaccggaaggattacagggttttattgccaaaggtgttgatgtgtcacccagccatctcgccttaaatttgtaa

SEQ ID NO: 1894 - protein, 283 aa, marine gamma proteobacterium HTCC2143
MKTLTVPSPAKLNLMLHITGVREDGYHLLQTVFQLLDYGDTLRFSPRGDNLITLSPAIAGVAYDDNLIVKAAHLLQRQAPQPCGVDIKLTKVLPMGGGIGGGSSNAATTLLALNQLWELHLTIDHLAEIGLQLGADVPVFVRGHSAWAEGIGEQLQALSIAETWYLVIKPDCEVSTAEIFSHKQLTRNTSPITMAAFFEQATFNNCENVVRRLYPQVDAALKWLTDCGVNNRSARLTGTGACVYTDFPDKQSAQQAFNKLPEGLQGFIAKGVDVSPSHLALNL

SEQ ID NO: 1895 - DNA, 843 bp, marine gamma proteobacterium HTCC2080
  CDS (1)..(843): transl_table=11
atgatcacctctctgacctgcctgtcaccggccaaactcaatttatttcttcatatcacgggaaggcgtgacgacggtcttcacaacctgcaaaccatctttcagctgctagattggggcgacgaaatgaggtttgagcggcaaaactcccaaggctgcacgctagatgctgattttgagggagtagcgccggaagaaaatttgatactgcgagccgcaagtctcctgataccccaagacccaagtatgggaggggtgcgcattagcattaaaaaacatatccctatgggtggaggattagggggtggcagctccaatgcagctacaaccttgctggcgctgaaccacctgttcgggcttggacacgacgaggaaacactcgctggcatggggctgaagttgggcgctgacgtaccggtcttcgttctaggccgcagtgcctggggcgaaggtgtaggagaattattaactcctattactcttcctgaagactggtttgtcatcctcagacccgactgccatgtgagcacagcagatatctttaacgcgccagaattgacaaggaacacagcgccgatcacaatgtcggccgctttcaaggggggcgttcacaatgacttgcagactgtcgttgagatgcgtcatcccgaggtgcgtaacgcgttgaaattgctcagcaattcagcgcctgcaatgatgactggcagcggggcctgcgtgtttgctcaagtggacactcagatcaaggcccaagccatcgcggcaaaagtaccggagtcactggctccggtggtagcgagaggcgtgaaccatcggcctcaatttgttgcagagcacgactaa

SEQ ID NO: 1896 - protein, 280 aa, marine gamma proteobacterium HTCC2080
MITSLTCLSPAKLNLFLHITGRRDDGLHNLQTIFQLLDWGDEMRFERQNSQGCTLDADFEGVAPEENLILRAASLLIPQDPSMGGVRISIKKHIPMGGGLGGGSSNAATTLLALNHLFGLGHDEETLAGMGLKLGADVPVFVLGRSAWGEGVGELLTPITLPEDWFVILRPDCHVSTADIFNAPELTRNTAPITMSAAFKGGVHNDLQTVVEMRHPEVRNALKLLSNSAPAMMTGSGACVFAQVDTQIKAQAIAAKVPESLAPVVARGVNHRPQFVAEHD

SEQ ID NO: 1897 - DNA, 861 bp, Pseudomonas putida GB-1
  CDS (1)..(861): transl_table=11
atgcacacgctcaccctgcccgccccggccaagctcaacctgtggttgcacatcatcggccgccgcgccgacggttaccacgagctggaaacggtgttccagttcctcgaccacggcgacgaactgagcttcgccctgcgtgaagacggcgtgatccgcctgcacaccgagatcgaggccgtcccccacgacagcaacctgatcgtgcgcgccgcgcgcaagctgcaagaacaatcaggcaccgcactcggtgccgatatctggctgaccaaggtgctgcccatgggcggcggcatcggcggcggcagctcggatgccgccaccaccctgctggccctcgcccacctgtggcaactggattgggacgaagaccgcctggccgcactgggcctgagcctgggcgccgacgtgccggtgttcgtacgcggccatgcggcgttcgcccaaggtgtgggcgagcaactgacaccggtcgacccgatcgagccctggtatgtcgtactggtgccgcaagtgtctgtcagcacagtagaaattttttcacatccacagttgacacgtgattcactcccccttaagatgcgccccgttcccgagggaaacagtcgaaatgactgccaaccggtggtagagcagaattacccagaagttcgcaatgcgttgaattcactggggaaattcactgaggctcggctaaccggcactggaagttgtgtgtttggggccttcccaagcaaagccgaagctgataaagttctggcccttctttcagcgacccaaacagggtttgtggcgaaaggaagcaatatttcgatgttgcatcgcaagctgcaaagtctggtcaagaagtcgagcgcataa

SEQ ID NO: 1898 - protein, 286 aa, Pseudomonas putida GB-1
MHTLTLPAPAKLNLWLHIIGRRADGYHELETVFQFLDHGDELSFALREDGVIRLHTEIEAVPHDSNLIVRAARKLQEQSGTALGADIWLTKVLPMGGGIGGGSSDAATTLLALAHLWQLDWDEDRLAALGLSLGADVPVFVRGHAAFAQGVGEQLTPVDPIEPWYVVLVPQVSVSTVEIFSHPQLTRDSLPLKMRPVPEGNSRNDCQPVVEQNYPEVRNALNSLGKFTEARLTGTGSCVFGAFPSKAEADKVLALLSATQTGFVAKGSNISMLHRKLQSLVKKSSA

SEQ ID NO: 1899 - DNA, 897 bp, Marinobacter sp. ELB17
  CDS (1)..(897): transl_table=11
atgacagaaactatgacggcaacaatagcggccatcactatgacgacaatcaccctaccggcgccggcaaagattaatctgttcttgcacatcaatggccgccgcgctgacggttaccacctgcttcaaaccctgttccagtttctggactacggcgatgaactgacctttgagctgactcccggtaaacccggcgtacgcctggcgcaatcgatgcccggggtagccgatgccgacaacctgatcattaaggctgctcacgcattggccggggacgcgctggcgcagttgcccggtgttaccatcagtatttgtaaaatactgcccatgggcggtggcttgggcggcggtagttctaacgccgcaaccaccctgctggcgttgaattacctgtggcagcttggctatgacgaagacgctctggcagaactgggcctgaatttgggcgccgatgtaccggtttttgtgcgcggccacgcagccatcggcgaaggtgtcggtgaacagctcacacccgcaaacccaccacaagactggtttgtggtgctaaaacccgaatgtaacattcaaaccaccaagattttttcggcaaaagggttgacaagaaacactccaaaaatgacaatggcgcccgcttttgagggagacgcctcggggtacaaaaacgactgtgaagcaacggttcgaaaactgtatcctgatgtcgctgaaagtctggattggctttcacaattcggacctacaagattaactggaacaggggcttgcattttcggacgtttcccgacagaatccgcagcccggatcatctgggaaagtagaccctctggcatcaaggggttcgtagctagaggggtgaatcattcacctctacaccagaaactagcagagctataa

SEQ ID NO: 1900 - protein, 298 aa, Marinobacter sp. ELB17
MTETMTATIAAITMTTITLPAPAKINLFLHINGRRADGYHLLQTLFQFLDYGDELTFELTPGKPGVRLAQSMPGVADADNLIIKAAHALAGDALAQLPGVTISICKILPMGGGLGGGSSNAATTLLALNYLWQLGYDEDALAELGLNLGADVPVFVRGHAAIGEGVGEQLTPANPPQDWFVVLKPECNIQTTKIFSAKGLTRNTPKMTMAPAFEGDASGYKNDCEATVRKLYPDVAESLDWLSQFGPTRLTGTGACIFGRFPTESAARIIWESRPSGIKGFVARGVNHSPLHQKLAEL

SEQ ID NO: 1901 - DNA, 870 bp, Bacillus sp. SG-1
  CDS (1)..(870): transl_table=11
atgagaacattagtaaaggctccggctaaaatcaatctaactctggatgtccttaataaacggccggatgggtatcatgaggtcgagatgattatgacaactattgatttagccgatcgtattgaattaacagagttgaaagaagacacaatcaaaattctttcccataaccgttttgtcccggatgaccagcgcaatctggcctatcaggctgctcatttattaaaggaaagactcggtatcaataaaggagtatccatatccattgataaagtcattccagtggcagccggacttgcaggcggtagcagtgatgcggcagctacccttcggggactgaacgacttgtggaatttggggctttcattggacgaacttgctgtgttgggggcggaaattggctcagatgtttctttctgtgtctatggcggtactgcgcttgccaagggaagaggagagaaaatccagcatatcaaggctcctccaaactgttgggtcatcttagccaagccgtcaatcggagtatccactggcgatgtatacaagaaccttaagcttgacagagtgcgtcatcccgatacaaagggaatgcttgccgccctggagaacggtgattatggccggatgtgtacaagcttggggaacgtccttgagtcggttaccttgaagatgcatcctgaagttcagcagatcaaagagcaaatggaacgttttggcgcagatgctgttttgatgagcggaagcggaccgactgtattcggccttgtccaatatgagtcaagattgccgagaatctataacggacttcgcggattttgtgatcaagtgtttgctgtgagaatgcagggagaccggaatacacttgcttaa

SEQ ID NO: 1902 - protein, 289 aa, Bacillus sp. SG-1
MRTLVKAPAKINLTLDVLNKRPDGYHEVEMIMTTIDLADRIELTELKEDTIKILSHNRFVPDDQRNLAYQAAHLLKERLGINKGVSISIDKVIPVAAGLAGGSSDAAATLRGLNDLWNLGLSLDELAVLGAEIGSDVSFCVYGGTALAKGRGEKIQHIKAPPNCWVILAKPSIGVSTGDVYKNLKLDRVRHPDTKGMLAALENGDYGRMCTSLGNVLESVTLKMHPEVQQIKEQMERFGADAVLMSGSGPTVFGLVQYESRLPRIYNGLRGFCDQVFAVRMQGDRNTLA

SEQ ID NO: 1903 - DNA, 813 bp, Erythrobacter sp. SD-21
  CDS (1)..(813): transl_table=11
atgacaatcgccgagacagcttttgccaagatcaacctcgcgctgcatgtccgcaggcggcgcgaggatggctatcgcgagctcgagacattgttcgccttcgtcgatggcggcgatcgcctgacggcgcattctgctgagcgggacagccttgtgaccgttggtgaattcggcgtcgcgctcgacagtcccttcgacaacattgtgatgaaggcgctcagcgcgctgcctcggcccgacggtctggaagttaccctcgagaagaacctgccggtcgcagcaggactgggtggcggttcggcagacgtgggggcgattttccggatggtcgaacagtcgcacggtctgcccgacgactggcaggcccgcgcagcgaagctaggcgccgatgtgccggcctgcatcgaaagccggacctgcctggggcgcggcactgggaccgagctggaacccgccgacggtgcgatggcgaatacgcccgtcctgctcgtcaatacgcgcacaccgcttgccacggggccggtcttcaaggcgtgggacgggatcgaccgcgggccgcttcccgatggcgatactcttcgcatgacggtcgaagggcgcaacgacctcgaggctcccgccatttcgctttgccccccgattgcgggcgtgctcgccgccctgcgcggaacttcgccgtttctcgcccgtatgtcgggttcgggtgcgacgtgctttgcgctctacgacagcaattcagcgcgcgacgaagccgccgcgcgcctcgccgcagaccatccggattggtggcagatgaggggtaatcttcgatga

SEQ ID NO: 1904 - protein, 270 aa, Erythrobacter sp. SD-21
MTIAETAFAKINLALHVRRRREDGYRELETLFAFVDGGDRLTAHSAERDSLVTVGEFGVALDSPFDNIVMKALSALPRPDGLEVTLEKNLPVAAGLGGGSADVGAIFRMVEQSHGLPDDWQARAAKLGADVPACIESRTCLGRGTGTELEPADGAMANTPVLLVNTRTPLATGPVFKAWDGIDRGPLPDGDTLRMTVEGRNDLEAPAISLCPPIAGVLAALRGTSPFLARMSGSGATCFALYDSNSARDEAAARLAADHPDWWQMRGNLR

SEQ ID NO: 1905 - DNA, 861 bp, Moritella sp. PE36
  CDS (1)..(861): transl_table=11
atgcaacacaagattagtcattggtcagcaccagcaaagttaaacctttttctatacattaatggtcgccgcaatgatggttaccacgaactacaaaccttatttcagtttgttgatatcggtgatgaattagcgatgtctccaaacctgagtgatcgcatcaccattacaccggcgatccctggtgtagcgctggccgacaatatcatctatcaagcggccatggttttgaaaacccattcatcattaccgctaggtgtcgatatttccttgactaagaatctaccgatgggcggtggtttaggtggcggttcttcagacgctgcaacaaccttagtcgcgttaaatcatctttggcaattaaacctcgatgaagaacaactggctgctattggtcttaagttaggtgccgacgtaccagtgtttgttcgtggccatgccgcatttgccgaaggtattggcgaacaacttacctccatagaggtggatgagcactattatcttattgcaatacctgacacacaggtcaatactgcgaaattattttccgatccagagttaatccgcaatacgccaaaacgcccgctgaatcagttgttacgagaagaatggaaaaatgactttgaaccaactgtaaaaaaacgtcatcccgaggttgcaaaagcattagagtggttgctaaaatatgcgccatctcgactgacaggttccggttgctgtgttttctctgaatttaaaactaagtctgacgcattagcagtattagctaaagcgcctaaaggcatgcaaatttatcttgcgaagggcttaaataaatcgccactattgtacgatttagcaagagagaattgcatgacttag

SEQ ID NO: 1906 - protein, 286 aa, Moritella sp. PE36
MQHKISHWSAPAKLNLFLYINGRRNDGYHELQTLFQFVDIGDELAMSPNLSDRITITPAIPGVALADNIIYQAAMVLKTHSSLPLGVDISLTKNLPMGGGLGGGSSDAATTLVALNHLWQLNLDEEQLAAIGLKLGADVPVFVRGHAAFAEGIGEQLTSIEVDEHYYLIAIPDTQVNTAKLFSDPELIRNTPKRPLNQLLREEWKNDFEPTVKKRHPEVAKALEWLLKYAPSRLTGSGCCVFSEFKTKSDALAVLAKAPKGMQIYLAKGLNKSPLLYDLARENCMT

SEQ ID NO: 1907 - DNA, 1221 bp, Picrorhiza kurrooa
  CDS (1)..(1221)
atggcttcttcccattctttgtgcacttaccaactccacgcttcatttaatcacaaatcccagttcatttctttcaaaaaaggcggcttttccgtacctttttcatccaattctcatgggtcacgcccattgcagacaaaagatcggttttcgagagcccatttggtcaaagccacggcttctgattcaaaaactgggaaaaaacaagtagaggtagtgcatgatcgtgaagagaaattcaataaattagcagacgaagtggataagaatgctggattgtcaagactaactctgttttctccttgcgagattaatgttttcttgagaataacgagcaaaatagcagatgggtatcatgacttgtcttctcttttccatgatatcattttaggagatgaaattcacctctctttgtccccgtcaaattcaactgatcgcctatccaccaacgtccctggagttcctcttgatgataaaaatttgataataaaggctcttaacctgtttaggaaaaaaactggagttgataactacttttggattcatctagataagaaggtgccaacaggtgctgggcttggtggtggtagcagcaatgcagctactgctttatgggcagcaaatcagtttagtggttgtattgcaagtgaaaaagagctccaagaatggtctggcgagattggttctgatattcccttctttttttcacatggagctgcttattgtactggtagaggcgaggtaattgaaaatattcctccacctacaccttttgatgttccaatggttctcattaagccaccagaagcatgcgccacagctgaagtttacaagtgccttaggttggacctgatgagcaagattgatcctttgactttgctggagaaggttttgagcaatggaatatctcaagatgtttgtgtcaatgatcttgaaattccggcttttgaagtccttccatcattaaaacgattgaaacaacgtatagcagctgcaggtcgaggacagtatgatgctgttttcatgtctggaagtgggagcacaattgtgggggtgggttccccagacccccctcattttttgtacgatgaggatgagtacaaggatgtcttcttatctgaagccagcttcatcacccgctcgcctgaccaatggtacacggaacctttttccgcaactgcttctacctcaaaaatggagtcttctcaatccgtcgagtag

SEQ ID NO: 1908 - protein, 406 aa, Picrorhiza kurrooa
MASSHSLCTYQLHASFNHKSQFISFKKGGFSVPFSSNSHGSRPLQTKDRFSRAHLVKATASDSKTGKKQVEVVHDREEKFNKLADEVDKNAGLSRLTLFSPCEINVFLRITSKIADGYHDLSSLFHDIILGDEIHLSLSPSNSTDRLSTNVPGVPLDDKNLIIKALNLFRKKTGVDNYFWIHLDKKVPTGAGLGGGSSNAATALWAANQFSGCIASEKELQEWSGEIGSDIPFFFSHGAAYCTGRGEVIENIPPPTPFDVPMVLIKPPEACATAEVYKCLRLDLMSKIDPLTLLEKVLSNGISQDVCVNDLEIPAFEVLPSLKRLKQRIAAAGRGQYDAVFMSGSGSTIVGVGSPDPPHFLYDEDEYKDVFLSEASFITRSPDQWYTEPFSATASTSKMESSQSVE

SEQ ID NO: 1909 - DNA, 867 bp, Magnetospirillum gryphiswaldense
  CDS (1)..(867): transl_table=11
atgcctccggtcagcgtcgaggcctgggccaaggtcaatttgtacttgcacgtcaccggcaaacgcccggatggctaccatttattggactcattggtggtcttcgccggcatcggcgacaccctgcgggtggaagccgccgatgatctgagtctgagcgtggatggccccaccgccgctttgctggacggtatgggcggcaatatcgttctggacgccgcccaggccctggcccgggcagcgcagattccggccctcgcccgtatccatctgaccaaacggctgccggtggcggcgggcatcggtggtggttccgccgacgccgcagccactctcctggccctgtcgcgcctgtggggggtgaccctaccccccgctcaactgcacgccctggccctggccctgggcgccgatgtgccagtctgcttgcgccgccgccccactcgtatggggggcatcggcgacactttggccgaagtcccgccgctgcccgccgcgtggctggtattggtcaaccccaggatcggcctgtcgacgccggcggtgttcaaggcccgccaaggctgcttcagtgccccgcagcccctggaaagcagccccgccgatgccgagcaattggccgccatgctggcccatcgcggcaacgatctgaccgatgccgctatcagcctggtgccggacatcgctgaagtcttgcagatgctgcaaaccaccccggagtgtctgttggcgcgcatgtcgggcagcggcgccacctgtttcggcctgttcgccggccaagcccaggccgatgccgccgccgccgccattaccgccgttcacggacaatggtggtgtaaatcggcgccattgctttctgcctcttga

SEQ ID NO: 1910 - protein, 288 aa, Magnetospirillum gryphiswaldense
MPPVSVEAWAKVNLYLHVTGKRPDGYHLLDSLVVFAGIGDTLRVEAADDLSLSVDGPTAALLDGMGGNIVLDAAQALARAAQIPALARIHLTKRLPVAAGIGGGSADAAATLLALSRLWGVTLPPAQLHALALALGADVPVCLRRRPTRMGGIGDTLAEVPPLPAAWLVLVNPRIGLSTPAVFKARQGCFSAPQPLESSPADAEQLAAMLAHRGNDLTDAAISLVPDIAEVLQMLQTTPECLLARMSGSGATCFGLFAGQAQADAAAAAITAVHGQWWCKSAPLLSAS

SEQ ID NO: 1911 - DNA, 1230 bp, Nicotiana benthamiana
  CDS (1)..(1230)
  misc_feature (1000)..(1000): n is a, g, c or t
  misc_feature (1027)..(1027): n is a, g, c or t
atgtctacctgtaattttcttggtagttaccagctttacacttgttgtaatgttaaaaaaccacacattggttcctttaaaaagagttctttttctcaatcttggtcaaaaaggccaaatgagtcatcttattttcacaagaattctcaatttggaagaagcaattttgttatagtgaaggcttcagattcaagaactaccgaggaacaagtagagataacatataatcctgaagagaagtttcataagttagccgatgaagtagatagagaggctgggctttcaagacttgctcttttttcaccttgcaagataaatgttttcttgagaattacaggcaagagggacgacggatatcacgagttggcatccctctttcatgttatcagtctaggagataaaataaagttctcgctatcaccatcgaaatcaaaggatcgtttatctactaatgttgctggagttcccctcgacgagagaaatttgatcataaaggccctcaatctttataggaaaaaaactggaacagacaaatacttttggattcatcttgataagaaggtgcctactggggctggtcttggtggcgggagcagtaatgctgcaacagctctgtgggcagcaaatcaattcagtggttgtcttgccactgaaaaggagctccaagagtggtctggtgagatcggttctgatatttctttctttttctcccatggagcagcttactgtacgggtaggggcgaggttgttcaagatattccatcgcccataccatttgacattccaatggttctcataaagcctcagcaagaatgctctactgctgaagtttacaagcgttttctattggatcagactagtaatgttgatcccttgagcttgctggagaagatcaaaactagtggaatatctcaagatgtgtgtgtcaatgatctagaacctcctgcctttgaagttcttccatctcttaaaaggttaaaacagcgagtgattgctgccngcaggggacagtatgatgccgtcttcntgtctggaagtggaagcacaatagtaggggttggttctccggatcctccacaatttgtttacgacgatgaagaatacaaggatgtcttcttgtcagaagctagtttcatcactcgggcagccaatcagtggtatgaggaacctctttcagctggcaattatgctgatcaagccgagttctccggatcttttgataattcttag

SEQ ID NO: 1912 - protein, 409 aa, Nicotiana benthamiana
  misc_feature (334)..(334): The Xaa at location 334 stands for Arg, Cys, Gly, or Ser.
  misc_feature (343)..(343): The Xaa at location 343 stands for Leu, Met, or Val.
MSTCNFLGSYQLYTCCNVKKPHIGSFKKSSFSQSWSKRPNESSYFHKNSQFGRSNFVIVKASDSRTTEEQVEITYNPEEKFHKLADEVDREAGLSRLALFSPCKINVFLRITGKRDDGYHELASLFHVISLGDKIKFSLSPSKSKDRLSTNVAGVPLDERNLIIKALNLYRKKTGTDKYFWIHLDKKVPTGAGLGGGSSNAATALWAANQFSGCLATEKELQEWSGEIGSDISFFFSHGAAYCTGRGEVVQDIPSPIPFDIPMVLIKPQQECSTAEVYKRFLLDQTSNVDPLSLLEKIKTSGISQDVCVNDLEPPAFEVLPSLKRLKQRVIAAXRGQYDAVFXSGSGSTIVGVGSPDPPQFVYDDEEYKDVFLSEASFITRAANQWYEEPLSAGNYADQAEFSGSFDNS

SEQ ID NO: 1913 - DNA, 1191 bp, Salvia miltiorrhiza
  CDS (1)..(1191)
atggcttcctcttcctcccaattcctctgcgctcacaatcctaaaccacatttcaattcatacaccaacgccactcttcctcaattttcttcctttaagccaaatggctcctcgtctttacgcaaaaagattcagtcttcaagaatccatcttatcagagcgacggcttctgattccaccaccggcagaaaacaactagaggtggtatatgatcttgagaataagttaaataagttagctgatgaagtggatagggatgctgggatttcaagactcactcttttttcgccttgcaagattaacgttttcctaagaataactggtaagcgagcagatggattccatgatttggcatctctttttcatgttatcagcctaggagataaaataaagttctcattgtccccatcaaaatcaacggatcgtttgtcaaccaatgtgcccggagttccacttgacgagagaaatttgataataaaggctcttaatctcttcaggaaaaagacaggggttgacaactacttttggattcatcttgataagaaagtaccaacgggagctggccttggtggtggcagcagtaatgctgctactgccttgtgggcagcaaatcagtttagtggttgcgttgctagtgaaaaggatctccaagagtggtcgggtgagattggctctgatatccccttcttcttttctcatggtgctgcatattgtacgggtagaggagaagtcgtcgaagatattcctccacctgtacctcttgatcttcctatggttctcattaagccacaagaggcatgccccactggtgaagtttacaagcgtcttcggatgaatcaaacgagccaaattgatcctttggtgttgctagagaagatatcaaagggtggaatttctcaggacgtttgcgttaatgatcttgaacctcctgcttttgaagtcgttccatcactaaaaagactgaaacaacgcatagctgcagctggtagagggcagtatgatgcggtcttcatgtccggaagtgggagtactattgtgggcgtgggttctcccgatccacctcagtttgtttacgatgatgatgagtacaaaaacgtctttttatcagacgccaaatttatcacacgctcagctcatcaatggtactcggagcctctttcaactgatgaatcgacgtgcgatgttgaatag

SEQ ID NO: 1914 - protein, 396 aa, Salvia miltiorrhiza
MASSSSQFLCAHNPKPHFNSYTNATLPQFSSFKPNGSSSLRKKIQSSRIHLIRATASDSTTGRKQLEVVYDLENKLNKLADEVDRDAGISRLTLFSPCKINVFLRITGKRADGFHDLASLFHVISLGDKIKFSLSPSKSTDRLSTNVPGVPLDERNLIIKALNLFRKKTGVDNYFWIHLDKKVPTGAGLGGGSSNAATALWAANQFSGCVASEKDLQEWSGEIGSDIPFFFSHGAAYCTGRGEVVEDIPPPVPLDLPMVLIKPQEACPTGEVYKRLRMNQTSQIDPLVLLEKISKGGISQDVCVNDLEPPAFEVVPSLKRLKQRIAAAGRGQYDAVFMSGSGSTIVGVGSPDPPQFVYDDDEYKNVFLSDAKFITRSAHQWYSEPLSTDESTCDVE

SEQ ID NO: 1915 - DNA, 1302 bp, Ginkgo biloba
  CDS (1)..(1302)
atggcctctccacgctacttcttacattcttcaatctatcaaacctctccgaatgttcattcgagctggaaaaaggctgaatcttgtgttggtacgaagacgcctttaagaattcgtggttcgaacctcaggcagcctggttttcgggggaatcatcccaggaaatgcttgaagaacccactggagaaattacttgttggatttcaacaaaatacagcattgttcgcagccagagccatggcttccgattccactgcaaacaatcagcagcagatggagatcctttataatcctgtggaacgaatagaaaagtacagacagctggataacagttcaagcatttcccgtttatctttgttctctccagctaagatcaatgtgtttttgagaattaccggtaagagacctgatggtttccatgaattggcatcactgttccatgtaattagcttaggagatataattaaattttcattatctcctatgaactcaaaggattctttgacaacaaatgccccaggagttcccctcgatggcagtaatttgataatcaaagcgctcaacttgtatagaaagaaaacagggtctaaacagttcttttgggttcatctcgataaaagggtacccacaggagctggacttggcgggggaagtggcaatgctgcaactgcactatgggcagcaaatcagtttaacggttgtcttgctagcatcaaggagcttcaggagtggtctggggaaattggctcagacattccctttttcttctctcatggagcagcatattgtactggtagaggtgaggttgtaaaagatatctcacctccaattcccttatatgttccaatagttcttatgaaacctcagcaggaatgctccactgctgaaatatacaagcgctttcagctggataaagctagtcctgtggaccctcttcagcttcttgaagagattacgactagtggaatttctcaagaactttgtatcaatgatttagaacctcctgcatttgaagtcctaccatctttgaaaaagttaaaacaacgagtgcttggcgtaaaccgaggccaatatgatgcagtgttcatgtctggaagtggtagcactattgtcggtgtcggtgatgcagagcctccacagtttatctacgatgatgatgagtacagtgatatgtttgtttcggatgcatattttcttactcggaaagagaatgaatggtaccaagaacctggttctgtagacctggcaaacttctctgacagaagtagtgcgattgaagccatgaaggaaccttataggtga

SEQ ID NO: 1916 - protein, 433 aa, Ginkgo biloba
MASPRYFLHSSIYQTSPNVHSSWKKAESCVGTKTPLRIRGSNLRQPGFRGNHPRKCLKNPLEKLLVGFQQNTALFAARAMASDSTANNQQQMEILYNPVERIEKYRQLDNSSSISRLSLFSPAKINVFLRITGKRPDGFHELASLFHVISLGDIIKFSLSPMNSKDSLTTNAPGVPLDGSNLIIKALNLYRKKTGSKQFFWVHLDKRVPTGAGLGGGSGNAATALWAANQFNGCLASIKELQEWSGEIGSDIPFFFSHGAAYCTGRGEVVKDISPPIPLYVPIVLMKPQQECSTAEIYKRFQLDKASPVDPLQLLEEITTSGISQELCINDLEPPAFEVLPSLKKLKQRVLGVNRGQYDAVFMSGSGSTIVGVGDAEPPQFIYDDDEYSDMFVSDAYFLTRKENEWYQEPGSVDLANFSDRSSAIEAMKEPYR

SEQ ID NO: 1917 - DNA, 1020 bp, Vitis vinifera
  CDS (1)..(1020)
atggctatggcttcatcacaattcttctgcgatcaccaacttcacccttcctgcaattccatcagaagaaccaccctcccttcatttagaccacatgggtcatcttcttttcgtccaaaaccccaatttcagaggactccatttctcagagtcagggcttctgctggtagaaaacaagtggagatagtgtataatccagatgaaaggataaacaatctagcagatgaagtggataagaacgctgggctttcaaggctcactctattttcaccttgcaagattaatgttttcctgagaataaccggtaagagagcagatggatttcatgatttggcatctctctttcatgtaatcagtttaggagatataattaagttctctttgtcgccatcaaaaacaaaggatcgcttatcaaccaatgtgccaggggtcccccttgatgaaagtaatttgatcataaaggcacttaacctttacaggaaaaaaactggcactgataactacttttgggttcatcttgataaaaaggtgccgactggggcagggcttggtggtggcagcagtaatgctgcaacagcactgtgggcagcaaatcaatttagtggttgccttgccactgagaaggaactccaacaatggtcaagtgagattggttcggatattccattcttcttctctaatggagcagctttttgtactggcagaggtgaggttgttgaagatatttccctgccaatacctttggacattccaatggttcttgtaaagccaccgcaggcatgctccaccgctgaagtttacaagcaccttcggttggatcaaactagtaaggttgatcccataaccttgcttgagaagatctcaaagaacagaatatctcaagatgtttgtataaatgatctagaacctcctgcatttgaagtcctcccatctctgaaaagattaaaacagcgtataattgcagcaagccgtggacaatatgatgctgttttcatgtctgggaggtataaaattcagtaa

SEQ ID NO: 1918 - protein, 339 aa, Vitis vinifera
MAMASSQFFCDHQLHPSCNSIRRTTLPSFRPHGSSSFRPKPQFQRTPFLRVRASAGRKQVEIVYNPDERINNLADEVDKNAGLSRLTLFSPCKINVFLRITGKRADGFHDLASLFHVISLGDIIKFSLSPSKTKDRLSTNVPGVPLDESNLIIKALNLYRKKTGTDNYFWVHLDKKVPTGAGLGGGSSNAATALWAANQFSGCLATEKELQQWSSEIGSDIPFFFSNGAAFCTGRGEVVEDISLPIPLDIPMVLVKPPQACSTAEVYKHLRLDQTSKVDPITLLEKISKNRISQDVCINDLEPPAFEVLPSLKRLKQRIIAASRGQYDAVFMSGRYKIQ

SEQ ID NO: 1919 - DNA, 1056 bp, Ostreococcus tauri
  CDS (1)..(1056)
atgtcgctcgcacgcgcgtcgtctctgagcgcccaaacgtccgcgcgcgcgcacacgggacgtaaaaatcgcacacaaaactatccgtcccgaagcgatcgttcagtcactcgcatcaccccgcgcgggtcgctcgcgcgggcgctcgcggcggacggcatcgacgtccgagagtacttctcgccgtcgaagatcaatctcttcctgagaatcaccgctcgaagaccggatgggttccacgagttggcgtcgctgttccacgtcgtcgacctgggcgacgggatgaagtttgcaaagtcgtcgagcgagacgaaggacacgctgatctgttcggacgcgagcataccgacggacgagagtaatttagtgatcaaggcgttgaatctgttcagaaagaagacggggatcgagcagtacttttgggtggagctggataagagagtgccgcacggcgcgggtttgggcggcggaagcggaaacgcggcgacgacgctcttcgccgcgaacgagctctgtgggaacccggcgagtgaggcggagttgttggagtggagtggggagattgggagtgatatctcggtgttcttttccaacggtgcggcgtattgcacggggagaggggaaatcgtggacaacgtcgagccgccgttggatctcgggacgaagatgctcttggtgaaaccgccgatgggatgttcaacgccagcggtgttcaaagccttggacctcgactcacgatcgaccgcggatccgctggaactgttgaagcgaatcgggagcgatgggtgctcggaagcggtgtgcattaacgatctcgaagcgcccgcgttcaaggttctcccggagctcgccgagttaaaggcggagctcaccgaggcgaccaaggacaagggaacggtggtgttcatgtcaggaagcgggagcactatcgtgatcatcggtgacgatgacgttcccgcgttcgtcgccgcggacgagacgttgttcaaggcgccgacgcgattgatcacgaggaagagcggtgagtggtacgcgccgacgctcgagcgaaagtga

SEQ ID NO: 1920 - protein, 351 aa, Ostreococcus tauri
MSLARASSLSAQTSARAHTGRKNRTQNYPSRSDRSVTRITPRGSLARALAADGIDVREYFSPSKINLFLRITARRPDGFHELASLFHVVDLGDGMKFAKSSSETKDTLICSDASIPTDESNLVIKALNLFRKKTGIEQYFWVELDKRVPHGAGLGGGSGNAATTLFAANELCGNPASEAELLEWSGEIGSDISVFFSNGAAYCTGRGEIVDNVEPPLDLGTKMLLVKPPMGCSTPAVFKALDLDSRSTADPLELLKRIGSDGCSEAVCINDLEAPAFKVLPELAELKAELTEATKDKGTVVFMSGSGSTIVIIGDDDVPAFVAADETLFKAPTRLITRKSGEWYAPTLERK

SEQ ID NO: 1921 - DNA, 888 bp, Candidatus Kuenenia stuttgartiensis
  CDS (1)..(888): transl_table=11
atgaagttttgggaagatcgggggaaattaaaaattgcagcaccagcaaaaatcaatttgttccttgagattttagggaaacgtccagatggatatcatgaaatcgaaaccgttatgcaaaaggtgtgtttatacgattacctttatttggaagataatgaaggtttggaattcagttgttcaaatccaggacttgaaacgggtgaaaataacctgattattaaagcggtgcgattgttgcaaaaagaatcgggtatttccagaggggtaaagatatttttagaaaaaaatataccggtgggggcaggtcttggcggcgggagtagtgacgctgcagccactttaatcggcataaataagatgtggcggcttgggtatgatagtgaaaaattaatgttgtttgcaagcaggcttggttccgatgtccctttttttataggcgagaatactgctgtttgcagaggaaggggggaaattattcagccattcccatcccgtgtaatatatcattatgtaatagtgtatccgggctttgaggtaagtactgctaccatatataaaaatttcaaaattggcttgacaaaaaatttgaaagatgttagtttcaccttgcgtttcttagaggcagacgatgctactctgctggggaagtatttgcacaatcgattagaagacgtcgtttttaagctctatcctcaacttgaagaaattagacagaaatttagaaaatttgatttttgtggagtgcttttatctggaagtggttctgcagtgtatggattatgcagaagtggaagtgatgcaaataatataggacaaaaattaaaaacgtttggtattggtgatgtttttgtggtagccagtgatttcgaaggcataactaagtga

SEQ ID NO: 1922 - protein, 295 aa, Candidatus Kuenenia stuttgartiensis
MKFWEDRGKLKIAAPAKINLFLEILGKRPDGYHEIETVMQKVCLYDYLYLEDNEGLEFSCSNPGLETGENNLIIKAVRLLQKESGISRGVKIFLEKNIPVGAGLGGGSSDAAATLIGINKMWRLGYDSEKLMLFASRLGSDVPFFIGENTAVCRGRGEIIQPFPSRVIYHYVIVYPGFEVSTATIYKNFKIGLTKNLKDVSFTLRFLEADDATLLGKYLHNRLEDVVFKLYPQLEEIRQKFRKFDFCGVLLSGSGSAVYGLCRSGSDANNIGQKLKTFGIGDVFVVASDFEGITK

SEQ ID NO: 1923 - DNA, 1215 bp, Stevia rebaudiana
  CDS (1)..(1215)
atggcgacaatggctgccactcacttcttccaccgtcgcgacatcatctcctccggcgatcgtacatcgataaccagcaatcccctcgcaggcggaagtttaaaacaattttcttctttctataagcccaaagggttttcttctgctcaaagtaattaccgaaatttgagaactcaagctacatctgatggcagaaaacaagtggagatagtgtataatcttgatgagaagctgaatagagtagctgatgaggtggatatgaatgctggattgtcaagacttactctgttttctccttgcaagataaatgtgttcctaagaataacaagtaagagaccagatgggtttcatgatttggcatctctatttcatgtaatcagtttgggagataagataaagttctccttatcaccatcaaaatcgacggatcggttgtcaactaacgtatccggaattccacttgatgaaagaaatttgataataaaggccttgaatctatatcgcaagaagactggaagtgacaaattcttttggattcatgttgataaaagggttccaaccggggcggggcttggtggtggaagtagtaatgctgcaaccgctttgtgggcggctaaccaatttagtggtggtttggcgaccgaaaaagaactccaagaatggtctggtgagattggttcagatgttcctttctttttctcaaatggagctgcctattgcacaggccgaggtgagattgttcaagatataccttcacctgtaccgtttgacttgccaatggttctgatcaaacccccagaagcatgttcaaccgctgaagtttacaagcggtttcggttagatgtatcaagtgctattgatcctttaaccttgctggacaagatatcaaagaacggaatatcacaagatgtttgtgtaaatgatttggaaccgcctgcatttgaagtgcttccatctttgaaaagattaaaacaacgcgtaattgcagccggacgtggaaaatatgattctgtttttatgtctggaagtggaagcactatagtaggcgttgggtctccagatcccccacaatttatatacgatgaagaagattataaggatgtatttttttcagaagctaacttcatcacacgtgcggataaacaatggtatagtgaaccaacatctgcttcaaatgctgattcgtttgcaaatcaaaccagtaacaccgcgtaa

SEQ ID NO: 1924 - protein, 404 aa, Stevia rebaudiana
MATMAATHFFHRRDIISSGDRTSITSNPLAGGSLKQFSSFYKPKGFSSAQSNYRNLRTQATSDGRKQVEIVYNLDEKLNRVADEVDMNAGLSRLTLFSPCKINVFLRITSKRPDGFHDLASLFHVISLGDKIKFSLSPSKSTDRLSTNVSGIPLDERNLIIKALNLYRKKTGSDKFFWIHVDKRVPTGAGLGGGSSNAATALWAANQFSGGLATEKELQEWSGEIGSDVPFFFSNGAAYCTGRGEIVQDIPSPVPFDLPMVLIKPPEACSTAEVYKRFRLDVSSAIDPLTLLDKISKNGISQDVCVNDLEPPAFEVLPSLKRLKQRVIAAGRGKYDSVFMSGSGSTIVGVGSPDPPQFIYDEEDYKDVFFSEANFITRADKQWYSEPTSASNADSFANQTSNTA

SEQ ID NO: 1925 - DNA, 840 bp, Acinetobacter sp
  CDS (1)..(840): transl_table=11
atgattcgtgtagcatcccctgccaaaattaatttatttttgcatattacaggccgtcgtaatgacggctatcacgagttacaaagtattttccaactaatcgatctttacgactggatgactttcacacctcgaactgaagccgaagataatttaagcattacaggcattgaacaagtcgatcttgaacaaaacctgatttttcgtgcggctcaactgcttaaactgtatgcaaaaaaatattgcggtctgaatattcagattgaaaagcagattccgatgggtgcaggtctgggtggtggttcatccaatgccgcaacaacacttctggtcttaaatcagctctgggattgtggcttaaatctcgatcaattggcagctttgggtgtgaaactaggtgccgatgttcctatttttatttatggtaaaaatgcatgggctgaaggcattggagagaaacttacttttgtggatttagatcaaaaacaatacattattttgaaacctgactgttttatcagcacccaattgcttttttcacaaaaaacgttgacaagagattccaatcgcactacattttgcgcctatcagttaaagccttctgattttggaaataactttgaagctcttgctcgtagtctatatccagaagtagaagaagcaatgcaatatcttgatcagtttggtcaggcaaagcttacaggtacaggtgcttgtgtttttactgaggtcactcctgaaatgaatgtgagcgaaattgttcaacatgcaccatgtaaatcttatgtggtacatagcttgaacaaatcaccattatctcatttcatgactgatatttag

SEQ ID NO: 1926 - protein, 279 aa, Acinetobacter sp
MIRVASPAKINLFLHITGRRNDGYHELQSIFQLIDLYDWMTFTPRTEAEDNLSITGIEQVDLEQNLIFRAAQLLKLYAKKYCGLNIQIEKQIPMGAGLGGGSSNAATTLLVLNQLWDCGLNLDQLAALGVKLGADVPIFIYGKNAWAEGIGEKLTFVDLDQKQYIILKPDCFISTQLLFSQKTLTRDSNRTTFCAYQLKPSDFGNNFEALARSLYPEVEEAMQYLDQFGQAKLTGTGACVFTEVTPEMNVSEIVQHAPCKSYVVHSLNKSPLSHFMTDI

SEQ ID NO: 1927 - DNA, 900 bp, Agrobacterium tumefaciens
  CDS (1)..(900): transl_table=11
atgcgcctgcatgaggtttccggggccaccgaaacagtcgaggcggccccggccaagatcaatctggcgctgcatgtcaccggtcagcgggcggatggctaccatctgcttgaaacgctggtgacattcaccgcagccggcgacatgatccgcattcgcgacgccgccaccgacagtttttccatttccggccccttcggcgatcttctaagtgccggcgatagcggcgataacctcgtcacccgcgcccgagacatcttgcgcgatgctcttgcgtcgacaggccagcccgcccgcccggtcgacattcacttggaaaagaacctgccggttgcttcgggcatcggtggcggctcggcggatgccgctgcaacgctgcgggggcttctgcggcactgggatgccgcgattgcaccggaaaagcttaagtctctcgcactgaaactgggcgcggatgtaccgatgtgccttgcaagccggccgctgattgcgcgcggcatcggtgaggacatcgaagccctcaccgacctgccggaactctccatggttctggccaatccgctgaaggctgtctcaacaccggagattttccggcgattgcagaacaaggtcaatccgcacctgcccacaccttcgacgattggctgggcgacaactggctggatggattttctcgcccaaagccgcaacgatctgcagccgccggctcaggcgctgctgcctgaaatcggggagataaccgggttgctgtctgaggaaggggccacccttgtccgcatgtccggttccggggcaacctgtttcgggatttttcattccttcgatgccgccaaaaacgcggaaacatcacttaggaaaaaacgtcccggctggtattttcacgcaacgcggaccatttga

SEQ ID NO: 1928 - protein, 299 aa, Agrobacterium tumefaciens
MRLHEVSGATETVEAAPAKINLALHVTGQRADGYHLLETLVTFTAAGDMIRIRDAATDSFSISGPFGDLLSAGDSGDNLVTRARDILRDALASTGQPARPVDIHLEKNLPVASGIGGGSADAAATLRGLLRHWDAAIAPEKLKSLALKLGADVPMCLASRPLIARGIGEDIEALTDLPELSMVLANPLKAVSTPEIFRRLQNKVNPHLPTPSTIGWATTGWMDFLAQSRNDLQPPAQALLPEIGEITGLLSEEGATLVRMSGSGATCFGIFHSFDAAKNAETSLRKKRPGWYFHATRTI

SEQ ID NO: 1929 - DNA, 870 bp, Anaplasma marginale
  CDS (1)..(870): transl_table=11
gtgcagggagtaatgtctaagtaccaaataaacgctccggcgaagataaacctgtttctccacgtagtgggcaagtctacatccggatatcacgttttggagtctgttttcgccttcatcaagctgtatgatacgctcgaaattgaaattgggtcaaagaacaggggcgtggaatttgtgcagttttcaggaataagcaagcacgataacaccgtgcagagggctatagggcatctggtgaggagatgtgctccaggtgttgccaagaatgtatacgttaaagttaccaagaatatccccgtgtctgcggggctggctggtggctctgccgatgcagcggctattatacgtctacttggcaaaaattggggtattagtgaagctggtatgaacggcgttgcagcatctgtagggagcgatgttcccgtgtgtttacagtccagaacggcatttgtttgcggaatgggggagaatgtaaaactcttgccacatgccaggctgccaaactacgtcgtattggtgaggccgaatgatgtatacttaagcactagaagcgtatttgacgcctatgcttgcaaggaattttcgaagagtataggtaacccaccagaggcttctgacggcttgctaagcctagttatgcagtctcgcaacgatctgactgacactgcgatattacttgtacctgaagtgaaaaaaatcctggcagaattacaatctttgggaggctgcattctttccaggatgagcggcagcggggccacatgctttgcactgtttgaggatggtgaggccgcaagcgatggagtgagatacctaaaaggccggcacccagaatggtgggtgtacgagactgaaatctcccagtaa

SEQ ID NO: 1930 - protein, 289 aa, Anaplasma marginale
MQGVMSKYQINAPAKINLFLHVVGKSTSGYHVLESVFAFIKLYDTLEIEIGSKNRGVEFVQFSGISKHDNTVQRAIGHLVRRCAPGVAKNVYVKVTKNIPVSAGLAGGSADAAAIIRLLGKNWGISEAGMNGVAASVGSDVPVCLQSRTAFVCGMGENVKLLPHARLPNYVVLVRPNDVYLSTRSVFDAYACKEFSKSIGNPPEASDGLLSLVMQSRNDLTDTAILLVPEVKKILAELQSLGGCILSRMSGSGATCFALFEDGEAASDGVRYLKGRHPEWWVYETEISQ

SEQ ID NO: 1931 - DNA, 954 bp, Anabaena sp
  CDS (1)..(954): transl_table=11
atgcgttcctacaaattaattgctcccgccaaaattaacttgtatctagaaatcatcggcgacagacccgatgggtatcatgagttagtgatgatattgcaaagtatcgacctagccgacgagattgaaatacattccctcagcagtgaaactatccacgttcattgcaaccacccacaagttcccacagacaaaagtaatctcgtatatcgcgccgccgaactgatggtgacaagatttcctgaagccttcacgaaacatgggggtgtagatattaccgttcacaaacatattcccgtagcagctggcttggctggaggttcaactaacgccgcagctgtgttagtcgggatagatttactttggaacttgggactaacccaaacagaactagaagagttaggctctactcttggttccgacgtaccattttgtgtggctggtggtacagtcatcgccacaggtagaggagaacaactttcccccttgcccagtttggatcatatatatatagtattaggcaaatatcgcagcttagaagtttccaccgcctgggcatataaaaactaccgtcaagaatatggtagtacttatcttagagataccaatgacttagcctcccgcgccgccgcagttcattcaggtagtatagttaaggctattgtagaaaaagatgctgtagcgatcgcccaaagactgcacaatgatttagagaaagtagtattaccttcctatccgcaagttttgcacctccgagaattgttagcatctcaaccaggtgttatcggaaccatgatgtctggttcaggcccttcagtatttgctctgtgtgaaactcaagcacaagcagaacaagttcagcagcaagtaagacaaacaattcccgacgaagatttagaattatttgtaactcgcacaattacacatgggattcaagttgtgggtaatgggtaa

SEQ ID NO: 1932 - protein, 317 aa, Anabaena sp
MRSYKLIAPAKINLYLEIIGDRPDGYHELVMILQSIDLADEIEIHSLSSETIHVHCNHPQVPTDKSNLVYRAAELMVTRFPEAFTKHGGVDITVHKHIPVAAGLAGGSTNAAAVLVGIDLLWNLGLTQTELEELGSTLGSDVPFCVAGGTVIATGRGEQLSPLPSLDHIYIVLGKYRSLEVSTAWAYKNYRQEYGSTYLRDTNDLASRAAAVHSGSIVKAIVEKDAVAIAQRLHNDLEKVVLPSYPQVLHLRELLASQPGVIGTMMSGSGPSVFALCETQAQAEQVQQQVRQTIPDEDLELFVTRTITHGIQVVGNG

SEQ ID NO: 1933 - DNA, 954 bp, Anabaena variabilis
  CDS (1)..(954): transl_table=11
atgcgttcctacaaattaattgctcccgccaaaattaacttgtatctagaaatcatcggcgacagaccagatgggtatcatgagctagtgatgatattgcaaagtatcgacctagccgacgagattgaaatacactccctcagcagtgaaaccatccgcgttcattgcaatcacccacaagttcccacagacaaaagtaatctcgtatatcgcgccgccgaacttatggcgacaaaatttcctgaagccttcgctaaatatgggggtgtagatattaccgtccacaaacatattcctgtagcagctggcttggctggaggttcaaccaacgccgcggctgtgttagtcgggatagatttactttggaacttgggactaacccaaacagaactagaagaattgggatctattctgggttccgacgtaccattttgtgtcgctggtggtacagtcatcgccaccggtagaggagaacaactttcgcccttgcccaatttggatcatatatatatagtattgggcaaatatcgcagcttagaagtttccaccgcctgggcatataaaacctatcgtcaagaatatggtagtacttatcttagagataccaatgacttagcttcccgcgccgccgcagttcattcaggtagtatagttaaggctattgtagaaaaagatgccgtagcgatcgcccaaaaactgcacaatgatttagagaaagtagtattaccttcctatccccaagttttgcaactgagagaattgtttgcatctcaaccaagtgttatcggaaccatgatgtctggttcaggcccctcagtatttgctttatgtgaaaatcaagcacaagcagaacaagttcagcagcaagtaagacaaacaattcccgacgaagatttagaattatttgtaactcgcacgattacacatgggattcaagttttgggtaatgagtaa

SEQ ID NO: 1934 - protein, 317 aa, Anabaena variabilis
MRSYKLIAPAKINLYLEIIGDRPDGYHELVMILQSIDLADEIEIHSLSSETIRVHCNHPQVPTDKSNLVYRAAELMATKFPEAFAKYGGVDITVHKHIPVAAGLAGGSTNAAAVLVGIDLLWNLGLTQTELEELGSILGSDVPFCVAGGTVIATGRGEQLSPLPNLDHIYIVLGKYRSLEVSTAWAYKTYRQEYGSTYLRDTNDLASRAAAVHSGSIVKAIVEKDAVAIAQKLHNDLEKVVLPSYPQVLQLRELFASQPSVIGTMMSGSGPSVFALCENQAQAEQVQQQVRQTIPDEDLELFVTRTITHGIQVLGNE

SEQ ID NO: 1935 - DNA, 807 bp, Aquifex aeolicus
  CDS (1)..(807): transl_table=11
atgataaaggttctatcacccgcgaagataaacttggggctgtgggttctggggaggctaccgagtggttaccacgagatacttaccctctaccaggaaatccccttttacgatgagatttacataagggagggagtgctcagggtagagacgaatataggcattcctcaggaggagaacttagtttacaaaggattgagggaatttgaaaggataacagggattgaaattaattactctatctttattcagaagaatataccacccggtgcgggactcggaggaggaagctcaaatctggcggtagttctaaaaaaggtaaacgaactcttaggatctcccttatctgaggaagaactgagggaacttgtaggcagtatttccgcagacgctccctttttccttctcggaaagagcgctatcggaaggggaaaaggggaagttcttgaacccgtggaaactgaaatttcgggtaaaatcacactagtaatccctcaagtctcttcaagcacgggaagggtttactcttccttgagggaagaacacttcgttacaccagagtacgcggaagaaaaaattcaaagaatcatctcgggagaggttgaggaaatagaaaacgtcctcggagatatagcgagggaactttacccggaaataaacgaggtttacaggtttgttgagtatttgggattcaagccttttgtgagcgggagcggttcaacggtttacttcttcggaggggcatcggaagagttaaaaaaagctgcaaagatgaggggctggaaagttgtagagctagaactctaa

SEQ ID NO: 1936 - protein, 268 aa, Aquifex aeolicus
MIKVLSPAKINLGLWVLGRLPSGYHEILTLYQEIPFYDEIYIREGVLRVETNIGIPQEENLVYKGLREFERITGIEINYSIFIQKNIPPGAGLGGGSSNLAVVLKKVNELLGSPLSEEELRELVGSISADAPFFLLGKSAIGRGKGEVLEPVETEISGKITLVIPQVSSSTGRVYSSLREEHFVTPEYAEEKIQRIISGEVEEIENVLGDIARELYPEINEVYRFVEYLGFKPFVSGSGSTVYFFGGASEELKKAAKMRGWKVVELEL

SEQ ID NO: 1937 - DNA, 1152 bp, Arabidopsis thaliana
  CDS (1)..(1152)
atggcaacggcttctcctccatttatctcaactctcagcttcactcactcttctttcaaaacttcttcttcttcttcattttctccgaagcttcttcgacccctcttaagcttttccgtcaaagcttccagaaagcaagtagagatagtgtttgatcctgatgagaggcttaataagataggtgatgatgttgacaaagaagctcctttgtccaggcttaagctcttctcaccttgcaagatcaatgttttcttgaggatcaccggaaagcgagaagatgggtttcatgatttagcctctttgtttcatgtgattagcttaggagacactattaaattctcattgtcaccatcaaagtctaaagatcgtttgtctactaacgttcaaggagtccctgttgatgggagaaatctgattataaaagcacttaacctttacaggaagaaaactggtagtaacagattcttctggattcatttagataagaaggtgcctaccggggctggactcggtggtggaagtagtaatgctgcaactgcactctgggcggcaaatgagctcaatggaggtcttgtcactgagaacgaactccaggattggtcaagtgaaattgggtcagatattcctttcttcttctcgcatggagctgcctattgtaccgggagaggtgagattgtccaagaccttcctccaccttttcctcttgatcttccgatggtgctcataaagccccgagaagcatgttccactgctgaagtttacaaacgtcttcgtttagatcagacgagcaatattaatcccttgacattactagagaatgtgaccagcaatggtgtgtctcaaagcatatgcgtaaacgatttggaaccgccagcgttttcagttcttccatctctaaaacgcttgaagcaacggataatagcatctggacgtggggaatacgatgctgtgtttatgtctgggagtggaagcactattatcggtattggttcaccagatcctcctcaatttatatatgatgatgaagaatacaagaacgtgttcttgtctgaagcaaactttatgacgcgtgaggctaatgaatggtacaaagaacctgcttctgcaaatgctactacctcatccgccgaatctcgcatggatttccaatga

SEQ ID NO: 1938 - protein, 383 aa, Arabidopsis thaliana
MATASPPFISTLSFTHSSFKTSSSSSFSPKLLRPLLSFSVKASRKQVEIVFDPDERLNKIGDDVDKEAPLSRLKLFSPCKINVFLRITGKREDGFHDLASLFHVISLGDTIKFSLSPSKSKDRLSTNVQGVPVDGRNLIIKALNLYRKKTGSNRFFWIHLDKKVPTGAGLGGGSSNAATALWAANELNGGLVTENELQDWSSEIGSDIPFFFSHGAAYCTGRGEIVQDLPPPFPLDLPMVLIKPREACSTAEVYKRLRLDQTSNINPLTLLENVTSNGVSQSICVNDLEPPAFSVLPSLKRLKQRIIASGRGEYDAVFMSGSGSTIIGIGSPDPPQFIYDDEEYKNVFLSEANFMTREANEWYKEPASANATTSSAESRMDFQ

SEQ ID NO: 1939 - DNA, 855 bp, Azoarcus sp
  CDS (1)..(855): transl_table=11
atggacaccgctgaactgacccgtctcgccgattgcccggcgccggcgaagctgaacctcttcctgcatgtcatcgggcgccgtccggatggctaccacctgctgcaaacggcgtttcgcctgctcgactggggcgacgcgctgtcgttcgagctgcgccatgacggcgtcgtcgcacgcgccaccgatcttcccggcgtttctgccgagcatgacctcgtcgtgcgcgccgcgcggctgctgcagtcatacaccggctgccgcctcggcgccgacatccgcgtcgacaagcgactgccgatgggtggcggtctcggcggcggcagttcggacgccgcgacgacgctgatcgcgctgaaccgtctgtggcgcaccggcgtccgcggtgaagagctcaccgcgctcgggctgcggctcggcgccgacgtcccgtttttcatcttcggccgcgacgcgttcgccgaaggcgtcggcgacgaactgcgcccgctcgacctcccgccagcctggtacgtcgtcgtcgcgccgccggtcacggtacccaccgtggaaatttttgcagcaggggagttgacgcgggataccgaacccatcaaaattacggacttcgcagcgagcaccactcgtaacgatctgcaagcagttgcctgcagccgttatcccgagatcggtgcagcaatcgactggctggcgcagtttgcgccggcgcgaatgaccggttcgggcgcctgcgtatttgcgcaggtggcaagcgaggacgacgccgaacgcatcgtcgcaagctgcccggggtcgtaccgggcatggaaagcgcgcagcgtgatgcagcatccgcttcgtggctgggtcggttga

SEQ ID NO: 1940 - protein, 284 aa, Azoarcus sp
MDTAELTRLADCPAPAKLNLFLHVIGRRPDGYHLLQTAFRLLDWGDALSFELRHDGVVARATDLPGVSAEHDLVVRAARLLQSYTGCRLGADIRVDKRLPMGGGLGGGSSDAATTLIALNRLWRTGVRGEELTALGLRLGADVPFFIFGRDAFAEGVGDELRPLDLPPAWYVVVAPPVTVPTVEIFAAGELTRDTEPIKITDFAASTTRNDLQAVACSRYPEIGAAIDWLAQFAPARMTGSGACVFAQVASEDDAERIVASCPGSYRAWKARSVMQHPLRGWVG

SEQ ID NO: 1941 - DNA, 870 bp, Bacillus anthracis
  CDS (1)..(870): transl_table=11
ttgaagctactagtgaaagcaccagcaaagattaatctgtcgttagatgtactgggaaaaagacaagacggatatcatgaagtgaaaatgattatgacaacaatcgatttagcggatcgtttagaactaatggaattagcagaagaccgtattgaaattttatcccataatcggtatgtcccagacgaccaaagaaatctggcttatcaagcagcgaaattattaaaagagaagtttaatgtgaaaaaaggtgtatctattactattgaaaaaacgattccagtagcagctggattagcgggtggaagtagtgatgcagcagcgacattacgtggtcttaataaattatggaatttaggccttacgattgatcaattagcagagcttggcgcagaaattggatcagatgtatcgttttgtgtatatggtgggacagcaattgccactggaagaggagagcagattgagcacataaaaactccaccttcttgttgggttattttagcaaagcctcatattggtgtatttactgctgatgtatatggaaatttaaagttaaatcgagttacacatccaaatgtagataaaatggtggatgtcataaacgctggagactacaaagggatttgcgatactgttggtaacgttttagaagatgtaacgtttgctatgcatcctgaagttgcacgtattaaagcacaaatgaagcgatttggagcagatgctgtattaatgagtggaagtggtccaactgtattcggcctagtgcaccatgattcgcgaatgcatcgtatatataacggattaaaaggattttgtgaacaagtatacgcagtacgtttattaggagagcgagaaacgcttgaataa

SEQ ID NO: 1942 - protein, 289 aa, Bacillus anthracis
MKLLVKAPAKINLSLDVLGKRQDGYHEVKMIMTTIDLADRLELMELAEDRIEILSHNRYVPDDQRNLAYQAAKLLKEKFNVKKGVSITIEKTIPVAAGLAGGSSDAAATLRGLNKLWNLGLTIDQLAELGAEIGSDVSFCVYGGTAIATGRGEQIEHIKTPPSCWVILAKPHIGVFTADVYGNLKLNRVTHPNVDKMVDVINAGDYKGICDTVGNVLEDVTFAMHPEVARIKAQMKRFGADAVLMSGSGPTVFGLVHHDSRMHRIYNGLKGFCEQVYAVRLLGERETLE

SEQ ID NO: 1943 - DNA, 870 bp, Bacillus cereus
  CDS (1)..(870): transl_table=11
ttgaagctactagtgaaagcaccagcaaagattaatctgtcgttagatgtactgggaaaaagacaagacggatatcatgaagtgaaaatgattatgacaaccattgatttagcagatcgtctagaactaacggaattagcagaagaccgtattgaaattttatcccataatcggtatgtcccagacgaccaacgaaatttagcttatcaggcagcgaaattattaaaagagaagtttaatgtaaaaaaaggtgtatctattactattgaaaaaacgattccagtagcagctggattagcaggtggaagtagtgatgcagcagccacattacgtggtcttaataaattatggaatttagggcttacaattgatgagttagcagagcttggcgcagaaattggatcagatgtatcgttctgtgtatacggaggcacagcaattgccactggaagaggagagaaaattgagcatataaagactccgccttcttgttgggttattttagcgaaaccacatataggtgtatctactgctgatgtgtatggaaatttaaagttaaatcgagttacacatccgaatgtagataaaatggttgatgtcataaattctggtgattataaaggaatttgtgatactgttggtaacgttttagaagatgtaacatttggaatgcatcctgaagttgcccgtattaaatcacagatgaagcgatttggagcggatgctgtattaatgagtggaagtggtccaactgtatttggacttgtacaccatgattcacgaatgcatcgcatttataacggattaaaaggattttgtgaacaagtctatgcggtacgtttattaggagagcgagaaacgcttgaataa

SEQ ID NO: 1944 - protein, 289 aa, Bacillus cereus
MKLLVKAPAKINLSLDVLGKRQDGYHEVKMIMTTIDLADRLELTELAEDRIEILSHNRYVPDDQRNLAYQAAKLLKEKFNVKKGVSITIEKTIPVAAGLAGGSSDAAATLRGLNKLWNLGLTIDELAELGAEIGSDVSFCVYGGTAIATGRGEKIEHIKTPPSCWVILAKPHIGVSTADVYGNLKLNRVTHPNVDKMVDVINSGDYKGICDTVGNVLEDVTFGMHPEVARIKSQMKRFGADAVLMSGSGPTVFGLVHHDSRMHRIYNGLKGFCEQVYAVRLLGERETLE

SEQ ID NO: 1945 - DNA, 879 bp, Bacillus cereus
  CDS (1)..(879): transl_table=11
gtgaatagattgaagctactagtgaaagcaccagcaaagattaatctgtcgttagatgtactgggaaaaagacaagacggatatcatgaagtgaaaatgattatgacaacaattgatttagcggatcgtttagaactaatggaattagcagaagaccgtattgaaattttatcccataatcggtatgtcccagacgaccaaagaaatctggcttatcaagcagcgaaattattaaaagagaagtttaatgtgaaaaaaggtgtatctattactattgaaaaaacgattccggtagcagctggattagcgggtggaagtagtgatgcagcagcgacattacgtggtcttaataaattatggaatttaggccttacaattgatcagttagcagagcttggcgcagaaattggatcagatgtatcgttttgtgtatatggtgggacagcaattgccactggaagaggagagcagattgaacacataaaaactccaccttcttgttgggttattttagcaaaacctcatattggtgtatctactgctgatgtatatggaaatttaaagttaaatcgagttacacatccaaatgtagataaaatggtggatgtcataaacgctggagactacaaagggatttgcgatactgttggtaacgttttagaagatgtaacgtttgctatgcatcctgaagttgcacgtattaaagcacaaatgaagcgatttggagcagatgctgtattaatgagtggaagtggtccgactgtattcggcctagtgcaccatgattcgcgaatgcatcgtatatataacggattaaaaggattttgtgaacaagtatacgcagtacgtttattaggagagcgagaaacgcttgaataa

SEQ ID NO: 1946 - protein, 292 aa, Bacillus cereus
MNRLKLLVKAPAKINLSLDVLGKRQDGYHEVKMIMTTIDLADRLELMELAEDRIEILSHNRYVPDDQRNLAYQAAKLLKEKFNVKKGVSITIEKTIPVAAGLAGGSSDAAATLRGLNKLWNLGLTIDQLAELGAEIGSDVSFCVYGGTAIATGRGEQIEHIKTPPSCWVILAKPHIGVSTADVYGNLKLNRVTHPNVDKMVDVINAGDYKGICDTVGNVLEDVTFAMHPEVARIKAQMKRFGADAVLMSGSGPTVFGLVHHDSRMHRIYNGLKGFCEQVYAVRLLGERETLE

SEQ ID NO: 1947 - DNA, 825 bp, Bacteroides fragilis
  CDS (1)..(825): transl_table=11
atgattacatttccgaatgccaaaataaatctgggactgaacattaccgagaaacgtccggacggataccacaatctggaaactgtattttatcccatacctctggaggatgcccttgaaatcacaatattaaatgactcgaaacaaaaatttgtcctgcaccaatccggcctggaaatcagcggggagccggaaaccaacctggtagtaaaggcatacctgctgctggaacaggaatttcaattacctccggtagacatttatctatataaacatattccttcgggtgccggtttgggaggtggctcggcagatgctgctttcatgctaaaattgttgaacgaaaaattcaatttacatctggcagatgaaaaattggaagagtatgctgccatattaggagctgactgcgctttttttattaaaaacaaaccaacctttgcagaggggatcggcaacattttttccccagtcgatttatcattgaaaggatatcagttggtacttgtaaaaccggatgtctttgtctcgacccgagacgccttttcacaaatacaacctcactacccggatcattcattgaaagaaattataagacgtccggtaagcgaatggaaaaactgcatgttcaatgactttgagaaaagcgtctttccacaataccctgtcattgaagaaataaaaaaagaattgtacagcaaaggagccatatatgccgccatgtcgggttccggttcatctgttttcggattattctctcccgaagaaaaaataacgaaaatggattttgaagcagcattctgtttccaaaccgaattgaaataa

SEQ ID NO: 1948 - protein, 274 aa, Bacteroides fragilis
MITFPNAKINLGLNITEKRPDGYHNLETVFYPIPLEDALEITILNDSKQKFVLHQSGLEISGEPETNLVVKAYLLLEQEFQLPPVDIYLYKHIPSGAGLGGGSADAAFMLKLLNEKFNLHLADEKLEEYAAILGADCAFFIKNKPTFAEGIGNIFSPVDLSLKGYQLVLVKPDVFVSTRDAFSQIQPHYPDHSLKEIIRRPVSEWKNCMFNDFEKSVFPQYPVIEEIKKELYSKGAIYAAMSGSGSSVFGLFSPEEKITKMDFEAAFCFQTELK

SEQ ID NO: 1949 - DNA, 864 bp, Bacillus halodurans
  CDS (1)..(864): transl_table=11
gtgaaacagtcagtgaaggccccagctaaaatcaacttatctctcgatgtcttacataaacgaccagacggttatcatgaagtagacatgattatgacaacagtcgaccttgccgatcggattgatttaacactccgtgaagatgggcttatttcggtcgatgtctctgaaggctttgtaccaaatgatgaaaagaacttagcgtaccaagcagcggctttgctaaaagcgcgctatcacgtaaacgaaggggtctccatttacataacaaagcgaatcccagtagcagctggcttagctggtggaagcagtgatgctgccgccacattaagggggctgaacgatctatggcagctcgggttatctttggatgaattagcggttcttggagcggaaataggctctgatgtttcgttttgtgtatatggagggacagcaagggccacaggacgtggggaaatcatagaacggattgcctcaccgccaccgtgttgggttattttagcaaagccgcccatcggtgtatccaccgctgatgtttataaacgactaaatgtatctgcgattgaccatccaacaacggaacacatgattgctgcgatcgaggggaaagattttgatggcatctgtcatcacttgcacaatgtccttgaatcggttaccctcgacctttacccagaggtaagaaacattaaagaacaaatgaagcgctttggtgctgatggggtattaatgagcggaagtggccccactgtttttggtctcgtgtcgaaggaatcgcgagttcaacggatctacaatgggctacggggtttttgccatcaagtgtatgcggttcggataattggatcggccggctcttga

SEQ ID NO: 1950 - protein, 287 aa, Bacillus halodurans
MKQSVKAPAKINLSLDVLHKRPDGYHEVDMIMTTVDLADRIDLTLREDGLISVDVSEGFVPNDEKNLAYQAAALLKARYHVNEGVSIYITKRIPVAAGLAGGSSDAAATLRGLNDLWQLGLSLDELAVLGAEIGSDVSFCVYGGTARATGRGEIIERIASPPPCWVILAKPPIGVSTADVYKRLNVSAIDHPTTEHMIAAIEGKDFDGICHHLHNVLESVTLDLYPEVRNIKEQMKRFGADGVLMSGSGPTVFGLVSKESRVQRIYNGLRGFCHQVYAVRIIGSAGS

SEQ ID NO: 1951 - DNA, 870 bp, Bacillus licheniformis
  CDS (1)..(870): transl_table=11
ttgcgtattttagagaaggcgccggctaaaattaatttgtcgctcgacgttcgccacaaacgtccagatgggtatcatgaagtagagatggtcatgacgacgattgatttggcggatcgggtcgaattaacagagctggcagaagataaagtaacggtttcttcgcataaccgctttgttcccgacgatcagcgaaaccttgcttatcaggctgcaatgctcatgaaagaacgctacggcattaaaaaaggggtttccatttttattacgaaagtgattcccgttgctgcgggccttgcaggaggaagcagcgatgcggctgccgtcttcagaggattgaaccggctgtgggatttgaagctttcgatgaatgaactggctgagcttggcgctgagatcggatctgatgtctccttttgcgtacatggaggaacggctcttgcaacgggaaggggagagaaaatccgtcatatcgagactccgccgcactgctgggtagtgctggcaaagccgacgatcggcgtatcaactgcagaagtgtacaagcagctgaaagtcgacgagattgaacatccggatgttcaaggtatgattgctgcgattgaagagaagaattttcaaaaaatgtgtgacaagctcggcaatgtactcgaatctgttacattgaacatgcaccccgaagtcgcgatgatcaaaaatcaaatgaagcggttcggcgccgatgctgtgctgatgagcgggagcggccccactgtgttcggacttgttcaatacgaatcaaaagtgcaaagaatctataacggattaagagggttttgcgatcaggtttatgcggtgcggatgatcggagaacaaaatgaacttgattaa

SEQ ID NO: 1952 - protein, 289 aa, Bacillus licheniformis
MRILEKAPAKINLSLDVRHKRPDGYHEVEMVMTTIDLADRVELTELAEDKVTVSSHNRFVPDDQRNLAYQAAMLMKERYGIKKGVSIFITKVIPVAAGLAGGSSDAAAVFRGLNRLWDLKLSMNELAELGAEIGSDVSFCVHGGTALATGRGEKIRHIETPPHCWVVLAKPTIGVSTAEVYKQLKVDEIEHPDVQGMIAAIEEKNFQKMCDKLGNVLESVTLNMHPEVAMIKNQMKRFGADAVLMSGSGPTVFGLVQYESKVQRIYNGLRGFCDQVYAVRMIGEQNELD

SEQ ID NO: 1953 - DNA, 894 bp, Bacillus clausii
  CDS (1)..(894): transl_table=11
gtgaagtattcaattaaagcgcctgcaaagatcaatttgtcccttgatgtgataaggaaacgggaagatggttatcatgaagttgaaatgatcatgacaatggttgacttagctgaccgagtagacttatcactgcgggccgatggaggcatatcgatagacgtttctgaagggtttgtcccgagtgatgagcggaactttgcttaccaagcggcatcgttattaaaaaaacgatacaacgttagagagggcgtacacatttacattacgaaacggataccagtagcagccggcctggctggcggaagcagtgatgcagctgcaacgttaaagggcttaaatgagctttggcagcttggtctttcagtggatgaactagcgacactaggcgctgagattggttctgacgtttctttttgtgtgtacggcggcacggcgctagcgacaggcagaggagagctaattaagccgattgcttccccaccgccattatgggtgattttggcaaagccgcccattggcctatcaacggcagacgtttataatggcctaaaattaagcgaggcaaggcatgcaaaaacagcagagatgatcgcggcacttgagcgccaagacgcagcatcaatttgtgcgttgctccataatacgctcgaagatgtgacgctacgcctttatccagaggtcgcccatattaaagagcaaatgaagcgttttggcgctaacggtgtattaatgagtggaagcggtccgacggttttcggcattgtcgaaaaggagtcgcgggttaaccggatttataacggccttcgtggcttttgtgatgaagtgtacgcagtgcggctgattcgtacaagcggcacttgtccaaatacggatgaaaatggtatgttataa

SEQ ID NO: 1954 - protein, 297 aa, Bacillus clausii
MKYSIKAPAKINLSLDVIRKREDGYHEVEMIMTMVDLADRVDLSLRADGGISIDVSEGFVPSDERNFAYQAASLLKKRYNVREGVHIYITKRIPVAAGLAGGSSDAAATLKGLNELWQLGLSVDELATLGAEIGSDVSFCVYGGTALATGRGELIKPIASPPPLWVILAKPPIGLSTADVYNGLKLSEARHAKTAEMIAALERQDAASICALLHNTLEDVTLRLYPEVAHIKEQMKRFGANGVLMSGSGPTVFGIVEKESRVNRIYNGLRGFCDEVYAVRLIRTSGTCPNTDENGML

SEQ ID NO: 1955 - DNA, 870 bp, Bacillus subtilis
  CDS (1)..(870): transl_table=11
atgcgtattttagaaaaagcgccagctaagatcaatctgtcacttgacgtcacccgaaaacgcccggatggctatcatgaagtcgaaatgatcatgacgacaattgatttagctgatcgaattgaattgacggagcttgcagaggatgaagtgagggtttcctcccacaaccgatttgtgcctgatgaccaaagaaacttagcttatcaggctgccaagctgatcaaggacagatacaacgtgaaaaagggagtttccatcatgattacgaaggtaattccggtggctgccggtcttgccggcggaagcagtgatgcggcggcgacactcagagggctgaacagactgtggaatttaaatctgtccgcggaaacgcttgctgagcttggagcggaaattggctctgacgtttcattttgtgtctatggcggaactgcattagcaacagggcgcggcgagaaaattaaacatatcagcacgcctccgcactgctgggtcattttagcgaagccgacaatcggtgtttcaactgctgaagtgtacagagcgctgaaactggatggtatagagcatcccgatgtacaaggcatgatcgaggcgatagaagaaaagagttttcagaagatgtgcagccggttaggcaatgtgcttgaatctgttacactcgatatgcatcctgaagttgcgatgatcaaaaaccagatgaaacgctttggtgcagatgccgtgttaatgagcgggagcggcccgacagtgtttggactggttcagtatgagtcgaaggtgcagagaatttataacgggttaagaggcttctgcgatcaagtttatgcggtgagaatgatcggcgaacagaacgctcttgattaa

SEQ ID NO: 1956 - protein, 289 aa, Bacillus subtilis
MRILEKAPAKINLSLDVTRKRPDGYHEVEMIMTTIDLADRIELTELAEDEVRVSSHNRFVPDDQRNLAYQAAKLIKDRYNVKKGVSIMITKVIPVAAGLAGGSSDAAATLRGLNRLWNLNLSAETLAELGAEIGSDVSFCVYGGTALATGRGEKIKHISTPPHCWVILAKPTIGVSTAEVYRALKLDGIEHPDVQGMIEAIEEKSFQKMCSRLGNVLESVTLDMHPEVAMIKNQMKRFGADAVLMSGSGPTVFGLVQYESKVQRIYNGLRGFCDQVYAVRMIGEQNALD

SEQ ID NO: 1957 - DNA, 825 bp, Bacteroides thetaiotaomicron
  CDS (1)..(825): transl_table=11
atgatcactttcccaaacgcaaaaataaacctgggactctctattaccgagaagcgtccggacggatatcacaacctcgaaaccgtattctaccccgtcgctctcgaagatgcgctggaaatccggaccagccccgaagcggacaaaaagttctccctgcatcagtacggaatggagatatccggtaatccggaagacaatttagtggtgaaagcatatctgctattagataaagagtttcacctctgtcctatcgagatccatctgtacaaacacattccttccggtgccggactgggaggaggctcatcagacgcggctttcatgctgaaattactcaacgaacactttcagctgaatttatccgaagatcagctggaaatatatgccgcaactttgggagcagactgcgctttctttatcagaaacgccccgacctttgccgaaggagtcggtaacatattctcccccattccactatccttaaaaggatatcagattctgatcatcaaaccggatgtattcgtatcaacgcgggaagctttcgccaatattcaccctcatcatcccgaatactcgatcaaagaagcgatcaaacgcccggtaaatgaatggaaagagatattaatcaatgattttgaagacagcgtattcccccagcatccggtgatcggagaaattaaagccgagctatacaggcaaggggctgtttatgcctctatgagcggttccggttcttccgtatatggattgttcgagccggaagggactttacctgaaactgattggggaactaacgtattctgttttaaaggcaggctgtaa

SEQ ID NO: 1958 - protein, 274 aa, Bacteroides thetaiotaomicron
MITFPNAKINLGLSITEKRPDGYHNLETVFYPVALEDALEIRTSPEADKKFSLHQYGMEISGNPEDNLVVKAYLLLDKEFHLCPIEIHLYKHIPSGAGLGGGSSDAAFMLKLLNEHFQLNLSEDQLEIYAATLGADCAFFIRNAPTFAEGVGNIFSPIPLSLKGYQILIIKPDVFVSTREAFANIHPHHPEYSIKEAIKRPVNEWKEILINDFEDSVFPQHPVIGEIKAELYRQGAVYASMSGSGSSVYGLFEPEGTLPETDWGTNVFCFKGRL

SEQ ID NO: 1959 - DNA, 909 bp, Bartonella henselae
  CDS (1)..(909): transl_table=11
atgatatcgaatggacaagctttttttcaagcgccttcttatttatttacccctattaaattgaacttagctttgcatgttgtagggcaacgcgctgatggttatcatttaatagaaagtttggtttattttagtctcagtggtgattgtttaagctgcacaccttttgggagtaaccgctttgttttaacaggtccttttgcagatgagcttgtttctgatgcagaaaatttggttgttcgtgcacatgattttatgtgtaacacctttcctgaatgtgctaaacctgctttttttcaacttgttaaattattgccggttgcttcaggggttggtggtggttcgggtaatgctgctggtgttttgagtctgttgcgtcagcaatgggctcttgattgctcttgtgaaaaattagcggaaatgagtttagttcttggcgctgatgtaccaatgtgtctttttgcattggagtatcagcagccactttttgttaaaggaattgggcaagatataacacggctaaaagaggcttgttctcttgcaatggttttagttaatcatggtcaacagattgcgacaaaaactgtttttaaggctttagagaagcgcgatcatccacccttgaaaattgattcggcagctctaaagacggttgattcattggttgaagctttacaggaaacgcgtaacgatctttttgttcctgccttaaaaattgcacctcaactgtctgaggttttatgtgcattagatgagagtggagctcttttttctcgcatgtccgggactggtgcaacttgttttggtatttttaaagataagcaagcagcgcaacaggctgctctttttattaaagcgatgtatccagactggtttgttaaacctattgtaactttagcaaagctctag

SEQ ID NO: 1960 - protein, 302 aa, Bartonella henselae
MISNGQAFFQAPSYLFTPIKLNLALHVVGQRADGYHLIESLVYFSLSGDCLSCTPFGSNRFVLTGPFADELVSDAENLVVRAHDFMCNTFPECAKPAFFQLVKLLPVASGVGGGSGNAAGVLSLLRQQWALDCSCEKLAEMSLVLGADVPMCLFALEYQQPLFVKGIGQDITRLKEACSLAMVLVNHGQQIATKTVFKALEKRDHPPLKIDSAALKTVDSLVEALQETRNDLFVPALKIAPQLSEVLCALDESGALFSRMSGTGATCFGIFKDKQAAQQAALFIKAMYPDWFVKPIVTLAKL

SEQ ID NO: 1961 - DNA, 909 bp, Bartonella quintana
  CDS (1)..(909): transl_table=11
atgatgtcggatgtaaaagtttcgttcaaagggcattcttacgtatttacacctattaagttgaacttaaccttgcatgttgtagggcagcgcacggatggttatcatttaatagaaagtttggtttattttagtttcagcggtgattgtttgagctatatgccttgtaagagtaaccactttattttaacagggccttttgccgatgagcttgtttctgatacaggtaatttggttgttcgtgcacatgactttatgtgtaaggcctttcctaagtgtgccaaacctgctttttttcgacttgttaaactattgccggttgcttcggggattggtggtggttcgggcaatgctgctggtgttttgagtctattgcgtcagcagtggggtcttgattgctcttgtgaaaaattggcggaaatgagcttagtgcttggcgctgatgtgccgatgtgtctttttgcattggagtatcggcagccactttttgttagaggaattgggcaagatataacacagttaaaagaggcttgttctcttgcaatggttttggttaatcatggacaacagattgcgacgaaagctgtttttaaggctttggagaagcgcgatcatccacccttgaagattgatctagaatctctcaagacggttgattcattggttgaagctttacaagaaacacgtaacgatctttttattcccgcattaaaaattgcacctcaactgtctgaagttttatatgccttagatgagagtggagctctcttttctcgtatgtccgggactggtgcaacttgttttggtatttttaaagataaagaagcagcgcagcaggctgcactttttatcaaattgatgcatccagattggtttgttaaacctatcataactttaggaatgctttag

SEQ ID NO: 1962 - protein, 302 aa, Bartonella quintana
MMSDVKVSFKGHSYVFTPIKLNLTLHVVGQRTDGYHLIESLVYFSFSGDCLSYMPCKSNHFILTGPFADELVSDTGNLVVRAHDFMCKAFPKCAKPAFFRLVKLLPVASGIGGGSGNAAGVLSLLRQQWGLDCSCEKLAEMSLVLGADVPMCLFALEYRQPLFVRGIGQDITQLKEACSLAMVLVNHGQQIATKAVFKALEKRDHPPLKIDLESLKTVDSLVEALQETRNDLFIPALKIAPQLSEVLYALDESGALFSRMSGTGATCFGIFKDKEAAQQAALFIKLMHPDWFVKPIITLGML

SEQ ID NO: 1963 - DNA, 951 bp, Bifidobacterium longum
  CDS (1)..(951): transl_table=11
atgagtccggtaatctcacatccacgctcagccgctgcccgacatcagtccgatgagctctcccccatcaccattacggtggattgcccggcgaaaaccaatctcaccttggaagtgggacctgctcacgacgaatggggcggacgccacgaactggacaccatctactgcgcaatcggcgtatacgacaccgtcaccgcaaccgccaagcaacccggagcaggattctctctggagctcgaaggcgcttatttgggcgacttggcctcctcacgcagcgacatgcgccgcaaccatgcggtactggccctcttcgccatggcccaggcggccgagcgcgagccggatgtggcgttgaccatcaccaagcgcattcccgtgggtgccggactaggcggcggttcagccgacgccgcggcgaccatgctggcggtcaatcgtctctgggagctgaactggcccatagagcgcctgcgcaccattgctgccacgttgggcgcggacatgccgttctgcctgaccggtggccttgcatacggcaccggtttcggcgaacgcatcacggatatcgcccccggcagccgcgatgagctggcgctgatagaacagggattcagcggcgaagtattggtcggcgcataccagtcgcaactcagcactcctgaggtctaccacacctttgacatcgtgggagccgcagaaggcgaccgcaatcatctgcaggctgcggcaatcagcctgcatccccgcagcgggcaggccatcgacgccgccacgcaggcgggtgccagccatgcattcgtctccggatccggcccctcagtggtcgctttcgccgccgacgaggcagcggcacaacgcattatcgaggtgtggcgcgatacagctgtggtcgatcgtattattcgagccaaatctcccgaacaccccaatatcagcgtcagacagtga

SEQ ID NO: 1964 - protein, 316 aa, Bifidobacterium longum
MSPVISHPRSAAARHQSDELSPITITVDCPAKTNLTLEVGPAHDEWGGRHELDTIYCAIGVYDTVTATAKQPGAGFSLELEGAYLGDLASSRSDMRRNHAVLALFAMAQAAEREPDVALTITKRIPVGAGLGGGSADAAATMLAVNRLWELNWPIERLRTIAATLGADMPFCLTGGLAYGTGFGERITDIAPGSRDELALIEQGFSGEVLVGAYQSQLSTPEVYHTFDIVGAAEGDRNHLQAAAISLHPRSGQAIDAATQAGASHAFVSGSGPSVVAFAADEAAAQRIIEVWRDTAVVDRIIRAKSPEHPNISVRQ

SEQ ID NO: 1965 - DNA, 900 bp, Bordetella parapertussis
  CDS (1)..(900): transl_table=11
gtgacgctctacgacgtacccgcacccgccaagttgaacctgtttctgcacgtggtgggccgccgcgccgacggctaccatctgctgcagaccgcgttccgcttcatcgacctggccgacaccctgcatttcgaagcgcgcgccgacggtgccatcggccgcgcgtacgaactgcccggcgtggccgagtccgacgacctggtcgtgcgcgccgcgcgcagcctgcagcgcgccaccggcacccgccagggcgcgcagatcggcctgcacaagcgcatcccgcagggcggcggcctgggcggcggatcgagcgacgccgccaccaccctgatcgccctgaaccggctctggggcaccggcctgtcgcgcagccagctgatgcaactggcgctgccgctgggcgccgacgtcccggtcttcgtcttcggccagtcggccttcgcgcaaggcgtgggcgaagacctgacggccgtggcgctgccgccggcggcctatctggtggtgcagcccgacgccggcgtgcccactgccgccattttttccgaccccgatttgacaagggattgtgcttcggtcacaatagcggactttcttgctttgctaacttcctgctttggcaggaatgatctggagccggtggtgttgcggcggtatcctgaggtttcaggggctgttcgctggcttttcgagcacggtttgcgtgttcggatgtcgggatctggggcgtgtcttttcgccgaatttcccaccctgccggaagccgttttggcacaagaggaaataaccgctacaatgcgcgtcgctggaaaaacaaccagccacacgcatcccgggttccggttggtacaggctagtactggattgactgaacatccgttgcggaactggattgcaagctag

SEQ ID NO: 1966 - protein, 299 aa, Bordetella parapertussis
MTLYDVPAPAKLNLFLHVVGRRADGYHLLQTAFRFIDLADTLHFEARADGAIGRAYELPGVAESDDLVVRAARSLQRATGTRQGAQIGLHKRIPQGGGLGGGSSDAATTLIALNRLWGTGLSRSQLMQLALPLGADVPVFVFGQSAFAQGVGEDLTAVALPPAAYLVVQPDAGVPTAAIFSDPDLTRDCASVTIADFLALLTSCFGRNDLEPVVLRRYPEVSGAVRWLFEHGLRVRMSGSGACLFAEFPTLPEAVLAQEEITATMRVAGKTTSHTHPGFRLVQASTGLTEHPLRNWIAS

SEQ ID NO: 1967 - DNA, 900 bp, Bordetella pertussis
  CDS (1)..(900): transl_table=11
gtgacgctctacgacgtacccgcacccgccaagttgaacctgtttctgcacgtggtgggccgccgcgccgacggctaccatctgctgcagaccgcgttccgcttcatcgacctggccgacaccctgcatttcgaagcgcgcgccgacggtgccatcggccgcgcgtacgaactgcctggcgtggccgagtccgacgacctggtcatgcgcgccgcgcgcagcctgcagcgcgccaccggcacccgccagggcgcgcagatcggcctgcacaagcgcatcccgcagggcggcggcctgggcggcggatcgagcgacgccgccaccaccctgatcgccctgaaccggctctggggcaccggcctgtcgcgcagccagttgatgcaactggcgctgccgctgggcgccgatgttccggtcttcgtcttcggccagtcggccttcgcgcagggcgtgggcgaagacctgacggccgtggcgctgtcgccggcggcctatctggtggtgcagcccgacgccggcgtgcccactgccgtcattttttccgaccccgatttgacaagggattgcgcttcggtcacaatagcggactttcttgctttgccaacttcctgctttggcaggaatgatctggagccggtggtgttgcggcggtatcctgaggtttcaggggctgttcgctggcttttcgagcacggtttgcgtgttcggatgtcgggatctggggcgtgtcttttcgccgaatttcccaccctgccggaagccgttttggcacaagaggaaataaccgctacaatgcgcgtcgctggaaaaacaaccagccatacgcatcccgggttccggttggtacaggctagtactggattgactgagcatccgttgcggaactggattgcaagctag

SEQ ID NO: 1968 - protein, 299 aa, Bordetella pertussis
MTLYDVPAPAKLNLFLHVVGRRADGYHLLQTAFRFIDLADTLHFEARADGAIGRAYELPGVAESDDLVMRAARSLQRATGTRQGAQIGLHKRIPQGGGLGGGSSDAATTLIALNRLWGTGLSRSQLMQLALPLGADVPVFVFGQSAFAQGVGEDLTAVALSPAAYLVVQPDAGVPTAVIFSDPDLTRDCASVTIADFLALPTSCFGRNDLEPVVLRRYPEVSGAVRWLFEHGLRVRMSGSGACLFAEFPTLPEAVLAQEEITATMRVAGKTTSHTHPGFRLVQASTGLTEHPLRNWIAS

SEQ ID NO: 1969 - DNA, 894 bp, Bradyrhizobium japonicum
  CDS (1)..(894): transl_table=11
gtgtcgccgatgccggcgttgattgaagaggggcgcgcgaaggtcaatctgagccttcgcgtggtcggccgtcgtgccgacggctatcatgatctcgaaagcgtggtggcgtttgccgattgcgccgaccggctcacgttggagccgggcggcgagctgaagctcgccaccaccgggccgctggccgcagcatgcggcgatactgccgacaatctcgtgttcaaggccgcaaagcttctggccgaggccgtgccgaacctgaagctgggcgcctttgcgctcgacaaggtgctgcccgtcgcggccggcatcggcggtggctcggcggatgcagcggcagcgctgcggctgctggcgcgtctcaacaacctgtcgctcgatgatccccgcctccagaaggtcgcgctcgcgaccggcgccgacgtgccggtgtgcctgtattcgcgcgcctgcgacatgaccggcgtcggcgagcagctgctgccgctcgcgctgccgagcatgccctgcgtgatggtcaatccgcgcgtgccggtcgcgaccaaggacgtgttccaggcgctgggcctgcgcaacggcgagctgctggtcggcgccacctccgtcatcggagccccggcctggccggaggagggcgcctcgattgccgactgggtcgaggttctcgaaaccgtcgccaacgacctcgaagcccccgcgatgcgcatcgaacctgtcatcggcgaggtgctggaggcgctacgcgactccgccggcgtcaagctcgcccgcatgtccggctcgggcgcgacctgctttgcgatctatggcgcgccggccgaggcacatgctgccgcggaaaagatccggcgcgatcaccccggctggtgggtgcatgcggggacgttgagctaa

SEQ ID NO: 1970 - protein, 297 aa, Bradyrhizobium japonicum
MSPMPALIEEGRAKVNLSLRVVGRRADGYHDLESVVAFADCADRLTLEPGGELKLATTGPLAAACGDTADNLVFKAAKLLAEAVPNLKLGAFALDKVLPVAAGIGGGSADAAAALRLLARLNNLSLDDPRLQKVALATGADVPVCLYSRACDMTGVGEQLLPLALPSMPCVMVNPRVPVATKDVFQALGLRNGELLVGATSVIGAPAWPEEGASIADWVEVLETVANDLEAPAMRIEPVIGEVLEALRDSAGVKLARMSGSGATCFAIYGAPAEAHAAAEKIRRDHPGWWVHAGTLS

SEQ ID NO: 1971 - DNA, 900 bp, Brucella melitensis
  CDS (1)..(900): transl_table=11
atgacagcattccagaacgccggaccatcgataacgcgccttgcgcctgcaaagatcaatctggcgctgcatgtgaccgggcgacgtgacgacggctatcatcttctcgacatgctggtggtctttgccgatcagggcgatcgcatccacatcgaaaaagccggcagcgacagttttacggtcagcggcccttttgcaagcggcatccccgccgggcggggcaatctggtgctgaaagcgcgcgatgcgctgcgccagcatggcgggccagacctttcacctgttgccattcatctggaaaagaacctgcctattgcttccggcattggcggcggatcgagcgatgcggcagcaaccctgcttgcgctcaacacgctctggcaactcgatctcgattttgaaatgctggccgctatcggcctttccctcggtgcagaccttcccatgtgcctgcatggcgcagcccatggcacaccgctgatcgcgcgcggcattggtgaagagctgaacgatgtttccggaattgcggcccttcccatgctgctcgtcaatgacggtaccgcgcttgccacgcccgacgtgttccgcgcgctcacccgccgcgagaacgcccccctgccgcctccggcctgtgaagggacagacgccctttgcgcctatctgcgtgaaacacgcaatgatcttctgcccgcagccatcagccttgcaccgcagatcgaacccaaactcgccctgcttcgcgccaagggtgcactttatgcgcgaatgtccggctccggcgcaacatgctttgccatttttagcgataaatcagccctgacacgcgcggcaaaagagattgcggatgaaaatccgggctggtttgcagttccttcgcacagctttccttccagagcctga

SEQ ID NO: 1972 - protein, 299 aa, Brucella melitensis
MTAFQNAGPSITRLAPAKINLALHVTGRRDDGYHLLDMLVVFADQGDRIHIEKAGSDSFTVSGPFASGIPAGRGNLVLKARDALRQHGGPDLSPVAIHLEKNLPIASGIGGGSSDAAATLLALNTLWQLDLDFEMLAAIGLSLGADLPMCLHGAAHGTPLIARGIGEELNDVSGIAALPMLLVNDGTALATPDVFRALTRRENAPLPPPACEGTDALCAYLRETRNDLLPAAISLAPQIEPKLALLRAKGALYARMSGSGATCFAIFSDKSALTRAAKEIADENPGWFAVPSHSFPSRA

SEQ ID NO: 1973 - DNA, 879 bp, Buchnera aphidicola subsp
  CDS (1)..(879): transl_table=11
atgataaatacatggccatctcctgcaaaaattaatttatttctttatgtcactggtattcgttcagatggatatcattatatacaaagcttatttcaatttcttaactatggtgatacgttgacgattattccaaacacaaaaggtactattgagctatttactgaaagtaattcacttgtaaacataaaaaatagcatcattactgcagctgaattattaaaagaaaaagcattacattctttgggaaaaaaaacttctcattttggagcaaaaatctttttaaataaaaaaatacctattggaagcggattaggaggaggttcatctaatgctgcaactacattagtagtattaaataatttatggaaaacaaaatttactttacaagaattagctgaattaagtttaaaaataggatcagatatacctgcttttatcatgggaaaaacaacaattgttgaaggaataggagaaattttatatcctattcatagaaaagaaaaatggtatttaattgtttatcctaatatttcaatatcaacaaaaaatatattttctatttactctattaaaaaaaatacaataaaaaaaccgattgattttttattaagatcacgttttcataacgattttgaaaacgtaattaaaaaaaaatttaaaaaaataaaacaattaatttctatgttatctctttatgccccttcacgtattactggaacaggatcatgtatttttgctgaatttaatgacaaaaaatctgcacaaaaaatacattctctgcttcctcacaacgttcaaggaactattgtgaaaagtgtcaacgtttcaccattacatcatgctttttataaaaaaaacataaatctttttaactaa

SEQ ID NO: 1974 - protein, 292 aa, Buchnera aphidicola subsp
MINTWPSPAKINLFLYVTGIRSDGYHYIQSLFQFLNYGDTLTIIPNTKGTIELFTESNSLVNIKNSIITAAELLKEKALHSLGKKTSHFGAKIFLNKKIPIGSGLGGGSSNAATTLVVLNNLWKTKFTLQELAELSLKIGSDIPAFIMGKTTIVEGIGEILYPIHRKEKWYLIVYPNISISTKNIFSIYSIKKNTIKKPIDFLLRSRFHNDFENVIKKKFKKIKQLISMLSLYAPSRITGTGSCIFAEFNDKKSAQKIHSLLPHNVQGTIVKSVNVSPLHHAFYKKNINLFN

SEQ ID NO: 1975 - DNA, 891 bp, Burkholderia mallei
  CDS (1)..(891): transl_table=11
ttgcctagcatgaccgatacgacccgctcgctgcgcgactgcctcgccccggcgaaactgaacctgttcctgcacatcacgggccgccgcccggacggctatcacgcgctgcaaagcgtgttccagctgctcgactggggcgaccggctgcacttcacgctgcgcgacgacggcaaggtctcgcgcgtgacggacgtgccgggcgtgcccgaggaatccgacctcgtcgtgcgcgccgcgtcgctgctgaaggcgcacgccggcgcgacgctgggcgtcgacatcgagatcgacaagcggctgccgatgggcgcgggcctgggcggcggcagctcggacgcggcgacgacgttgctcgcgctcaaccggctatggcggctcgacctgccgcgcaccacgctgcaatcgctcgcggtgaagctcggcgccgacgtgccgttcttcgtcttcggaaaaaatgcgttcgcggagggtatcggagaagcgctgcaagctgtagaattgccggctcgctggttcctggttgtgacaccgcgggttcacgtgccgacggcagcgattttttccgaaaaatcgttgacaagagattcgaaacccatcacaattacggactttcttgcacagcgcggcatcgacgcaggatggccagacagcttcggccggaatgacatgcagccggttgtgacaagcaagtacgcggaagttgcaaaggtggtcgaatggttttataatctgacccccgcgcggatgaccggctctggagcgagcgtgtttgcagcgttcaagagcaaggctgatgcagaagcggcgcaagccaaactgcctgccggctggaacagcgcagttgccgagagcatgagtgagcatccactcttcgctttcgcgtcataa

SEQ ID NO: 1976 - protein, 296 aa, Burkholderia mallei
MPSMTDTTRSLRDCLAPAKLNLFLHITGRRPDGYHALQSVFQLLDWGDRLHFTLRDDGKVSRVTDVPGVPEESDLVVRAASLLKAHAGATLGVDIEIDKRLPMGAGLGGGSSDAATTLLALNRLWRLDLPRTTLQSLAVKLGADVPFFVFGKNAFAEGIGEALQAVELPARWFLVVTPRVHVPTAAIFSEKSLTRDSKPITITDFLAQRGIDAGWPDSFGRNDMQPVVTSKYAEVAKVVEWFYNLTPARMTGSGASVFAAFKSKADAEAAQAKLPAGWNSAVAESMSEHPLFAFAS

SEQ ID NO: 1977 - DNA, 882 bp, Burkholderia pseudomallei
  CDS (1)..(882): transl_table=11
atgaccgatacgacccgctcgctgcgcgactgcctcgccccggcgaaactgaacctgttcctgcacatcacgggccgccgcccggacggctatcacgcgctgcaaagcgtgttccagctgctcgactggggcgaccggctgcacttcacgctgcgcgacgacggcaaggtctcgcgcgtgacggacgtgccgggcgtgcccgaggaatccgacctcgtcgtgcgcgccgcgtcgctgctgaaggcgcacgccggcgcgacgctgggcgtcgacatcgagatcgacaagcggctgccgatgggcgcgggcctgggcggcggcagctcggacgcggcgacgacgttgctcgcgctcaaccggctatggcggctcgacctgccgcgcaccacgctgcaatcgctcgcggtgaagctcggcgccgacgtgccgttcttcgtcttcggaaaaaatgcgttcgcggagggtatcggagaagcgctacaagctgtagaattgccggctcgctggttcctggttgtgacaccgcgggttcacgtgccgacggcagcgattttttccgaaaaatcgttgacaagagattcgaaacccatcacaattacggactttcttgcacagcgcggcatcgacgcaggatggccagacagcttcggccggaatgacatgcagccggttgtgacaagcaagtacgcggaagttgcaaaggtggtcgaatggttttataatctgacccccgcgcggatgaccggctctggagcgagcgtgtttgcagcgttcaagagcaaggctgatgcagaagcggcgcaagccaaactgcctgccggctggaacagcgcagttgccgagagcatgagtgagcatccactcttcgctttcgcgtcataa

SEQ ID NO: 1978 - protein, 293 aa, Burkholderia pseudomallei
MTDTTRSLRDCLAPAKLNLFLHITGRRPDGYHALQSVFQLLDWGDRLHFTLRDDGKVSRVTDVPGVPEESDLVVRAASLLKAHAGATLGVDIEIDKRLPMGAGLGGGSSDAATTLLALNRLWRLDLPRTTLQSLAVKLGADVPFFVFGKNAFAEGIGEALQAVELPARWFLVVTPRVHVPTAAIFSEKSLTRDSKPITITDFLAQRGIDAGWPDSFGRNDMQPVVTSKYAEVAKVVEWFYNLTPARMTGSGASVFAAFKSKADAEAAQAKLPAGWNSAVAESMSEHPLFAFAS

SEQ ID NO: 1979 - DNA, 882 bp, Burkholderia sp
  CDS (1)..(882): transl_table=11
atgaccgattcgacccgctcgctgcgcaactgccttgcgcccgcgaaactcaacctgttcctgcacatcaccggccgccgtccgaacggctatcacgacctgcagagcgtgttccagttgctgaactggggcgacacgctgcacttcacgctgcgcgacgacggtcgcgttgcacgcgtcaccgacgtgcccggcgtgcccgaggaaagcgatctcgtcgtgcgcgcggccaacctgttgaaagcgcatacgggcaccgcgcacggtgtcgacatcgagatcgacaagtgcctgccgatgggagccggcctcggcggcggcagctccgacgcggccacgacgctgctcgcgctgaaccgcctgtggcaactcgacctgccgcgcgccgaactccagtcgctcgcggtaaaactcggtgcagacgtcccgttttttatttttggaaaaaatgcgttcgcagagggtatcggagaagaattagctgaggtacaattgccgactcgctggttcttggttgtaacgccccgcgttcacgtcccaaccgctgaaatattttcagatgagttgttgacaagagattcgaagcgcgtcacaattacggactttcttgcacagcaaaacagcgacgcgggatggccagatagtttcggtcggaacgatatgcagcaagttgtgacaagtaagtacgcggaagttgcgcaggtggtcaaatggttgtatgatgtgacccccgcgaggatgaccggctccggagcaagcgtgtttgcagcgtttcgcagcaagcatgaggcagaagcggcgcaagccaagctgcccaccggttggaacggtgcagttgccgagagcctgaacgagcatccgctcttcgctttcgcgtcatga

SEQ ID NO: 1980 - protein, 293 aa, Burkholderia sp
MTDSTRSLRNCLAPAKLNLFLHITGRRPNGYHDLQSVFQLLNWGDTLHFTLRDDGRVARVTDVPGVPEESDLVVRAANLLKAHTGTAHGVDIEIDKCLPMGAGLGGGSSDAATTLLALNRLWQLDLPRAELQSLAVKLGADVPFFIFGKNAFAEGIGEELAEVQLPTRWFLVVTPRVHVPTAEIFSDELLTRDSKRVTITDFLAQQNSDAGWPDSFGRNDMQQVVTSKYAEVAQVVKWLYDVTPARMTGSGASVFAAFRSKHEAEAAQAKLPTGWNGAVAESLNEHPLFAFAS

SEQ ID NO: 1981 - DNA, 882 bp, Burkholderia thailandensis
  CDS (1)..(882): transl_table=11
atgaccgatacgacccgctcgctgcgcgactgcctcgccccggcgaaactgaacctgttcctgcacatcacgggccgtcgtccggacggctatcacgagctgcaaagcgtgttccagctgctcgactggggcgaccggctgcacttcacgctgcgcgacgacggcaaggtgtcgcgcaagaccgacgtgccgggcgtacccgaggaaaccgacctcatcgtgcgcgcggcgtcgctgctgaaagcgcacacgggcacggcggcgggcgtcgacatcgagatcgacaagcgactgccgatgggcgcgggcctcggcggaggcagctcggatgcggcgacgacgttgctcgcgctcaaccgcctctggaagctcgacttgccgcgcgccacgctgcaatcgctcgcggtgaagctcggcgccgacgtgccgttcttcgtcttcggaaaaaatgcgttcgcagagggtatcggagaagcgctgcaagctgtagaattgccgactcgctggtttctggttgtgacaccgcgggttcacgttccgaccgcagcgattttttccgaaaaatcgttgacaagagattcgaaacccatcacaattacggactttcttgcacagcaagactgcaacacgggatggcctgacagtttcggtcggaatgacatgcagccggttgtgacaagcaagtacgcggaagttgcaaaggtggtcggatggttttataatctgacccccgcgcggatgaccggctccggagctagcgtgtttgcagcgttcaagagcaaggcggaggcaggagcggcgcaagcccaactgccggccggctgggacagcgcagttgccgagagcttgggtgagcatccactcttcgctttcgcgtcataa

SEQ ID NO: 1982 - protein, 293 aa, Burkholderia thailandensis
MTDTTRSLRDCLAPAKLNLFLHITGRRPDGYHELQSVFQLLDWGDRLHFTLRDDGKVSRKTDVPGVPEETDLIVRAASLLKAHTGTAAGVDIEIDKRLPMGAGLGGGSSDAATTLLALNRLWKLDLPRATLQSLAVKLGADVPFFVFGKNAFAEGIGEALQAVELPTRWFLVVTPRVHVPTAAIFSEKSLTRDSKPITITDFLAQQDCNTGWPDSFGRNDMQPVVTSKYAEVAKVVGWFYNLTPARMTGSGASVFAAFKSKAEAGAAQAQLPAGWDSAVAESLGEHPLFAFAS

SEQ ID NO: 1983 - DNA, 768 bp, Campylobacter jejuni
  CDS (1)..(768): transl_table=11
atgaaagcttacgctaaagcaaatatttttttaaaacttaccggttttgactcaagaaaatatcatcttttagaatcacgatttatacttttaaaagatgtttttgatgagcttgagcttgttgacaaagaatcagattctaaaaaagaatttgaaatcattagtaattttaaatgcgaaaataatattattcaaaaggcttatttgctactttctagaagatataataacgaattaaaagaattatttagcaaaaaaagtctaaaactcacaaaaaatatcccagtatgtgctgggcttggtggtggaagtagcgattgtgcgagttttttactactaataaatgaaaccctaaatttaaaattaaacctacaagaacttataaatttaagcatacaactaggaagtgatattgccttttttttaagtggctttcactctgctaatgtaagtagctgtggcgaaattatagaagaatttgaagatgacatacctaatttaaaatggacttttccacaaatatcttgccaaactaaagctgtttatgatgaatttgatagaggaatatttgactttcaaaaaaacaataatcaagcgcaaatctacaaaaaactcagcacaaaagagttgttacaaaactttaaaaacaaagaattaaatgatttatttactccttgtgcaactttatatcctaaaatgaagtcttacttgcaagaagatttttttctaagcggtagcggtagtagtgtttttaaggttgatcgatga

SEQ ID NO: 1984 - protein, 255 aa, Campylobacter jejuni
MKAYAKANIFLKLTGFDSRKYHLLESRFILLKDVFDELELVDKESDSKKEFEIISNFKCENNIIQKAYLLLSRRYNNELKELFSKKSLKLTKNIPVCAGLGGGSSDCASFLLLINETLNLKLNLQELINLSIQLGSDIAFFLSGFHSANVSSCGEIIEEFEDDIPNLKWTFPQISCQTKAVYDEFDRGIFDFQKNNNQAQIYKKLSTKELLQNFKNKELNDLFTPCATLYPKMKSYLQEDFFLSGSGSSVFKVDR

SEQ ID NO: 1985 - DNA, 867 bp, Carboxydothermus hydrogenoformans
  CDS (1)..(867): transl_table=11
ttgttaatttttgcgccggctaaaataaatctcactttagatatattaggaaaacgtcccgatggttaccacgaactctggtcggtaatgcaggcaattactctgggagatttagtggaaattgaaccggcagagggaataaacttaagggttgtaggggcagatttacctgtggattctaccaatattgcgtttaaagctgttcaggctttaagggccgccactgggaaagccataggagccagcattactatccgtaaaaaaatccccttagaagcgggactggccggtggctcggcggatggagccgcagttctttatggtttaaataaactttataatttaaatttaagtcaggaagagcttttagaaattggggcaaaaataagcgccgatattcccttttgccttaccggtggcaccgccctggtgcaggggataggggaaaaagtaaaaaaacttccgcccttaaaaaaaggttattttgttatctataaacccccttttgggatctcgacaaaagaagcttatttaaggcttgcgggtaaggatttaacaaaggagcatcctgatcgcgaaaaaatcctgaaagctttaggcaaagaaaatttagaggatttgggaaagtttttaaagaatcttttagaaataagtgctttggaaataaatccggaaatatataaatataaaaacgaacttttaaatttaaaacctttaggggtgctaatgtcgggtagcggttctgctctttttgctttaacggaaaatttaaaaaaagcgaaggaaatttattatcaattgacattgcctggacaaaaatttattgtccgcccgtatgcggccggtcctacttgcttaaagctttaa

SEQ ID NO: 1986 - protein, 288 aa, Carboxydothermus hydrogenoformans
MLIFAPAKINLTLDILGKRPDGYHELWSVMQAITLGDLVEIEPAEGINLRVVGADLPVDSTNIAFKAVQALRAATGKAIGASITIRKKIPLEAGLAGGSADGAAVLYGLNKLYNLNLSQEELLEIGAKISADIPFCLTGGTALVQGIGEKVKKLPPLKKGYFVIYKPPFGISTKEAYLRLAGKDLTKEHPDREKILKALGKENLEDLGKFLKNLLEISALEINPEIYKYKNELLNLKPLGVLMSGSGSALFALTENLKKAKEIYYQLTLPGQKFIVRPYAAGPTCLKL

SEQ ID NO: 1987 - DNA, 888 bp, Caulobacter crescentus
  CDS (1)..(888): transl_table=11
ttgagtcacgagatcatgcggctgtcagcgttcgccccggccaaggtcaatctgttcctgcatgtcggcgggccggacggggagggctatcatccgatctccagcctgatggtgttcgccgatgtcggcgaccgggtgaacctccagcccgccgacgcgccggcgttcgagacgtccgggccgttcggggatcagattcccgccggcggcgacaatctggtggtccgcgcaggccaggctttccacaggcggctcggcggtccggttccgccttatcggctgatcctggagaagcacttgccgatcgctgcgggcctgggcgggggctccagcgacgcgggtgcggcgctcaagctgttgcgtgacgccctggccccggcgctttccgatgacgatctggaggcgctggctgcgagccttggcgcggacggcgcggcctgtctgcgcgcgcgcgcccttatcgcagaagggcgaggcgagcggctgtcgccggcgccgcggttgcccgagttgaacgcagtgctggtcaatcccggcgcgccgtcgccgaccggcgcggtctatcgcgcctatgacgcgggcgtgcacccagacggcgccgccatgccccccatgcccgaccatctggagagcgctgaggaggccgccgcctggttggcctttgcgacacgcaacgacctggaggcgccggccgtgaggcttgagccgcacatcggcgaggtgctggacgtgctgcggggcgagccggaaagtctgctggtccgcatgtcgggttcgggtgcgacctgtttcgcgctctgcgccagcgatatcgaggccgaaggtctggccgagcgcctggagacgatgcgtccggactggtgggtgcggcgctgccgcctgagctga

SEQ ID NO: 1988 - protein, 295 aa, Caulobacter crescentus
MSHEIMRLSAFAPAKVNLFLHVGGPDGEGYHPISSLMVFADVGDRVNLQPADAPAFETSGPFGDQIPAGGDNLVVRAGQAFHRRLGGPVPPYRLILEKHLPIAAGLGGGSSDAGAALKLLRDALAPALSDDDLEALAASLGADGAACLRARALIAEGRGERLSPAPRLPELNAVLVNPGAPSPTGAVYRAYDAGVHPDGAAMPPMPDHLESAEEAAAWLAFATRNDLEAPAVRLEPHIGEVLDVLRGEPESLLVRMSGSGATCFALCASDIEAEGLAERLETMRPDWWVRRCRLS

SEQ ID NO: 1989 - DNA, 876 bp, Chlamydophila abortus
  CDS (1)..(876): transl_table=11
atggatcttttctctccagcaaaactcaatctctttttaaagcttcacggcaaaacatctcatggctttcacgagatgactaccctatatcaagtcatcgattttggagatagactgagtttagagagtagtagtgaagattctcttatttgtaatctaccagaattaaatacgcctcaaaatctcatatggaaaagtatccaggttttcagagactatacccaaatctacagtcctgtggcttggcggttgtataagtgtattcctataggatctggtataggaggcggcagtagcaatgctgctacagcgctctacgctttaaatcaacatttccaaacgcaactatctaatgatgttctgcaagaattagggaaaaagatcggaatggatgtccctctgttcttctcattgggatcggctttaggcataggatgcggcgaggaaatcctttcctacgataatgatcatcgtgatgaaaggtacgtcctatatttctcagatcaacctgtcttgactaaagacgctttttcgtacgtacgccccgaagatttctctaaaagagaagaatgcttgtctttatacgcgagaaacaatgatttagaacaatccgtgtttcgttttcgcaaggaccttgaagagaaaaaacacatgctaaaaaggatatggagtccttttaatgctcacgtgcgtatgtctggagccggggcaacgctattcgtaagttattccagggaaatcgaaacagatccctccacagctaaagctcttcatgcaacgatccataatagccaaggtttactcgtaaatagcctacgcaaatacaatggatggttcgagcatggtgataatctacttgcaacaacaagacaataa

SEQ ID NO: 1990 - protein, 291 aa, Chlamydophila abortus
MDLFSPAKLNLFLKLHGKTSHGFHEMTTLYQVIDFGDRLSLESSSEDSLICNLPELNTPQNLIWKSIQVFRDYTQIYSPVAWRLYKCIPIGSGIGGGSSNAATALYALNQHFQTQLSNDVLQELGKKIGMDVPLFFSLGSALGIGCGEEILSYDNDHRDERYVLYFSDQPVLTKDAFSYVRPEDFSKREECLSLYARNNDLEQSVFRFRKDLEEKKHMLKRIWSPFNAHVRMSGAGATLFVSYSREIETDPSTAKALHATIHNSQGLLVNSLRKYNGWFEHGDNLLATTRQ

SEQ ID NO: 1991 - DNA, 876 bp, Chlamydophila caviae
  CDS (1)..(876): transl_table=11
atggattttttttctccggcaaagctcaatctttttttaaagcttcatggtaagacgtcacgtggtttccatgagatgactacccaatatcaggttattgatttcggagatactctgtgcttagagaggagtaatgaagacactcttatttgtaatctcccagaattaagtactccacagaatctcgtatggaaaagtcttcagatttttagagactacacccaggtaaatgatcctgtagcctggagattgcataaacgcattcctataggagctggtgtaggcggaggtagtagcaatgctgcaacagcactctatgctttaaatgagcatttccaaacacaattatccaatgatgagcttcaagaattagggaaaaagatcggtatggatgtacctttattcttttcttcaggttctgccataggtgtaggctgtggtgaagagattcttccttatgaagattacaattgtgaagagagatatgtcctgtatttttctgatcaaggagtactaactaaagatgctttttcttatgtgcatcctgaagacttctctcatcggaaagatgccatagccttgtacgagagagataatgatttagagaagtccgtatttcgtttccgcaaggaccttgaagagaaaaaacaaatgctaaaaaggatgtggagtccttttcatgctcatgtcgggatgtctggagctggggcaactttatttgtaagctatcccagagaaatggaaacagatccttcggtagcaaaagctattcatactactatccaagatagtcacggtttgcttgtaaatagcctacgcaagcaaagcagtggatggtttctgaattccgataatttatttacagcagcaagatag

SEQ ID NO: 1992 - protein, 291 aa, Chlamydophila caviae
MDFFSPAKLNLFLKLHGKTSRGFHEMTTQYQVIDFGDTLCLERSNEDTLICNLPELSTPQNLVWKSLQIFRDYTQVNDPVAWRLHKRIPIGAGVGGGSSNAATALYALNEHFQTQLSNDELQELGKKIGMDVPLFFSSGSAIGVGCGEEILPYEDYNCEERYVLYFSDQGVLTKDAFSYVHPEDFSHRKDAIALYERDNDLEKSVFRFRKDLEEKKQMLKRMWSPFHAHVGMSGAGATLFVSYPREMETDPSVAKAIHTTIQDSHGLLVNSLRKQSSGWFLNSDNLFTAAR

SEQ ID NO: 1993 - DNA, 852 bp, Chlamydia muridarum
  CDS (1)..(852): transl_table=11
atgcattttttttctcctgccaagcttaatattttcttgcagttacttggcaaacgggaagatggttttcatgaaatcgttacgcgctatcaagccgtatcttttggggatcaactctctttgtcagtaagctctcgtgattcttttcaaatcatcaatgattgtcagcttgagatttctaataattctatttggaaaagcacagccctctttcgtcaatatactggaattactgatcccgtaagttggcgcgtagtgaagcatatccctatcgggtcagggcttgctggaggtagcagcaatgctgcaactgcgttgtttgccttgaatcagatgtttcaaacgggattatcggatgaagagctgcgctctttagcagaaaaagtcggtatggatactcctttcttcttttcttcaggatctgctttgggattaggacgaggagagaaagttgtaaccttaaatgaattagttgtagatagatatattttatatttttctaataagggagttttaactagcgaggcttttgctgtagtgaaaccttcagattgttctctcagtaaggatctggagtatgctcgcaatgacttagagaacccagtttttcggttgcgcttagatttgaaagagaaaaaacgctggctggaagatctatggaaaggaattccagtttacgtaggactaactggatcaggagcaactttatttgtgcgttatccaaaggctctagaaaaaaattctgcctacgccactcaaatacaaaaaatcattgctttaagtgggggagtatcaacctcgcctatacaaagagatactcccaattggtatccgactattctagaagcatag

SEQ ID NO: 1994 - protein, 283 aa, Chlamydia muridarum
MHFFSPAKLNIFLQLLGKREDGFHEIVTRYQAVSFGDQLSLSVSSRDSFQIINDCQLEISNNSIWKSTALFRQYTGITDPVSWRVVKHIPIGSGLAGGSSNAATALFALNQMFQTGLSDEELRSLAEKVGMDTPFFFSSGSALGLGRGEKVVTLNELVVDRYILYFSNKGVLTSEAFAVVKPSDCSLSKDLEYARNDLENPVFRLRLDLKEKKRWLEDLWKGIPVYVGLTGSGATLFVRYPKALEKNSAYATQIQKIIALSGGVSTSPIQRDTPNWYPTILEA

SEQ ID NO: 1995 - DNA, 861 bp, Chlorobium tepidum
  CDS (1)..(861): transl_table=11
atgaagcacttttcggtcaaagcctgcgccaaaatcaacctcggtctgctcatcaccagccgtcgggctgatggctatcacactcttgaaacaatcttcgcgccgatcgactggttcgatacccttgaattcaccgagtctgacgccatctcgatggagtgcagcaatcttgatctgctggttgatgactcgaatctctgcatccgcgctgccaaagcgttgcaggagcacaccggggtgaaacgcggggcgactatcaaactgctcaagcgggtgccatttggcgcgggtctcggtggtgggagcagcgatgcggcggcgacgctcaacgcgctgtgcaagctctggcagatcgacgtgccctcggcggagctgcacaaactcgccgtcaagcttggcgcggacgtgccctatttcctcgaaatgaagggacttgcctacgctgccggaatcggcgaggagctcgaagacctcaatcttgccctgccctggcacgtagtaacggtcttccctgaggtgcaggtgccgactgcctgggcctacaagaatttccaccgccagttcgagcgtccggtgcccgatctgaaaactctcgttcgtcggctctgccacgagagagacatctcggtgttcggtgttttcgagaatgatttcgcctcggtggtgttcgagcactatccggtggttcgcgaggttcgcgacgcgctcgcggcctctggcgcccagttcgtctcgctctccggcagcggctctgcggtctatgccctttatgaagggcgtgccgacgcggtcaaggccgccgaagcgatgagcgctcgcttccgtatcaacatgactccggcaggtttccggatggagtga

SEQ ID NO: 1996 - protein, 286 aa, Chlorobium tepidum
MKHFSVKACAKINLGLLITSRRADGYHTLETIFAPIDWFDTLEFTESDAISMECSNLDLLVDDSNLCIRAAKALQEHTGVKRGATIKLLKRVPFGAGLGGGSSDAAATLNALCKLWQIDVPSAELHKLAVKLGADVPYFLEMKGLAYAAGIGEELEDLNLALPWHVVTVFPEVQVPTAWAYKNFHRQFERPVPDLKTLVRRLCHERDISVFGVFENDFASVVFEHYPVVREVRDALAASGAQFVSLSGSGSAVYALYEGRADAVKAAEAMSARFRINMTPAGFRME

SEQ ID NO: 1997 - DNA, 867 bp, Chlamydia trachomatis
  CDS (1)..(867): transl_table=11
atgcactttctttctccagcaaagcttaatctctttttgcagatacttggcaggcgggaagatgattttcacgaaatagtcacacgctatcaagcgatagcctttggggatcaactctccttatcaataagctctcgcgattctctccaagtaattaatgcttgtcatcttgaaacgcctagtaattctatatggaaaagtgtggcgcttttccgtcggtacacaggcattacaacgcctgttagttggcgtgtagtcaaacagatccctgttggagcaggtcttgcaggagggagtagtaatgcagcaactgcattgtttgctttaaaccaaatcttcaaaacaggactatctgatgaggaaatgcgttccttagccgaacagcttggcgtggatactccttttttcttttctacaggagcagccttaggagtggcccgtggggagaaaataatagctctagaagagagtgtttcagatagatatgttttgtatttttctagtgaaggagttctcactagtcgggcttttgccgccgtacaaccttcggactgttcctccagaaaaaatttagagtatacgcaaaatgacttagaaaagcctgtttttcggttgcgcttagatttgaaagaaaagaaacattggctagaaaacctgtgggcggaacttcctgtgcatatagggctaacgggatcaggggcaaccttatttgtccgttacccagaaatcttagaggaagacctttcttatgcagctcagatacaaagagcagtaacgttaagcggaggattattaacttctccgatacgaagagatcctacagcttggtatagcatctattctgaaagtgcacttgcagctacataa

SEQ ID NO: 1998 - protein, 288 aa, Chlamydia trachomatis
MHFLSPAKLNLFLQILGRREDDFHEIVTRYQAIAFGDQLSLSISSRDSLQVINACHLETPSNSIWKSVALFRRYTGITTPVSWRVVKQIPVGAGLAGGSSNAATALFALNQIFKTGLSDEEMRSLAEQLGVDTPFFFSTGAALGVARGEKIIALEESVSDRYVLYFSSEGVLTSRAFAAVQPSDCSSRKNLEYTQNDLEKPVFRLRLDLKEKKHWLENLWAELPVHIGLTGSGATLFVRYPEILEEDLSYAAQIQRAVTLSGGLLTSPIRRDPTAWYSIYSESALAAT

SEQ ID NO: 1999 - DNA, 855 bp, Chromobacterium violaceum
  CDS (1)..(855): transl_table=11
atgcagcatccgtttcattcctacccggctccggccaagctcaaccttctgctgcacgtggtcggcaagaggcccgacggctaccacctgctggaaacggtgttccgtttcatcgatttcggcgatacgctggagttggccgtccgcgacgacggccagatcgttctgctgacgccgaccgacggcgtgccgccggagcaggacctgacggtccgcgccgcgcgcctgctgcagcgggaaagcggctgccgtttgggcgccagcatcaaattggagaagcgcacgccgatgggcggcggcctgggcggcggcagttccgacgccgccaccgcgctgatcgcgctgaaccggctgtgggggctggcctggccgcgcgagcgcttgcaggcgctgggcctgcagctgggcgccgacgtgccggttttcatcttcggccgcaacgcgttggccaccggcgtcggcgaggtgttggagccgatcccgctgaagcccgcctggtatttggtaattcacccacaggtccatgtgtcgaccattgaggtattccgaaatttttcgcaaaccgtgttgacagagataggacgcgtcggcataatgcgaatcctcgaaacaacgcagcagcgcagaaatgacctgcaaagcgttgtagagaaaagatttccagcggtgaatgaagtactgagcgagttgagaaaatatggttcgccgctgatgactggttccggatcctgcgtgttcctggaattcgagtcgaaagacgaagccgataaagtttaccgggtgttgtcgcaaaaatatcagggatttgtagcggaaggactggatgtccaccccctgttcgacagcgctgaataa

SEQ ID NO: 2000 - protein, 284 aa, Chromobacterium violaceum
MQHPFHSYPAPAKLNLLLHVVGKRPDGYHLLETVFRFIDFGDTLELAVRDDGQIVLLTPTDGVPPEQDLTVRAARLLQRESGCRLGASIKLEKRTPMGGGLGGGSSDAATALIALNRLWGLAWPRERLQALGLQLGADVPVFIFGRNALATGVGEVLEPIPLKPAWYLVIHPQVHVSTIEVFRNFSQTVLTEIGRVGIMRILETTQQRRNDLQSVVEKRFPAVNEVLSELRKYGSPLMTGSGSCVFLEFESKDEADKVYRVLSQKYQGFVAEGLDVHPLFDSAE

SEQ ID NO: 2001 - DNA, 843 bp, Clostridium acetobutylicum
  CDS (1)..(843): transl_table=11
atgaatgttaaagcctacgctaaggttaatatttcacttgatgttataggaaaaagagaagatggatatcatttattaaagatgataatgcagagcattaatttgtatgatgttttagatataagaatcatagatgagggaataaaaatcacatcaaataggcgtaatatacccactaatgataaaaatatagcttatagggcagctaagcttttcatggatacatataaaattgataagggaataagtatacatataaataaaagaatacctgtagcagctgggcttgcagggggaagtgctgatggtgcagccgtacttaaagctatgagagatatttttaaaaaggacgtttcagatgaagaacttataaatttaggagttaaaataggcgctgatatccctttttgcatagttggaggtacagctttttgtgaaggaataggagagaagataacaaagctcagaagcatgaatggtaagataattgtacttgttaagcctgactttggagtttcaacaaagatggtatatacagagtatgacaaatgtttagatgttaagcatcctgatagtgaagggctagtaaaggctgtaaataatggccattttaaatttgttgtaaataatatggtaaatgttttggagaatgttacagcagtaaaatataaggagataaatgaaataaaggagaaagctctagaatataactctataggtacaatgatgagtggaagtggaccaacggttttttctttttttgataacactaaagaagctgaaaaatatttttatgaaatgaaaaaggaatataataaagtatttataacaaggacggtatag

SEQ ID NO: 2002 - protein, 280 aa, Clostridium acetobutylicum
MNVKAYAKVNISLDVIGKREDGYHLLKMIMQSINLYDVLDIRIIDEGIKITSNRRNIPTNDKNIAYRAAKLFMDTYKIDKGISIHINKRIPVAAGLAGGSADGAAVLKAMRDIFKKDVSDEELINLGVKIGADIPFCIVGGTAFCEGIGEKITKLRSMNGKIIVLVKPDFGVSTKMVYTEYDKCLDVKHPDSEGLVKAVNNGHFKFVVNNMVNVLENVTAVKYKEINEIKEKALEYNSIGTMMSGSGPTVFSFFDNTKEAEKYFYEMKKEYNKVFITRTV

SEQ ID NO: 2003 - DNA, 867 bp, Clostridium perfringens
  CDS (1)..(867): transl_table=11
atgaaaatgaaggcttatgcaaaaataaatatagccttagatgctattggaaaaagagaagataactatcatttattaagaatgataatgcaaacagtagatttgtatgacgttatagatatagagaaaagtaatgatagtaatataagcatttcttgtaataagcattatgtctctacagatgaaagaaacttagcatacaaagcggcagtgttatttagagatgaatttaatataaaagatggtgtaaaaattaatattaagaagaatatacctgtagctgcaggtatggcgggtggaagtactaatgcggcggcagttttagttataatgaataagctttttaatgtaaatgctagtttagaagtgttaaaagaaataggactaaaaataggagcagatgttccatattgtattgaaggtggaactgctttatgtgaaggaattggagagattataacacctttaaaaccttttgaaaataaaatattagttgtattaaaacctaattttggggtatctactaaagaagtttatacaaacttagatataaataagataagaaaacatgttaatatagaaggcttaattcaagctatggaaaatgatgatttagattatgtatcaaaaaatatgaaaaatgttttagaaaatgtaactttaaagaagcatactatattaaaaaatataaaagaagatatgagaaaaagtggagccttaggtgcaatgatgagtggaagtggacctactgtatttgctttttttgatgatatgctaacagctcaaagagcttttgaatttttaaaaggaaaatataaatattcagatgtatatataacaagaactataaatagcaataatttataa

SEQ ID NO: 2004 - protein, 288 aa, Clostridium perfringens
MKMKAYAKINIALDAIGKREDNYHLLRMIMQTVDLYDVIDIEKSNDSNISISCNKHYVSTDERNLAYKAAVLFRDEFNIKDGVKINIKKNIPVAAGMAGGSTNAAAVLVIMNKLFNVNASLEVLKEIGLKIGADVPYCIEGGTALCEGIGEIITPLKPFENKILVVLKPNFGVSTKEVYTNLDINKIRKHVNIEGLIQAMENDDLDYVSKNMKNVLENVTLKKHTILKNIKEDMRKSGALGAMMSGSGPTVFAFFDDMLTAQRAFEFLKGKYKYSDVYITRTINSNNL

SEQ ID NO: 2005 - DNA, 843 bp, Clostridium tetani
  CDS (1)..(843): transl_table=11
atgaaaataaaggcttatgcaaaaatcaatctatctctagatatagtaggagtaagagaagatggataccatcttttagaaatggttatgcaaactattgatttatacgatgtagtacatttgaatattaaagataaagatatagaaattaatagtaataactgtaatatacctttagataacagaaacttagcatataaagcagcaaagttgtttaaagagacttttaatataaaagaaggggtagaaatatatatagaaaaaaatatacctatagaagcagggttagcaggtggaagtagtgatgcagcagcggtattgagaggattaagagatatatttatgcctaatttaaataataaagaacttgcaaaaataggagtgagaataggtgcagatgtaccctattgtatttatggtggtactgcattttgtgaaggaataggagaaaaaataactaaattaaatccttttaaggatcattatttggtgttagttaaacctgactttggcatatgtactaaggagacttatagtaagatagacaaaaaagaaataataaaacatccagatacaaaggaaattataaaatctataggtgaaaataatttgaaactattgtgtaaaaatatggaaaatattttggagatagtaactttagaggaaagaagcaacttaaaagatatcaaaaaagaactattacaatatggttctttaggagcgcaaatgacaggtagcggacctactatatttggatttttcccatatagggattcggcagaaaattgttataggaaaatgaagagtaaatataatgaggtatatataagtaaaacaatataa

SEQ ID NO: 2006 - protein, 280 aa, Clostridium tetani
MKIKAYAKINLSLDIVGVREDGYHLLEMVMQTIDLYDVVHLNIKDKDIEINSNNCNIPLDNRNLAYKAAKLFKETFNIKEGVEIYIEKNIPIEAGLAGGSSDAAAVLRGLRDIFMPNLNNKELAKIGVRIGADVPYCIYGGTAFCEGIGEKITKLNPFKDHYLVLVKPDFGICTKETYSKIDKKEIIKHPDTKEIIKSIGENNLKLLCKNMENILEIVTLEERSNLKDIKKELLQYGSLGAQMTGSGPTIFGFFPYRDSAENCYRKMKSKYNEVYISKTI

SEQ ID NO: 2007 - DNA, 903 bp, Colwellia psychrerythraea
  CDS (1)..(903): transl_table=11
atgacttgcgcttctaactcgaactcttttcttaataaagcgattgaatttccatcgccagcaaagattaacttatttttacacattgtcggacaacgtgaagatggttatcacaatttagaaacactttttcaatttatcgatcatagcgatactcttaccttaacggcgaccgaaacgcctgatatagaattattaacacctattgatggtgttaataatgacgataacttaattgtcaaagcagcacgattactaaaaaatagaagtaatactgatttgggcgttaagatcagtatcaataaaatcctaccaatgggtggaggtttgggtggtggttcatcaaatgcagcgaccgttttagttgcactcaatttgttatggcagtgcgagttttctttaagtgaattgtcatcgttaggtttgagtcttggcgccgatgtacctatatttattcatggtttttctgcctttgcccaaggcgtaggtgaccatctcaccgctatcaaacctcaagagtcttggtatttgattactaaacctgaatgtagcatctctacaaaggaaatttttactgctgtagatctacctagaaatactaagaaacttgaccccacagcccttaacactagcgacttcgtcactgaaagctttcataatgactgccaaacattagtaataaaacagtatcccgaggttgccaagttactggcttggttggtagaatacgcaccctcaagaatgacaggaactggagcgtgtgtttttacgcaattttctagttatcaagaggcgcgttcattacaagcgaaactccctaaaggaataagctcttttgtagcgcaaggactgaataagtctccactctgctctgtaatagcaaagctatcattgagcgagtaa

SEQ ID NO: 2008 - protein, 300 aa, Colwellia psychrerythraea
MTCASNSNSFLNKAIEFPSPAKINLFLHIVGQREDGYHNLETLFQFIDHSDTLTLTATETPDIELLTPIDGVNNDDNLIVKAARLLKNRSNTDLGVKISINKILPMGGGLGGGSSNAATVLVALNLLWQCEFSLSELSSLGLSLGADVPIFIHGFSAFAQGVGDHLTAIKPQESWYLITKPECSISTKEIFTAVDLPRNTKKLDPTALNTSDFVTESFHNDCQTLVIKQYPEVAKLLAWLVEYAPSRMTGTGACVFTQFSSYQEARSLQAKLPKGISSFVAQGLNKSPLCSVIAKLSLSE

SEQ ID NO: 2009 - DNA, 936 bp, Corynebacterium diphtheriae
  CDS (1)..(936): transl_table=11
atgacaagttacgccatcacagcggtcgcctcgtcaaaagtcaaccttcatcttggagtcggcaacgcgcgtgacgacggctaccatgagctcgtcaccgtatttcaatcactgagcctgcacgacaccatcacggtgacaccagccgcagatgatatgcacgatgccgaggaccaaggaatcgtcgcaacgctgagcgtgagcggcgacagtgcccaagccgtgcctaccgacgccaccaacctcgcatggcaggcagccgagaaaatgtatcaggcacatcgtcgcaatggtggagcccccgccaagcgcgtgcacatcgccatcgacaaagggattccggtcgcaggcggaatggccggtggatcggccgatgccgctgccacgttagcagccatggcacagtacttgggcaacaccaacaccgagcaagaaatcttgagcattgcagccgagctgggctccgacgtgccctttacctacctcggtgatactcggctaggaacaggccgcggtgaacaactcgtcccagtcttatcgcggggaacctaccattgggcactggcgttttctgcgcaaggcctatctacacccgaggtattccgcaaaatcgatcagatggaccgccaaccgcatctcgatgtcaccgcgctgaacgcagcgctgattacgggagatccccataaagtagcagcgcatttgcacaatgatctccaagcagcggcgctttcactacgccccgaattacgcaccatcctagaacaaggtcgtgccgctggagcactggccggaatcgtatcgggatccggacccacctgtgccttcctttgcgaagatgccgaaactgcccaagcagtagccgcggaattaagcgtgcactaccgaaccgctgtcgctaccggacctgtccgcggcgcccatgtgaaaggacactag

SEQ ID NO: 2010 - protein, 311 aa, Corynebacterium diphtheriae
MTSYAITAVASSKVNLHLGVGNARDDGYHELVTVFQSLSLHDTITVTPAADDMHDAEDQGIVATLSVSGDSAQAVPTDATNLAWQAAEKMYQAHRRNGGAPAKRVHIAIDKGIPVAGGMAGGSADAAATLAAMAQYLGNTNTEQEILSIAAELGSDVPFTYLGDTRLGTGRGEQLVPVLSRGTYHWALAFSAQGLSTPEVFRKIDQMDRQPHLDVTALNAALITGDPHKVAAHLHNDLQAAALSLRPELRTILEQGRAAGALAGIVSGSGPTCAFLCEDAETAQAVAAELSVHYRTAVATGPVRGAHVKGH

SEQ ID NO: 2011 - DNA, 948 bp, Corynebacterium efficiens
  CDS (1)..(948): transl_table=11
gtgaggatcaccgcgagggcctggggcaagatcaatctgcacttgggggtcggccccgcccgcgaggatggctaccacgaactggtcacggtcttccagaccattgatctcgcggagacgatcaccctgaccacgctcgaggacgagctggtggaggaagggagcgtcgtcaggcaactgacggtcaccgggccgcgtggggtgcccaccaccccggacaacctggcgtggcgtgcggttgatgcgctcgtcgggcgccgacgcgagcatgaccgcacacccctgcccgctgtcgaactgcacattgataagggcattcctgtcgccggtggcatggccggtggctccgccgatgcggccgctgcgctgcgtgcggtggatgcctggatcggtcccttcggggaggagaccctgctcgaggtcgccgccgaactcggttccgatgtcccgttctgcctgctcggcggcaccaaactgggcaccggtcggggtgagcagctggtggacatgctcagccgcggcacctaccactgggcactggtggtctccccgaagggcctgtccaccccggaggtcttcgccaaattcgacgagatgtccctgccttcaagcatggatgtcaccccgatgagtcaggcactgctcgacggcagcgccggggctctcgcggaggtgttggaaaacgacctcgcacctgccgcactcagcctgcggcccgatctgcgcaagacacagttggcgggcctgcgcgccggggccctggccacgatggtctccggttccgggcccaccatcgccctgctctgtgatgatgcccagtccgcccgggatgtcgcagatgccctcatggatgagggtgtcggcctgtccgtccaccccgccaccagtcctgtccccgggcccgcgaagaaccgtggcgcccacatcgtgtccatcgaatcggagtag

SEQ ID NO: 2012 - protein, 315 aa, Corynebacterium efficiens
MRITARAWGKINLHLGVGPAREDGYHELVTVFQTIDLAETITLTTLEDELVEEGSVVRQLTVTGPRGVPTTPDNLAWRAVDALVGRRREHDRTPLPAVELHIDKGIPVAGGMAGGSADAAAALRAVDAWIGPFGEETLLEVAAELGSDVPFCLLGGTKLGTGRGEQLVDMLSRGTYHWALVVSPKGLSTPEVFAKFDEMSLPSSMDVTPMSQALLDGSAGALAEVLENDLAPAALSLRPDLRKTQLAGLRAGALATMVSGSGPTIALLCDDAQSARDVADALMDEGVGLSVHPATSPVPGPAKNRGAHIVSIESE

SEQ ID NO: 2013 - DNA, 936 bp, Corynebacterium glutamicum
  CDS (1)..(936): transl_table=11
gtgaaaattaccgctaaggcgtgggcgaaaaccaacctgcatttaggtgtgggaccggctcacgacgatggatttcacgagctcatgacggtgtttcaaaccattgatctgtttgacaccgtcaccttaaccaccctcgatgaggagttggtggaggaggggagcgtcgtcaagcaattatctgtgaccggtgcccgtggcgtgcctgaggacgccagcaatcttgcgtggcgcgctgtggatgcgttggttaagcggcgcgcggaaaagacgccgctgtctgcagtttcgctgcatatttccaaggggattccggtggctggcggcatggctggcggctctgcggatgcggctgcgacactgcgcgcagtggatgcctggattgggcctttcggcgaggacacattgctggaggttgccgcggagctcggctcagatgtgccgttttgcctgcttggtggcaccatgcgcggtaccggtcgcggcgagcagctggtagatatgttgacgcgcggcaagctacattgggtggtggccgcgatggcgcatggcctgtccacgcctgaggtattcaaaaagcatgatgagctgaatccggaatcgcatatggatatcagcgacctcagcgccgcacttctcaccggcaacaccgccgaggtggggcagtggctgcacaatgatctgaccagcgccgcactcagtttgcgccctgaactgcgcagcgtcctccaagaaggcatccgctccggcgcgcatgcaggaattgtctccggctccggcccgaccacggtattcttgtgcgaatcggagcacaaagcgcaagacgttaaagaggcgctaatcgacgccggccaggtgtacgctgcttacaccgccaccggccctgcggcctcaaccgccgaccagcgcggcgcacacattttgactgtttcataa

SEQ ID NO: 2014 - protein, 311 aa, Corynebacterium glutamicum
MKITAKAWAKTNLHLGVGPAHDDGFHELMTVFQTIDLFDTVTLTTLDEELVEEGSVVKQLSVTGARGVPEDASNLAWRAVDALVKRRAEKTPLSAVSLHISKGIPVAGGMAGGSADAAATLRAVDAWIGPFGEDTLLEVAAELGSDVPFCLLGGTMRGTGRGEQLVDMLTRGKLHWVVAAMAHGLSTPEVFKKHDELNPESHMDISDLSAALLTGNTAEVGQWLHNDLTSAALSLRPELRSVLQEGIRSGAHAGIVSGSGPTTVFLCESEHKAQDVKEALIDAGQVYAAYTATGPAASTADQRGAHILTVS

SEQ ID NO: 2015 - DNA, 825 bp, Dechloromonas aromatica
  CDS (1)..(825): transl_table=11
ttgtggcctgcgccggccaaacttaatctttttctgcacgtgatcggccggcgcgccgatggctaccacctattgcaaaccgtcttccgcttcatcgaccgagccgatacgctccgtttcgagccgcgcagcgatggtgaaatcgtccttgccaccccgatccccggcgtcccgaccgacagcgacctgaccgtccgtgctgcccgcctgttgcagcaggcaagcgcttgccgacaaggcgccaccatccatctcgacaaacaattgccgatgggtggcggactgggcggcggctcttccgatgcagccaccgtactgctcgcgctgaaccatctctggcagacaggcctgactcgcccccaactggagaaactcggactcactctcggcgccgatgtgccggtattcgtgcatggccacaacacctttgctgaaggtatcggcgaagcatttaccgatatcgaattaccaccgcaaagctatctggtcctgcatcccgcaatccacgtcccgaccgcggccattttcggcgcccctgaactcaagcgcgacacccctcccattcggcacggcgaatggcagcccggacaaggccacaatgaccttgaagctgtggcctgcgccaaatttcctgcggtcgccgaatacctcaactggctgaaacaacatgcaccacaggcgatgatgaccggctccggcgcctgcgtctttgccggcttcgccagccgtcgcgaggcagaagccatcctggcgcaatgccccgctgacatgaacgcctggatcgccgatgggcttggcgaacacccgctcgcaaaaatttcataa

SEQ ID NO: 2016 - protein, 274 aa, Dechloromonas aromatica
MWPAPAKLNLFLHVIGRRADGYHLLQTVFRFIDRADTLRFEPRSDGEIVLATPIPGVPTDSDLTVRAARLLQQASACRQGATIHLDKQLPMGGGLGGGSSDAATVLLALNHLWQTGLTRPQLEKLGLTLGADVPVFVHGHNTFAEGIGEAFTDIELPPQSYLVLHPAIHVPTAAIFGAPELKRDTPPIRHGEWQPGQGHNDLEAVACAKFPAVAEYLNWLKQHAPQAMMTGSGACVFAGFASRREAEAILAQCPADMNAWIADGLGEHPLAKIS

SEQ ID NO: 2017 - DNA, 855 bp, Dehalococcoides ethenogenes
  CDS (1)..(855): transl_table=11
atgctgacactgctggctccggccaaagtcaaccttagtctggaagtcctctaccgccggaatgacgggtaccatgagctgcggagtattattcagtcactcagcttatgtgaccgcctgtctttcagcccggccaaaacagtgcaaataagctcagacagcccggattggcaggctgaacatagcttggtttccaaagctgtggccttatttagtgaaaagtgcgggcagggacgcggggtaaacctgactatagccaagcgtattcccctggtttcggggttggggggagacagttcctgtgcggcggctgttttaaaagggcttaacaagctgtgggggtgcggttatccgcgctggcggcttatggaactgggggcagagctgggttctgacgtgccgtttttcatgatgggcggtacggctatgatggaaggacgtggagaaaccgtaacccccctgcccactctcaatcaaatgtgggcggttttgctggttcctgaaatagaaatgccgccggataaaactgccgctctctaccgtaatctgcatgcagatagctttagcagcggggaaataagcgataaactgctggaagatatatgtcagggtaagctaagctacagttcgtgtttcaatgtatttgaaaaaatagccttcacccttttccctgatttggccaaataccgctggcaatttctggaagccggggcttaccagatatttttagccggagcaggcccgaccctctttaccctgcttaaagataaaaatatggctgagaagatataccataatctgtgccagaaggggcatcaggcttatctggtatccactttagggccactggattga

SEQ ID NO: 2018 - protein, 284 aa, Dehalococcoides ethenogenes
MLTLLAPAKVNLSLEVLYRRNDGYHELRSIIQSLSLCDRLSFSPAKTVQISSDSPDWQAEHSLVSKAVALFSEKCGQGRGVNLTIAKRIPLVSGLGGDSSCAAAVLKGLNKLWGCGYPRWRLMELGAELGSDVPFFMMGGTAMMEGRGETVTPLPTLNQMWAVLLVPEIEMPPDKTAALYRNLHADSFSSGEISDKLLEDICQGKLSYSSCFNVFEKIAFTLFPDLAKYRWQFLEAGAYQIFLAGAGPTLFTLLKDKNMAEKIYHNLCQKGHQAYLVSTLGPLD

SEQ ID NO: 2019 - DNA, 855 bp, Dehalococcoides sp
  CDS (1)..(855): transl_table=11
atgctgacattgctggctcctgccaaagtcaaccttagtctggaagtgctataccgcagaaaagacggataccatgaattgcgaagcattatccagtctctaagcctgtgtgaccgcctgtctttcagcccttctaaaacggtacatataagttcagacagccaggactggcaggctgaccttagtttggtttcaaaagcagtggaactgtttagtgaaagatgcgggcagaacacaggggtaaacctgaaaatagccaaacgtattccactggtttccgggctggggggagacagttcgtgtgcggcggctgttttgaaaggacttaacaagctttgggggtgcggttatccctgctggcgtttgatggagataggtgcagagctgggttctgacgtgccgttttttataatgggcggtacggccatgatggaagggcggggagaaacagtaactcctctgcctacccttactcaaatgtgggcggttttactggtgccggcgcttgatatgccggctgataaaactgctgccctttaccgaaatttgcgcccggatagctttaccagcggagagataagtgacaagctgctggaaagtatttgtcagggtaagctcagcctcagcctttgttttaacgcctttgagaaagtagcttttgagcttttccccgaactggtcaaataccgctggcagtttctggaagcaggggcttaccagatatctttagccggggcaggaccgaccctgttcaccctgcttaaagataaaaacactgctgaaaagatataccataacctgtgccaaaaagggcatcaggcctatctggtgtccactttagggccgctggattga

SEQ ID NO: 2020 - protein, 284 aa, Dehalococcoides sp
MLTLLAPAKVNLSLEVLYRRKDGYHELRSIIQSLSLCDRLSFSPSKTVHISSDSQDWQADLSLVSKAVELFSERCGQNTGVNLKIAKRIPLVSGLGGDSSCAAAVLKGLNKLWGCGYPCWRLMEIGAELGSDVPFFIMGGTAMMEGRGETVTPLPTLTQMWAVLLVPALDMPADKTAALYRNLRPDSFTSGEISDKLLESICQGKLSLSLCFNAFEKVAFELFPELVKYRWQFLEAGAYQISLAGAGPTLFTLLKDKNTAEKIYHNLCQKGHQAYLVSTLGPLD

SEQ ID NO: 2021 - DNA, 900 bp, Deinococcus radiodurans
  CDS (1)..(900): transl_table=11
atgacccatcaaccatcacctgtcatccatcaccatttcgccccggcgaaaatcaacctcggcctctcggtccttggcgtgcgcgagaacggctatcacgacctgcacagcctgatggtgccgctcacggtgggcgacgagctggaaattcggcctgctggggcgctcacgctgcgggtggagggcgccgacctgccgaccgacgagcgcaacctcgtttaccgcgccgcccgcgcctatctggacgcggcgggggcagcgggaggcgccgacctcgtgctgcacaagcggctgccgctcgcctcggggctgggcgggggcagcagcgacgcggcgagcacgctgctggcgctggccgagctttatcctgctcccgaccaccgcccggtggacctgcccgcgctggccctgacgctcggggccgacgtgccgtttttcctgctcgggggcgcggcgctcgccgagggggtgggtgagcggttgacccccgtcgacgacctgccgcccgtgcatctggtgctggcgaacgcgggtgccgaggtcagcgcgggcgacgcctaccgctggctggacgaaacgggcgatttcagcggcaaactgcggctggaggcgatgcggctggcgctggcgcggggcgtggaagtgccgtacttcaactcgctgcaggcgggcgtgctggcgcgggtgccgagcgtcctgaccacgctggaggcgctggcggatgcgggcctgcattcggtgctgatgtcgggttcgggggccacctgcttcggactggcgcacgacgcggcgcaggcgcaggccgctgccgccgccctcgcccagcgctgccccggctggtgggtcaccgccgcgcaggtgcgccttccgctgtcagacaactcaggaggcaggacttaa

SEQ ID NO: 2022 - protein, 299 aa, Deinococcus radiodurans
MTHQPSPVIHHHFAPAKINLGLSVLGVRENGYHDLHSLMVPLTVGDELEIRPAGALTLRVEGADLPTDERNLVYRAARAYLDAAGAAGGADLVLHKRLPLASGLGGGSSDAASTLLALAELYPAPDHRPVDLPALALTLGADVPFFLLGGAALAEGVGERLTPVDDLPPVHLVLANAGAEVSAGDAYRWLDETGDFSGKLRLEAMRLALARGVEVPYFNSLQAGVLARVPSVLTTLEALADAGLHSVLMSGSGATCFGLAHDAAQAQAAAAALAQRCPGWWVTAAQVRLPLSDNSGGRT

SEQ ID NO: 2023 - DNA, 984 bp, Desulfovibrio desulfuricans
  CDS (1)..(984): transl_table=11
atgcttaccgttccgcaacagaccatccgctcggggtgcaagataaacctgtttctggagataacgggagtgcggcctgacggctaccacgaactggtcacgctgttctatccgctgtcagagccttttgacctgatggaaatcagccccgcaacgcatggagtgaccgtgctgagcgaacgggccgacctgtgcggcgacaaaaacatcatctgcaaggcatggcacacgttcgcggcagcaggcggtactccgccgcccatgcaggtacgccttgcaaaaggggtacccgacggcgccggactgggcggcggcagtgccaacgcggccgcagtgctcaagctgctgaacaccgcgggaggagctccacgtttttctgacaccgctctggcgaaaatagctgcgcaggtcggtgccgatgtgcccttttttctgcataacacgccgtgccttgcaacaggcataggtgaaaaacttgtccccgcgccccttgacctttccgggtggcaccttgtactagtctgccccggagttcaggtttccactccatgggcttataaccggtgggacactctttaccggagcgggctgcatcacccgtgcgggcagttgcccgccgcgcacgcaccggcggcctgcgcacagttgcagacaacagggccggaccgcccggtacgggccgaaacaggctgcgcaggcaggaaaaaaaatacctgccgcagcttgacaactgaacggcaagccgatagtaaacctgtctctcgtgccctgtggctctttaacagctttgaaacggtggttttctcggcctattccgaactgagacagcacaagaacacgcttcttgcgcacggcgcttcggctgctctgatgagcggcagcggttccagtctgttcggccttttcagggacaaggctcaggccgaggcggcaatgctccacttctgtcaaagaagcattgcagtatacgtccaccgactataa

SEQ ID NO: 2024 - protein, 327 aa, Desulfovibrio desulfuricans
MLTVPQQTIRSGCKINLFLEITGVRPDGYHELVTLFYPLSEPFDLMEISPATHGVTVLSERADLCGDKNIICKAWHTFAAAGGTPPPMQVRLAKGVPDGAGLGGGSANAAAVLKLLNTAGGAPRFSDTALAKIAAQVGADVPFFLHNTPCLATGIGEKLVPAPLDLSGWHLVLVCPGVQVSTPWAYNRWDTLYRSGLHHPCGQLPAAHAPAACAQLQTTGPDRPVRAETGCAGRKKNTCRSLTTERQADSKPVSRALWLFNSFETVVFSAYSELRQHKNTLLAHGASAALMSGSGSSLFGLFRDKAQAEAAMLHFCQRSIAVYVHRL

SEQ ID NO: 2025 - DNA, 900 bp, Desulfotalea psychrophila
  CDS (1)..(900): transl_table=11
atggatagaaatgaaggtgagttggctcaagtggctacccgtctacatatgcgtgcacctgcgaaggtcaatctctctctgcaggtgctcagtcggcgtgcggatggctaccatgatctggcaactcatatgcaaaaggtcagtctctatgatgagctggagctctgtttgacgaagcagtctggggtgagtcttgtctgcagtgatggtgatattcctcttgatgaaaaaaatcttgccgtgcgtgcggcccttgcctatctcgccaggagttcccgggtggggcagcggggggtgcgcataagtcttgagaaaaatatacccgtcggggcaggtcttgggggtggtagcagtgatgccggtactgtgctccgaggcttgaatcagcttttggacaatgagtttagcgaagaggagttgattgaaatggcccgtcctctgggggccgatgtgcctttttttgcttcggagatgtcggcggcatttgccacaggcataggagatattctccagccccttgaatcaacgaaagaatttgattttattctagttaatcctgggatttttatttcaacaaaagaaatatttgaaagattttcgttgacattaagtccaaaaagaaatatctttgcgcgtcctttcagggtgcacgaacgagcctctttgctggattacatgcataacgatcttgaagagattgttagtgatctgtgtccggctattgacgagatgaaaagtctcttggaagccaatggtgcttcggcggtgatgatgtctggaagtggttctacggtttttggggtttttcagaggtccgtggggcagaaaaaaattaaccaggtttgtaaggttctgtcttgcaagtatggtgagaaggtttttgcagtacaggcagtttga

SEQ ID NO: 2026 - protein, 299 aa, Desulfotalea psychrophila
MDRNEGELAQVATRLHMRAPAKVNLSLQVLSRRADGYHDLATHMQKVSLYDELELCLTKQSGVSLVCSDGDIPLDEKNLAVRAALAYLARSSRVGQRGVRISLEKNIPVGAGLGGGSSDAGTVLRGLNQLLDNEFSEEELIEMARPLGADVPFFASEMSAAFATGIGDILQPLESTKEFDFILVNPGIFISTKEIFERFSLTLSPKRNIFARPFRVHERASLLDYMHNDLEEIVSDLCPAIDEMKSLLEANGASAVMMSGSGSTVFGVFQRSVGQKKINQVCKVLSCKYGEKVFAVQAV

SEQ ID NO: 2027 - DNA, 861 bp, Desulfovibrio vulgaris
  CDS (1)..(861): transl_table=11
atgaacgacgcggtgacgctccgttccgggtgcaaggtcaatctcgacctccatatcacgtcgcgccgtgacgacggctatcacgaaatcgacagcctcttccttccgctggaggaaccgcacgacgaactggtggtgacggttggcgatgctcccggaataactgtgacgtgtgccattcagggcatcgacccgacacggaacacggtcacccgcgcctacgacgcctatgccgaagcctccggattccgcccgcctcttcgcgtcgagttgcgaaaaggcgttccgcatggggcaggactgggaggcggcagtgccaacgccgctgcaatcctgaaccacctcgaatccatcgccccgcatcccctcggaagagagacgctatgcagactggcggcccgcatcggagccgacgtgccgttcttcatccatgcggtcccgtgccgtgccagcggcattggcgagatcatcacccctgtggcatggccgtacaagggattcaccctgcttctcgcctgcccgcaggtacaggtctccacggcatgggcctacggcgcgctggatgctgccgaagaaaaacaactccgcgtgcgtggttgcttgacaacggggggggttgcggatagaaactcgttctcccgcgagtcatggctccataacagcttcgaaccggtggtcttcgcgtctcacccggagctgcggtcgctcaaggaagccttgttgcgacatggcgcggcagccgccctcatgagcggtagcggcgcgagcgtcttcgccctcttcaggaggcgtgaagatgccgaagcggccttcgaacagctgaagggtcatggcatacgggtatatcagcatcttttgtga

SEQ ID NO: 2028 - protein, 286 aa, Desulfovibrio vulgaris
MNDAVTLRSGCKVNLDLHITSRRDDGYHEIDSLFLPLEEPHDELVVTVGDAPGITVTCAIQGIDPTRNTVTRAYDAYAEASGFRPPLRVELRKGVPHGAGLGGGSANAAAILNHLESIAPHPLGRETLCRLAARIGADVPFFIHAVPCRASGIGEIITPVAWPYKGFTLLLACPQVQVSTAWAYGALDAAEEKQLRVRGCLTTGGVADRNSFSRESWLHNSFEPVVFASHPELRSLKEALLRHGAAAALMSGSGASVFALFRRREDAEAAFEQLKGHGIRVYQHLL

SEQ ID NO: 2029 - DNA, 852 bp, Escherichia coli O6
  CDS (1)..(852): transl_table=11
atgcggacacagtggccctctccggcaaaacttaatctgtttttatacattaccggtcagcgtgcggatggttaccacacgctgcaaacgctgtttcagtttcttgattacggcgacaccatcagcattgagcttcgtgacgatggggatattcgtctgttaacgcccgttgaaggcgtggaacatgaagataacctgatcgttcgcgcagcgaggttgttgatgaaaactgcggcagacagcgggcgtctttcgacgggaagcggtgcgaatatcagcattgacaagcgtttgccgatgggcggcggtctcggcggtggttcatccaatgccgcgacggttctggtggcgttaaatcatctctggcaatgcgggctaagcatggatgagctggcggaaatggggctgacgctgggcgcagatgttcctgtctttgttcgtggtcatgccgcgtttgccgaaggcgttggtgaaatactaatgccggtggatccgccagagaagtggtatctggtggcgcaccctggtgtaagtattccaacaccggtgatttttaaagatcctgaactcccgcgcaatacgccaaaaaggtcaatagaaacgttgctaaaatgtgaattcagcaatgattgcgaggttatcgcaagaaaacgttttcgcgaggttgatgcggtgctttcctggctgttagaatacgccccgtcgcgcctgactgggacaggggcctgtgtctttgctgaatttgatacagagtctgaagcccgccaggtgctagagcaagccccggaatggctcaatggctttgtggcgaaaggcgttaatctttccccattgcacagagccatgctttaa

SEQ ID NO: 2030 - protein, 283 aa, Escherichia coli O6
MRTQWPSPAKLNLFLYITGQRADGYHTLQTLFQFLDYGDTISIELRDDGDIRLLTPVEGVEHEDNLIVRAARLLMKTAADSGRLSTGSGANISIDKRLPMGGGLGGGSSNAATVLVALNHLWQCGLSMDELAEMGLTLGADVPVFVRGHAAFAEGVGEILMPVDPPEKWYLVAHPGVSIPTPVIFKDPELPRNTPKRSIETLLKCEFSNDCEVIARKRFREVDAVLSWLLEYAPSRLTGTGACVFAEFDTESEARQVLEQAPEWLNGFVAKGVNLSPLHRAML

SEQ ID NO: 2031 - DNA, 849 bp, Ehrlichia canis
  CDS (1)..(849): transl_table=11
atgtcaatatttttagtgaaagcaccagcaaaagttaatttatttttgcatattactggtaaacgcattgatcaacatcattatttggaatccttatttgtttttgttaacgtttatgatcttttagaagttaatattgatgggagaaagaggggagtatatttttcaaattttaagattagtaaatataataatactgtgtataaggcaatagaattgttgttaaagcacagttctgtacgtccaaatatttctgtaaatgtgataaaaaatattttagtttctgcaggattagcaggtgggtcagctgacgctgctgccatcatacgtttattaggtaatatgtggaatattgattgtaaattgctacaagatttagcgttaaaagttgggagtgatgttccagcatgtttagaatctaaaacgctttttgctaaaggagttggagaagatatactgttgttacctgatttattattgccgagatacattatacttgttgcaccgagaggtaagtcattaagtacagcaaaagtctttaatcattataagtgtgataatttctctgcttcaatatgtgataaacttcctgttaaacaagatgattggatggaattgatttataattctaagaatgatttactagatgtagcattgaattttgttccagaaatagaagaaatattatttgtattaaagaaattaaaaaatgtttttattgcacgtatgactggcagtggtgctacgtgttttgcattgtttcatgagttaagtcatgctgagaatgcagctaagcacttgcggatgacacgtcctgattgggtaatatttaatgctaaaatactttaa

SEQ ID NO: 2032 - protein, 282 aa, Ehrlichia canis
MSIFLVKAPAKVNLFLHITGKRIDQHHYLESLFVFVNVYDLLEVNIDGRKRGVYFSNFKISKYNNTVYKAIELLLKHSSVRPNISVNVIKNILVSAGLAGGSADAAAIIRLLGNMWNIDCKLLQDLALKVGSDVPACLESKTLFAKGVGEDILLLPDLLLPRYIILVAPRGKSLSTAKVFNHYKCDNFSASICDKLPVKQDDWMELIYNSKNDLLDVALNFVPEIEEILFVLKKLKNVFIARMTGSGATCFALFHELSHAENAAKHLRMTRPDWVIFNAKIL

SEQ ID NO: 2033 - DNA, 852 bp, Enterococcus faecalis
  CDS (1)..(852): transl_table=11
atggaaataatcgaacgagctcctgcgaaaattaatcttgggttagatgttctgcataaacgtgtggatggctatcatgaagttgaatctatttttgcaagtgtagatttagccgatcatttaacttttgaaaatctagaagaagacatcattcgtattgaaacggacagctcttttttacccgtggatcgacggaatcatgtctatcaagcagttgacttattaaagcgtacctataatattcataaaggaattaaaatatatattgaaaaacgtatccccgtggcagctggtttagcaggggggagcagtgactgtgccgcagcattacgaggcttgaacaaactgtggaatctggggttgacgatggacgaactctgtgaaattggcagccaaattggtatggatgttccttattgtttaaggggcggaacagcctttgcaaacggacgtggggagaaaattgaagcattaccgaccatgcctcaatgttggattgtgttagttaaaccaagaattagtgtatccactagtaccgtttttaatgatttagcggtagatgaattgcaccatccagatattgctggactaagaatagctattgaaaatggggattatactgggatgacccaaacggttggcaatgcgttggaaagtgtcacgattgccagacatccaatcgtgcaacaaatcaaggatcgcatgctgaagtacggcgctgatgcagcgttgatgagcggcagtggaccgacagtctttgctttatgtgaaaagaaaacacgagcacaacggatttataatggacttaaaggcttttgtgaagaagtttatttggttcggacattgaaataa

SEQ ID NO: 2034 - protein, 283 aa, Enterococcus faecalis
MEIIERAPAKINLGLDVLHKRVDGYHEVESIFASVDLADHLTFENLEEDIIRIETDSSFLPVDRRNHVYQAVDLLKRTYNIHKGIKIYIEKRIPVAAGLAGGSSDCAAALRGLNKLWNLGLTMDELCEIGSQIGMDVPYCLRGGTAFANGRGEKIEALPTMPQCWIVLVKPRISVSTSTVFNDLAVDELHHPDIAGLRIAIENGDYTGMTQTVGNALESVTIARHPIVQQIKDRMLKYGADAALMSGSGPTVFALCEKKTRAQRIYNGLKGFCEEVYLVRTLK

SEQ ID NO: 2035 - DNA, 873 bp, Erwinia carotovora subsp
  CDS (1)..(873): transl_table=11
atgcaaccgacggttatcgaaacatggcctgctcccgccaaactgaatctgtttctttatattacaggtcagaggcaggacgggtatcacctgctgcaaacgctatttcagtttctggattacggcgacacgctgacaattcgaccgcgtaatgatgaccagattaacctgcttacccccatagacggtgtagagaacgagcaaaacttgatcatccgcgccgcacgcttattacagcagcactgcgaacgccgtaatattcgccctgcacagtttggtgcaaacattcatatcgaaaagtgcctaccaatgggcggtggattgggcggcggttcatccaatgcggccaccgtgttggtcgcccttaatcatttgtggcaaagtggtctaaacgttgatacgttggccgaattgggactgcaactgggtgcggatgttcctgtgtttatccgtgggtatgctgccttcgcagaaggcattggcgaacagctaacaccggcgaatccgccagaaaaatggtatctggtggcacaccctagcattagcattgccacaccgttgattttcggcgatcctgaactgacgcgtaattcgccagttcgtgatttagaaactttattaaaccagaccttcgtcaatgattgtgaagctatcgcaagaaaacgttttcgtgaggttgaacagctactttcatggctgctagaatatgccccggcgcgcctgactggaacgggggcttgtgtgtttgcagagtttgacaccgagttcgcagcccgtcaggtgcttgaccaggccccggaatggttaaacggtttcgtagcacgaggcgttaacgtctctccgctacaacgtagactttctgggcaacgttag

SEQ ID NO: 2036 - protein, 290 aa, Erwinia carotovora subsp
MQPTVIETWPAPAKLNLFLYITGQRQDGYHLLQTLFQFLDYGDTLTIRPRNDDQINLLTPIDGVENEQNLIIRAARLLQQHCERRNIRPAQFGANIHIEKCLPMGGGLGGGSSNAATVLVALNHLWQSGLNVDTLAELGLQLGADVPVFIRGYAAFAEGIGEQLTPANPPEKWYLVAHPSISIATPLIFGDPELTRNSPVRDLETLLNQTFVNDCEAIARKRFREVEQLLSWLLEYAPARLTGTGACVFAEFDTEFAARQVLDQAPEWLNGFVARGVNVSPLQRRLSGQR

SEQ ID NO: 2037 - DNA, 828 bp, Francisella tularensis subsp
  CDS (1)..(828): transl_table=11
atggcaaatataaaagctaaaaaatactatagttatgcaaagataaatctatttttgcatatattaaacaaacgtccagatggttaccataatttacagacttggtttacctttttggacttaaaagatcaactaacttttagttttaataattcacgagaaattaatatttcgagtaatattagtattgctgcaaaacaagataatttagtatataaggctatcaaaaaatttcagcaaagctatagagtgcaagatataggtgttgatattgaaattaagaaaaatattccaatgggagcaggacttggcggtggaagctcaaatgctgctactacacttatagctttacgtgattattatttgccgcagttgtcaaatgaggagatgattccattagcggcaaaacttggtgccgatgtgccgatatttgtttatggtaaatctgcgtgggcagaaggtataggtgagatattataccataaggattttagtccgcagtatgcgctattgattaaaccggatatccatattagtacaaaagagttttttacaagtgaggatttaattaagtcatcggttctaatatctaaagatttaggctttgataagagcattatgcataacgattttgagaatgttttttatgcaaaatatccagagtttagtcaatatctaaaagagttagatagtgattttagaatgacaggtacaggttcttgtttttatttactctcagcagataaaaataaacttgagcaacttgcaagaaaaattaataaacctcttgacaaatggctagtcaaaacattaaactatgtctactaa

SEQ ID NO: 2038 - protein, 275 aa, Francisella tularensis subsp
MANIKAKKYYSYAKINLFLHILNKRPDGYHNLQTWFTFLDLKDQLTFSFNNSREINISSNISIAAKQDNLVYKAIKKFQQSYRVQDIGVDIEIKKNIPMGAGLGGGSSNAATTLIALRDYYLPQLSNEEMIPLAAKLGADVPIFVYGKSAWAEGIGEILYHKDFSPQYALLIKPDIHISTKEFFTSEDLIKSSVLISKDLGFDKSIMHNDFENVFYAKYPEFSQYLKELDSDFRMTGTGSCFYLLSADKNKLEQLARKINKPLDKWLVKTLNYVY

SEQ ID NO: 2039 - DNA, 885 bp, Fusobacterium nucleatum subsp
  CDS (1)..(885): transl_table=11
atgaggatttctttgaataagtataagatattttcaaatgctaaaattaatataggtttaaatgtttttcaaaaagagagtgatggctatcataatattgattctataatggctcctattgatttatctgatgaaatggatgtaacattttattcagacttaggagatttaaaaattgaatgttctgataagagtattcctactgatgaaagaaatattttgtataaaacatataaaatattttttgaagaaagtaaaaaagaaaaggaaaaaattgatattatcttaaaaaaaaatataccatctgaagctggcttaggtggaggaagttctaatgcaggctttttcttgaaacttttaaataaacattatggaaatgtctataatgaaaaggaattagaaaaactagcaatgagagttggaagtgatgttccattctttattaaaaataagacagctagggttggtggaaaaggaaatagagtagacttagtagaaaataaccttaaagattcaataattttgataaaaccattagattttggtgtatccacaaaagaagcctatgagagttttgataacttaaaagaagttaaatatgctgattttgataagattattaagaatctaaaagaaggtaatagaattgctttggaaagtaatatagagaacagtttagaacaaggaattttagaaacagatacaaatataaaaatgttgaaaatgacattaaattcagttgtatctgggaaaaaattttttatgtcagggagtgggagtacatactacacatttgttacagaacttgagaaatcccaaattgaaacaagattaaaaacttttgttgataatgtaaagattattatatgtaaaacaataaactaa

SEQ ID NO: 2040 - protein, 294 aa, Fusobacterium nucleatum subsp
MRISLNKYKIFSNAKINIGLNVFQKESDGYHNIDSIMAPIDLSDEMDVTFYSDLGDLKIECSDKSIPTDERNILYKTYKIFFEESKKEKEKIDIILKKNIPSEAGLGGGSSNAGFFLKLLNKHYGNVYNEKELEKLAMRVGSDVPFFIKNKTARVGGKGNRVDLVENNLKDSIILIKPLDFGVSTKEAYESFDNLKEVKYADFDKIIKNLKEGNRIALESNIENSLEQGILETDTNIKMLKMTLNSVVSGKKFFMSGSGSTYYTFVTELEKSQIETRLKTFVDNVKIIICKTIN

SEQ ID NO: 2041 - DNA, 873 bp, Geobacillus kaustophilus
  CDS (1)..(873): transl_table=11
gtgaggttgtcgataaaagcgccggcgaaaatcaatttgtcactcgacgttctttataagcgcccggatggttaccatgaagtgaaaatggtgatgacgacgatcgatttggccgatcgcattgagcttgtcgcgttgccggaggaagatgcgatccgcatcgtttcgcaaaaccgctttgtgcccgatgattgccgcaacttggcgtatcaggcggcgaagcttcttaaagagacgttttcgatccgccaaggggtggccatttcgattacgaagcatattccggtggccgccggattggcgggaggaagcagcaatgcggcggcgacgctgcgcgggttgaacaagctttggcaactcggattgacgctcgatgaactggcagagctcggggcgaaaatcggatcagatgtcgctttttgcgtctacggcggaaccgccttggcgacggggcgcggggaaatcatcactccgatcccttcaccgccgccgtgctgggttgtgctggccaagcccccgatcggtgtatcgacggcggaagtgtaccgaaacttggaacttgagcgtgtcagccatccagacgtcgatgcgatggtgagagcgatcgagcggcaagattatgcggcgatctgccggttggtcggcaatgttcttgaggaagtgacgttgaaaaaatatccggaagtcgcgcatattaaagaacaaatgaagcggtttggcgctgatgcggtgctgatgagcggcagcgggccgaccgtgtttggactgatcgagcacgattcgagaatgcagcgggtatacaatgggttgcgcggcttttgtgaccaagtgtttgcggtgagaatgttaggagaacgacattctcttgattaa

SEQ ID NO: 2042 - protein, 290 aa, Geobacillus kaustophilus
MRLSIKAPAKINLSLDVLYKRPDGYHEVKMVMTTIDLADRIELVALPEEDAIRIVSQNRFVPDDCRNLAYQAAKLLKETFSIRQGVAISITKHIPVAAGLAGGSSNAAATLRGLNKLWQLGLTLDELAELGAKIGSDVAFCVYGGTALATGRGEIITPIPSPPPCWVVLAKPPIGVSTAEVYRNLELERVSHPDVDAMVRAIERQDYAAICRLVGNVLEEVTLKKYPEVAHIKEQMKRFGADAVLMSGSGPTVFGLIEHDSRMQRVYNGLRGFCDQVFAVRMLGERHSLD

SEQ ID NO: 2043 - DNA, 846 bp, Geobacter metallireducens
  CDS (1)..(846): transl_table=11
atgaaatccctgacgctcaaggcccccgccaaggtcaactaccggctcgacgtgctccgccgtcggcctgacggctaccacgacctccggatgatcatgcagcggatcgatctctgcgacgagattacgattactttgtccgacacttccggtgtccgggtcacctgtggccgcgaaggggtacccgacggtccggaaaacatcgcttggcgggccgccaacgcgcttctggctctctccgggctggaaacggggatcgatatcgccattaccaagaacatccccgttgctgccgggcttggcggcgggagcagcgacgcggccacggttcttctgggggtgaacgaacttctgggactcggcctctccatcgagcggctcatggaggtcggcgtgacgctgggtgccgacgtgccgttcttcgtcttcggcaagacggccttggccgaggggattggggaagtactcacggcaatagacgccgtcccacccctctggcttgtgatcgttaaccccaatattccggtgtcgactgcctgggtgtaccaaagtttacggttgacaggtgagtggaatggcgatactattcctcgcttctttaaggatgtagcggatgtctgtgccgtcctcgccaatgatctcgaattggtgaccatcgagcggtatccggtaatcggtgaaatcaaggagcgactggtcgccgcaggggctgctggggcacttatgtccggcagtggtcccacggttttcggacttttcgcttccgaggaggaggcacgtggcgcggcccagtccattaccaattcatccgactggttcgtagtggcagtcagggctttggtgtga

SEQ ID NO: 2044 - protein, 281 aa, Geobacter metallireducens
MKSLTLKAPAKVNYRLDVLRRRPDGYHDLRMIMQRIDLCDEITITLSDTSGVRVTCGREGVPDGPENIAWRAANALLALSGLETGIDIAITKNIPVAAGLGGGSSDAATVLLGVNELLGLGLSIERLMEVGVTLGADVPFFVFGKTALAEGIGEVLTAIDAVPPLWLVIVNPNIPVSTAWVYQSLRLTGEWNGDTIPRFFKDVADVCAVLANDLELVTIERYPVIGEIKERLVAAGAAGALMSGSGPTVFGLFASEEEARGAAQSITNSSDWFVVAVRALV

SEQ ID NO: 2045 - DNA, 840 bp, Geobacter sulfurreducens
  CDS (1)..(840): transl_table=11
gtgaagaagctgacgctcaaggccccggccaaggtcaattaccgcctcgacgttctgaggcggcgccccgacggctaccatgatttgcggatgatcatgcagcggatcgatctctgtgacgagatagagatctgcctcacggacgggcccggcattcgggtggtctgcggccgcgagggggtgcctgatgggcccggcaatattgcctggcgcgctgctgacgccctgctcgccctgtccgccgacaagcctggtattgatatctccataaccaagaagattccggtggcggccggcctgggaggcggaagcagtgacgcggcgacggtgctcatgggggtgaacgagctgctgggactggatctgcccgaaaagcgtctccgggagatcggcgtcaccctcggcgctgacgtgccgtttttcatcttcggccggacagccctggccgaagggatcggcgaggagctgaccgccatcgaccgagtgcccgccgcctggattgtggtggtcaatcccaatgttcccgtttcgacggcatgggtctatcaaaatttgcaattgacaggtgaggccgccagggttaaaattccccgtttcttcgagagtgtcgcggaggtctgcgcgattctctccaatgaccttgaatcggtcactatcccgcggtatccggttatcggcgagatcaagcgtgagcttctcgccgccggggcgctcggttccctcatgtcgggaagcgggccgacggtttttgcactcttcgaggaagaggacgcagccgttcgagccgccgagatgatgcgcgcgcggagttggttcgccgcagcggtcaggacaatctga

SEQ ID NO: 2046 - protein, 279 aa, Geobacter sulfurreducens
MKKLTLKAPAKVNYRLDVLRRRPDGYHDLRMIMQRIDLCDEIEICLTDGPGIRVVCGREGVPDGPGNIAWRAADALLALSADKPGIDISITKKIPVAAGLGGGSSDAATVLMGVNELLGLDLPEKRLREIGVTLGADVPFFIFGRTALAEGIGEELTAIDRVPAAWIVVVNPNVPVSTAWVYQNLQLTGEAARVKIPRFFESVAEVCAILSNDLESVTIPRYPVIGEIKRELLAAGALGSLMSGSGPTVFALFEEEDAAVRAAEMMRARSWFAAAVRTI

SEQ ID NO: 2047 - DNA, 909 bp, Gloeobacter violaceus
  CDS (1)..(909): transl_table=11
atgaagactgttcgcctgcgggccgccgccaagatcaatctctacctcgagatactcggggtacgccccgacaacttccacgaattggtgatggtgctgcagagcgttgatctggccgacaccgtcaccctgcgcgccgcgcccacgaccagggtgagttgctcccatccattggtgcccaacgaccgtaccaatctggcggtaagagcggtcgaagtgcttcagaagcacaccggcatcgacgaaggagtcgagattgtcatcgagaagcgcatcccggtagcgagcggtctggcgggcggctccaccgacgccgccgcagtgctggcggggctcaacgtgctttgggatctcggcttgacccagagacagctgcagtctctgggtgctcaaatcggctcggatattcccttttgtgtgacaggcggcaccgcccttgctatgggccggggtgaagtgctctcgcctctgccggccctgaagggggtctacttagtgctggccaaactcgccgatttgcaggtatccaccgcctgggcctaccagacctaccggcgcgagtatctgagcgagggtaccgcgccgcgcgcccgcaccagtgctctgctctcggcggtggccagccaggaggttgcccgcatcgcaccactgttgcacaacgacctggagcgcgccgtgctgcccgcctacccgcaggtgagcgcgctgcgcgaacacttggtgagcgccggggcactgggggcaatgatgtctggctccggcccggcggtgtttggccttgcaagggaccgcgcccacgccgaggctgtttgtgccgtccttgcgggtgaacccggactggaactgttcgtctgcaaaacccagcaggcgggcatcctgatggaagaatcggagtcctccgacttgtaa

SEQ ID NO: 2048 - protein, 302 aa, Gloeobacter violaceus
MKTVRLRAAAKINLYLEILGVRPDNFHELVMVLQSVDLADTVTLRAAPTTRVSCSHPLVPNDRTNLAVRAVEVLQKHTGIDEGVEIVIEKRIPVASGLAGGSTDAAAVLAGLNVLWDLGLTQRQLQSLGAQIGSDIPFCVTGGTALAMGRGEVLSPLPALKGVYLVLAKLADLQVSTAWAYQTYRREYLSEGTAPRARTSALLSAVASQEVARIAPLLHNDLERAVLPAYPQVSALREHLVSAGALGAMMSGSGPAVFGLARDRAHAEAVCAVLAGEPGLELFVCKTQQAGILMEESESSDL

SEQ ID NO: 2049 - DNA, 930 bp, Gluconobacter oxydans
  CDS (1)..(930): transl_table=11
atgacctttccagacacgacttcttccgccgctcctcaggccaccgcgcacgccaagatcaacctgttcctgcacatcaccggccgccgcgatgacggctatcacctgctcgacagtcttgccgtgttcgcaggcgctgcagaccgcgttacccttactgctccaagcaacaccatgtcgctgacgatcgacggaccgttcggacagggccttgaagcggacgaccagaatctcgtgctccgtgccgcccgcgcccttcaggcccaggctggcaccacgattggcgggctgactgaatcctttcatctggaactgcaaaagaacctgcccgtctcatccgggatcggtggcgggtcggctgactccgccgcaacgctgcgtctgctggcgcgggaatggaatgtcgatcaggcagccctctttccgatcgccgagacactgggggcggatgttcccgtctgcgttgcccagcgcccgacacggatgcagggcatcggggaaatcctcgcccccgctcctgtcctgccagatgcaggtctcctgctggtcaatccgggcgtcggtgtctcgacaccggacgttttccgggccttcgcggcaggaggcggtattgttgagcgtcccgagccgtttctgcctgaccgctggaacacggcgcaggacatggtggccgacctaaacgccaccacgaacgatcttcaggccccggctctgtcacaatgccctgtcatcggcacggtcctggcctcgatcgagagcctgccaggctgcctgctcagccgcatgagcggttcgggtgccacctgtttcggcattttctccagtcccgaaagcgctgttgccgcagcccacgtcctgaatgcacagagcgcacgtctgggttggtggacatgggcgggcggcttccaccacactggggcttccacctga

SEQ ID NO: 2050 - protein, 309 aa, Gluconobacter oxydans
MTFPDTTSSAAPQATAHAKINLFLHITGRRDDGYHLLDSLAVFAGAADRVTLTAPSNTMSLTIDGPFGQGLEADDQNLVLRAARALQAQAGTTIGGLTESFHLELQKNLPVSSGIGGGSADSAATLRLLAREWNVDQAALFPIAETLGADVPVCVAQRPTRMQGIGEILAPAPVLPDAGLLLVNPGVGVSTPDVFRAFAAGGGIVERPEPFLPDRWNTAQDMVADLNATTNDLQAPALSQCPVIGTVLASIESLPGCLLSRMSGSGATCFGIFSSPESAVAAAHVLNAQSARLGWWTWAGGFHHTGAST

SEQ ID NO: 2051 - DNA, 849 bp, Haemophilus ducreyi
  CDS (1)..(849): transl_table=11
atgaacagaataattttacctagtcccgctaaattgaatctttttttatatataaatggacgaagagcagatggatatcatcaactacaaacgctttttcaatttctagatgttggtgatgaaatagacataagtataacaacgtcaaattccacaattgagttagtcaatgatattgcaggtgttgcgacagaagataatttaatttatcgtgcggctaaattattacagaaaaagactgcttgtcagcaaggcgctaagattgcagtagctaaacatttaccgatgggcggtggcgttggcggtggttcttctaatgcggctacagtattggttggacttaattatttatggcagacagggctttcattagcacaattggcggaattaggtttatctttaggggcggatgtgccgatttttgtggcaggtaagacagcttttgcagaaggtatcggtgagattctgacgccttgcgaattaccagaaaaatggtatctagtattaaaaccaaatatttcaattgaaacgtcttcgatttttaaagatccgaagttaccacgcaatacacccgagcgtagcttgtcagcattattagcagaagattggggaaacgattgcgaaaaagttgtgagggaacattattcagaggttgaagatcttattcaagaattgttacaatatgcaccgtttcgcttgacgggtacaggtgcttgtatttttgctgaatttgcttcgaaagcagaagctgaaaaagtctttaattgtagacctcataatatgtacggttttgttgcaaaagggcaaaatatttctccgttacataaaaaattaaacttattttcttaa

SEQ ID NO: 2052 - protein, 282 aa, Haemophilus ducreyi
MNRIILPSPAKLNLFLYINGRRADGYHQLQTLFQFLDVGDEIDISITTSNSTIELVNDIAGVATEDNLIYRAAKLLQKKTACQQGAKIAVAKHLPMGGGVGGGSSNAATVLVGLNYLWQTGLSLAQLAELGLSLGADVPIFVAGKTAFAEGIGEILTPCELPEKWYLVLKPNISIETSSIFKDPKLPRNTPERSLSALLAEDWGNDCEKVVREHYSEVEDLIQELLQYAPFRLTGTGACIFAEFASKAEAEKVFNCRPHNMYGFVAKGQNISPLHKKLNLFS

SEQ ID NO: 2053 - DNA, 954 bp, Haemophilus influenzae
  CDS (13)..(954): transl_table=11
atgaatacattaatgaaatcacatcaattttctaccgcactttgccaaaatacaacacaatcaaatgggcagccattacgcttccctagccctgccaaactgaatttatttctttatatcaatggaaaattgccgaacggctatcatgaattacaaacgcttttccaatttttagattttggcgattggttagacattagtattcgggaacaagataatcaaattgttttaacgccagaaattccaaatctaaaaacggaaaataatctaatttatcgagctgcaaaacttttacaagaaaaagccaatattcaattgggtgcaaatattcatttagataaaattcttccaatgggaggcggtgttggtggcggttcatccaatgcagcaaccgcattagtctctttaaattatttatggcaagccaatttatccattgatgaactggcaaaattgggattaacattaggcgcggatgtgccaatatttgtatacggacaggctgcttttgctgaaggcgttggggaaaaaatcacttattgtgaacctgccgagaaatggtttgttatattaaaacccgatgattcaatatcgacggctgtcatctttcaagatccaaatttaccacgtaatacaccgaaaaaatccctcgaacaacttttgagtgaaccttataaaaacgattgcgaaaaagttgtgataaatcattattcaaacgttgaaaaagcgttaaactggttgctacaatatgcgccggcaagattaacaggaacgggagcctgtgtttttgctgaatttgatcatgaagcagaagcgcaagcggtatttagacaaaaaccagaagcattttttggtttcgtcgctaaaggactcaatgtgtctcccttgcacgcaatgttgaagcagctatcatcaactcatactcatcgacaatctaaacctgaggttttataa

SEQ ID NO: 2054 - protein, 313 aa, Haemophilus influenzae
MKSHQFSTALCQNTTQSNGQPLRFPSPAKLNLFLYINGKLPNGYHELQTLFQFLDFGDWLDISIREQDNQIVLTPEIPNLKTENNLIYRAAKLLQEKANIQLGANIHLDKILPMGGGVGGGSSNAATALVSLNYLWQANLSIDELAKLGLTLGADVPIFVYGQAAFAEGVGEKITYCEPAEKWFVILKPDDSISTAVIFQDPNLPRNTPKKSLEQLLSEPYKNDCEKVVINHYSNVEKALNWLLQYAPARLTGTGACVFAEFDHEAEAQAVFRQKPEAFFGFVAKGLNVSPLHAMLKQLSSTHTHRQSKPEVL

SEQ ID NO: 2055 - DNA, 942 bp, Haemophilus influenzae
  CDS (1)..(942): transl_table=11
atgaaatcacatcaattttctaccgcactttgccaaaatacaacagaatcaaatgggcagccattacgcttccctagcccagccaaactgaatttatttctttatatcaatggaaaatttccgaacggctatcatgaattacaaacgcttttccaatttttagattttggcgattggttagacattagtattcgggaacaagataatcaaattgttttaacgccagaaattccaaatctaaaaacggaaaataatctaatttatcgagccgcaaaacttttacaagaaaaagccaatattcaattgggtgcaaatattcatttagataaaattcttccaatgggaggcggtgttggtggtggttcatccaatgcagcaaccgcattagtctctttaaattatttatggcaagccaatttatccattgatgaactagcaaaattgggattaacattaggcgcagatgtgccaatatttgtacatggacacgcagcttttgctgaaggcgtcggggaaaaaatcacttattgtgaacctgccgaaaaatggtttgttatattaaaacccgatgattcaatatcgacggctgtgatatttcaagatccaaatttaccacgtaatacaccgaaaaaatccctcgcacaacttttgagtgaaccttataaaaacgattgcgaaaaagttgtgataaatcattattcaaacgttgaaaaagcgttaaactggttgctacaatatgcgccggcaagattaacaggaacgggagcctgtgtttttgctgaatttgatcatgaagcagaagcgcaagcggtatttagacaaaaaccagaagcattttttggtttcgtcgctaaaggactcaatgtgtctcccttgcacgcaatgttgaagcagctatcatcaactcatactcatagacaatctaaacctgaggttttataa

SEQ ID NO: 2056 - protein, 313 aa, Haemophilus influenzae
MKSHQFSTALCQNTTESNGQPLRFPSPAKLNLFLYINGKFPNGYHELQTLFQFLDFGDWLDISIREQDNQIVLTPEIPNLKTENNLIYRAAKLLQEKANIQLGANIHLDKILPMGGGVGGGSSNAATALVSLNYLWQANLSIDELAKLGLTLGADVPIFVHGHAAFAEGVGEKITYCEPAEKWFVILKPDDSISTAVIFQDPNLPRNTPKKSLAQLLSEPYKNDCEKVVINHYSNVEKALNWLLQYAPARLTGTGACVFAEFDHEAEAQAVFRQKPEAFFGFVAKGLNVSPLHAMLKQLSSTHTHRQSKPEVL

SEQ ID NO: 2057 - DNA, 825 bp, Helicobacter pylori J99
  CDS (1)..(825): transl_table=11
ttgacgcatgtttttgaggtttatcctaaagtcaatgtttttttaaaaatccttcacaaagaaggggcttatcataagattatttctcgcatgtgtttagtcaaaaataagctaaaagacattatcagcgttaaaaacgccttatctttctcattaaaaggggattttgactgccctttagaagaaaactcgctctttaaggctctccaagttttaaaaaaatttttagtgcaaaaaaatttttctcattctgtcatcaaatccctagacaccctagcgattgaagtggaaaaaaatatccccactcaagctgggttaggcggtgggagtgctgatgctggggggctattgtatcatttaaatcaaatgtttgattggcgtttgagtttaaaagagctttatactatgggatctttagtgggcgcggacaccaattttttcatctcgcaatacaaaagcgctaacgccacttcttatggcgaagtcattgaaaattttgaagaagagtctttagaagatcgcctagaaatctatgcgccaaatcatgttttttgcagcaccaaagccgtttatcaagcttataagcctgaaacttgcttttttcaagctaaagagtggcttaaaaaaacgagtttggaatgcctaaagacttatgacagaaacgaactaaacgatcttttaaagccggctttacgcactaaccctgccctcaaagatatagaaagccaactcagtaaggagtggttttttagcgggagcgggagtgcgttttttaggctaaaaaatactcaaaagggagcgaatgaaactcattgccagcaataa

SEQ ID NO: 2058 - protein, 274 aa, Helicobacter pylori J99
MTHVFEVYPKVNVFLKILHKEGAYHKIISRMCLVKNKLKDIISVKNALSFSLKGDFDCPLEENSLFKALQVLKKFLVQKNFSHSVIKSLDTLAIEVEKNIPTQAGLGGGSADAGGLLYHLNQMFDWRLSLKELYTMGSLVGADTNFFISQYKSANATSYGEVIENFEEESLEDRLEIYAPNHVFCSTKAVYQAYKPETCFFQAKEWLKKTSLECLKTYDRNELNDLLKPALRTNPALKDIESQLSKEWFFSGSGSAFFRLKNTQKGANETHCQQ

SEQ ID NO: 2059 - DNA, 807 bp, Helicobacter pylori
  CDS (1)..(807): transl_table=11
ttgacgcatgtttttgaagtttatcctaaagtcaatatttttttaaaaatccttcacaaagaaggggcttaccacaagcttatttctcgcatgtgtttggtcaaagacaagctcaaagacattatcagcgtcaaaagcgcgctttctttttcgttaaaaggggattttgactgccctttagaagaaaactcgctctttaaagccctccaaattttaaagaattttttaaaatcaaaaaatttctctcattctgtcatcaaatccctagacaccctagcgattgaagtggaaaaaaacatccccactcaagccggattaggcggtgggagcactgatgctggggggctattgtatcatttaaatcagatttttgactggcgtttgagtttagaagagctttatagcatgggatctttagtgggcgcggacaccaattttttcatctcgcaatacaaaagcactaacgccacttcttatggcgaagtcattgaaaattttgaagaagagcctttagaaaatcgcctagaaatctatgcaccaaatcatgttttttgcagcaccaaagccgtttatcaagcttataagcctgaaacttgtttttctcaagctaaagaatggcttaaaaagccgagtttggaatgcctaaaaacttatgatagaaacggattaaacgaccttttaaagccggctttactcactaaccaagccttaaaagatatagaaagcgaactaggcaaggagtggttttttagcgggagcgggagcgcgttttttaggctaaagcctatgcaaaaagggggcgaatga

SEQ ID NO: 2060 - protein, 268 aa, Helicobacter pylori
MTHVFEVYPKVNIFLKILHKEGAYHKLISRMCLVKDKLKDIISVKSALSFSLKGDFDCPLEENSLFKALQILKNFLKSKNFSHSVIKSLDTLAIEVEKNIPTQAGLGGGSTDAGGLLYHLNQIFDWRLSLEELYSMGSLVGADTNFFISQYKSTNATSYGEVIENFEEEPLENRLEIYAPNHVFCSTKAVYQAYKPETCFSQAKEWLKKPSLECLKTYDRNGLNDLLKPALLTNQALKDIESELGKEWFFSGSGSAFFRLKPMQKGGE

SEQ ID NO: 2061 - DNA, 861 bp, Idiomarina loihiensis
  CDS (1)..(861): transl_table=11
atggcagtaaacatcttaacgctcccagctccggcgaaactcaacctatttttgcatattatcgggcgccgctccgacgggtaccacaatttacagactgtttttcagtttctggactacgccgacactctgaaattctataccgccgccgacgacaagtttgatttaattgaccacgatagccacattccccgcgacgagaatttagtctggaaggcgttaacagcgctaagaaaaacatacgaagaaaaaggcattacgcaacttcctggctgctcgattgaattaattaagagacttcctcagggtgccgggctaggtggtggttcatctaatgcggcaaccgcactggtggggctgaatcagctttggggtagccatttaaatagcactgaattacaggcaataggtcgcaaactcggtgccgatgtgcctgtgtttattcatggacatgcttgttttgctgaaggtatcggcgatgtgttcactaatataacaccgcctactccgtggtatttagtggttaaacccaatgtttctatcagtacggctgcgttgttctctcaccctaagctagaacgcaactgctcgccggttaccgcggacaactggcaacagcaaaaagtcgcgaatgtgtttgaaccagtggtctgcgatctacacaccgaagttgctatgttacgccgtgccttgctagaatacgccccgactcggctcactggcagtggagcatgtcttttttcaacattcgaaacaagacaagccgcaaaggaagcgcaacagcaggttcccaaagaactttgctcatttatcgctcaaggccagaaccgttcaccacttatccagacattaacccaataa

SEQ ID NO: 2062 - protein, 286 aa, Idiomarina loihiensis
MAVNILTLPAPAKLNLFLHIIGRRSDGYHNLQTVFQFLDYADTLKFYTAADDKFDLIDHDSHIPRDENLVWKALTALRKTYEEKGITQLPGCSIELIKRLPQGAGLGGGSSNAATALVGLNQLWGSHLNSTELQAIGRKLGADVPVFIHGHACFAEGIGDVFTNITPPTPWYLVVKPNVSISTAALFSHPKLERNCSPVTADNWQQQKVANVFEPVVCDLHTEVAMLRRALLEYAPTRLTGSGACLFSTFETRQAAKEAQQQVPKELCSFIAQGQNRSPLIQTLTQ

SEQ ID NO: 2063 - DNA, 867 bp, Lactobacillus plantarum
  CDS (1)..(867): transl_table=11
gtgcagatcgttgaaaaagcaccggccaaaatcaatttaggactggataccttatttgaacatccaaatggggataaagagtgggacatggtgatgacgtcggtcgatctggccgactatgtcatgttagaatcattgcatacgaaccgaatcgaagtggtcaccgatagtggctttttgccgaatgatcgccgtaacttagcttttcaagcggtgagcgttttaaaacggtattgtcatgttgatcggggtgtccgtatcaaaataagaaaggccattccggtagcggctggtctaggaggcggctcatctgatgccgccgctgttttacggggcttgaaccggatgtggaatctccacttggacttagccacgttagcacgtttgggattgcaagtagattcggatgtgccatactgtgtctacagtcagacggcccacgtgacgggaaaaggcgatgtggttaccccactgcctaagttgccgccgatgtggattattctagcgaagccgaaagtcagtgtgtcaacgccaaatattttgcggcaggtcaattacgagcgcatcgaccagcatcccaatattgaggccttgttggctggtattcaacagcaggatttcgcggagatttttgcgaatatgggcaacgttttagagccaatcacggcaaaacgctaccccgagattttacagatcaagcggcaattgttaacgtttggggcggatgcggcccagatgagcggcaccggaccaactgtgttcggtgtgtgtcgcaaacaatcgcgggcgcaacgcgtgtataattccttgaagggtttttgtcgggaagtataccttgtgcggccggttaatttaaatgaacattag

SEQ ID NO: 2064 - protein, 288 aa, Lactobacillus plantarum
MQIVEKAPAKINLGLDTLFEHPNGDKEWDMVMTSVDLADYVMLESLHTNRIEVVTDSGFLPNDRRNLAFQAVSVLKRYCHVDRGVRIKIRKAIPVAAGLGGGSSDAAAVLRGLNRMWNLHLDLATLARLGLQVDSDVPYCVYSQTAHVTGKGDVVTPLPKLPPMWIILAKPKVSVSTPNILRQVNYERIDQHPNIEALLAGIQQQDFAEIFANMGNVLEPITAKRYPEILQIKRQLLTFGADAAQMSGTGPTVFGVCRKQSRAQRVYNSLKGFCREVYLVRPVNLNEH

SEQ ID NO: 2065 - DNA, 921 bp, Leifsonia xyli subsp
  CDS (1)..(921): transl_table=11
gtggatgcggtgcatgttcgcgcacccggcaaggtcaatgtcttcatgcgcgtcggcccgctccgccacgatggctaccacgatgtcgcgaccgcctatcaggcgctctcgctctacgaggatgtgcgcgcgtatcccgccgatgacatctcggtgaccttcgccggcggcagcgtcgacacgtcggcgctcccgacggacggcacgaatctggctgtcaaggccgcgaaactgctcgccaagcgcaccgggttcactggtggcgtgcgcctggagatcgacaagcgcgtcccgatcgccggggggatgggcggcggttcggcggacgccgcggccactctcgtcgcctgtgatgcgctgtggggcaccgagctcggacgggaggagctgctcgcgctggctgcgcggctcggcgcggatgtcccgttcgcgctcgtgggcggcaccgcgatcggcaccggtcgcggtgaccggctgagcccggcgctggcgaccggccagttccactgggtgctcgcgttcgcggagggccagctcagcacaccgactgtctacagcgagctcgatcggcaccgtgagcggcacgcgagtgagatcccgcccgcgcagcgcgcacccggcgtcgacgccggggtgctgcaggcgcttcgcgcgggggatgcggcgatgctcgcggaggtgctgtcgaacgacttgcaggccccggccatccacctggctccgtccatcgccgaggtgctcgaactcggcgagctgaacggcgctctcgcggggatcgtgtcgggttccggtcccactgtcgccttcctcgccgcggatctcgacaacgcgctggacgtgcagatcgcgctcagcgcggcccgcgtgcgagtggtccgggcgaccggcccggttcacggcgcccgggtcctctcggactga

SEQ ID NO: 2066 - protein, 306 aa, Leifsonia xyli subsp
MDAVHVRAPGKVNVFMRVGPLRHDGYHDVATAYQALSLYEDVRAYPADDISVTFAGGSVDTSALPTDGTNLAVKAAKLLAKRTGFTGGVRLEIDKRVPIAGGMGGGSADAAATLVACDALWGTELGREELLALAARLGADVPFALVGGTAIGTGRGDRLSPALATGQFHWVLAFAEGQLSTPTVYSELDRHRERHASEIPPAQRAPGVDAGVLQALRAGDAAMLAEVLSNDLQAPAIHLAPSIAEVLELGELNGALAGIVSGSGPTVAFLAADLDNALDVQIALSAARVRVVRATGPVHGARVLSD

SEQ ID NO: 2067 - DNA, 894 bp, Leptospira interrogans
  CDS (1)..(894): transl_table=11
ttgatttctcctgctaagattaatcttggattggaaattccatttaaacgtcttgatgggtttcacgaaattcgaagtgtatttttaaaaatttcttggggtgatgatatagaaatagaacctgcgtctaacggggtttttgaacttttttccaataacgaaattatattagaaaaacgtaaactatatgatcaggtttccgaaagaggtgatattaaaaataatattctttataaaacttttataaaggcgagatctctttttccagaacttccgggtgtgaaaattcatcttacaaaacggatttctccggcaggtggtcttggaggaggaagtacaaacgcggcttctttattaaactttcttttttcttggcgtcctttttttacttccgatgaaatgttcgttcttgctgctgaaattggttccgatgttcctttttttttaggagaaggacatgccttcgttactgggaagggagaaattttagaagaaatagaagttcatcatggacaaggaattcttgcgttaactccgcaggtgatgaatacatcggaaatgtactccttattgaaaaaacctttacaagagagcgcttctcagaaaaatggaaacactctgtcgaaaaatctaatttctatactaaaaaatggagattggagctctcttcagggtaggctctggaatgattttgagccggttgccttccaacttcatccggaattgggagttctcaaggacaaatttctggagtttggatccagttattgttctttgaccggttcgggttcgagtatgtacgggctggtgcagggtctcgagatccaagaagaactgttacaaaggcttaggcaggaattctcaaatctcacattcgtacgatttaacttttag

SEQ ID NO: 2068 - protein, 297 aa, Leptospira interrogans
MISPAKINLGLEIPFKRLDGFHEIRSVFLKISWGDDIEIEPASNGVFELFSNNEIILEKRKLYDQVSERGDIKNNILYKTFIKARSLFPELPGVKIHLTKRISPAGGLGGGSTNAASLLNFLFSWRPFFTSDEMFVLAAEIGSDVPFFLGEGHAFVTGKGEILEEIEVHHGQGILALTPQVMNTSEMYSLLKKPLQESASQKNGNTLSKNLISILKNGDWSSLQGRLWNDFEPVAFQLHPELGVLKDKFLEFGSSYCSLTGSGSSMYGLVQGLEIQEELLQRLRQEFSNLTFVRFNF

SEQ ID NO: 2069 - DNA, 876 bp, Listeria innocua
  CDS (1)..(876): transl_table=11
atgaaaataagcataacagcaccagctaaaattaatctttcgcttgatgcgctatacaaacgtgaagatggctatcatgaagtggaaatggtgatgacaacaatagatcttgctgacagattattcttagaacgcttagacgaggataagattgtgctagatgtaaaagcgcattttattccggaagatcgtcgtaatttgatttatcaagcggctctcctcttaaaaaatcgttttaacataaaaatgggagtgcgcatcacaattgataagcacattccagtttcagcgggattagctggtgggagttcggatgctgctgctgcgctcaaaggtttaaatatcatttgggagctcggtctttcgatagaagaattagcagaaataagttccgaaatcggctctgacatagctttttgcgtatatggtggaactgctcttgcgactggacgtggagaaaaaatctctgcattgcctaatatgcctggttgttggatagtactagctaaacctagcattagcgtgtcgacaccaacgatttataaagaattacaagtagataatgtagaacaccctaacacagaaaaaatgattgaatctatcaaaaatggtgatttagacggaatttttgcttcaacaggaaacgtattagagtctgtaacgctagaaaaaaatccacaagttaagcgaattaaggaccggatgttagcatttggtgctgaggcggctctaatgagtggtagcggcccgacagtgtttgcgctcatcaaacagtattcaagagcgaaacgtgtctataatggcttgcgtggcttttgtgaggaagtttatatggttagaccgtggagtgaaagcgaaaacgatacgattaattaa

SEQ ID NO: 2070 - protein, 291 aa, Listeria innocua
MKISITAPAKINLSLDALYKREDGYHEVEMVMTTIDLADRLFLERLDEDKIVLDVKAHFIPEDRRNLIYQAALLLKNRFNIKMGVRITIDKHIPVSAGLAGGSSDAAAALKGLNIIWELGLSIEELAEISSEIGSDIAFCVYGGTALATGRGEKISALPNMPGCWIVLAKPSISVSTPTIYKELQVDNVEHPNTEKMIESIKNGDLDGIFASTGNVLESVTLEKNPQVKRIKDRMLAFGAEAALMSGSGPTVFALIKQYSRAKRVYNGLRGFCEEVYMVRPWSESENDTIN

SEQ ID NO: 2071 - DNA, 882 bp, Listeria monocytogenes
  CDS (1)..(882): transl_table=11
atgaaaataagcattacagcaccagctaaaattaatctttcacttgatgcgctgtacaaacgtgaggatggctatcatgaagtggaaatggtgatgacaacaatcgaccttgctgatagattatacttagaacgcttagacgaagacaaaattgtgctggatgtaaaagcgcactttattccagaagatcgtcgcaatttaatttatcaagcggccctccttttaaagaagcgttttgacgtaaagatgggtgtgcgcattacaattgataagcatattcctgtttctgcgggacttgctggtggtagttcagatgcagctgcagcgctcaaaggattaaatgtcatttgggaacttggtctttcaatagaagaattagccgaaattagttcagaaattggttctgatatcgctttttgcgtatacggcggaacagcgctagcaactggacgcggggagaaaatttctgcgttacctaatattcctggttgttggattgtacttgctaagccgagcattagcgtgtcaacacccactatctataaagaacttcaagtagacaatgtagaacacccagacacacaaaaaatgattgaatccatcaaaaatggtgatctagacgggatttttgcggctacagggaatgtgctagagtctgtgacattagaaaaaaatccgcaagttaaacgaataaaagatcggatgttagcgtttggtgctgaggcggctctaatgagtggtagcggtccgacagtgtttgcgcttatcaaacagtactccagagcaaaacgtgtctataacggcttgcgtggcttttgtgaggaagtttatatggttagaccatggagtgaaggcgagaacgatacaaatataaattattaa

SEQ ID NO: 2072 - protein, 293 aa, Listeria monocytogenes
MKISITAPAKINLSLDALYKREDGYHEVEMVMTTIDLADRLYLERLDEDKIVLDVKAHFIPEDRRNLIYQAALLLKKRFDVKMGVRITIDKHIPVSAGLAGGSSDAAAALKGLNVIWELGLSIEELAEISSEIGSDIAFCVYGGTALATGRGEKISALPNIPGCWIVLAKPSISVSTPTIYKELQVDNVEHPDTQKMIESIKNGDLDGIFAATGNVLESVTLEKNPQVKRIKDRMLAFGAEAALMSGSGPTVFALIKQYSRAKRVYNGLRGFCEEVYMVRPWSEGENDTNINY

SEQ ID NO: 2073 - DNA, 909 bp, Mannheimia succiniciproducens
  CDS (1)..(909): transl_table=11
atgaaaactcatcaattttctaccgcacttttttccgattataagcaaggggatagctttaatttcccttgccctgcgaaattaaatctatttttatatatcaacgggcggcgcaccgacggttaccatgaactgcaaaccttattccagtttttagattatggcgattggctctcaattaaagtccgcaatgacggtaaaatccgtctcacccctgaaattcccgatttaaaaaccgaagataatttaatttatcgggcggcaaaattattacaacaaaaaacggcttgccggttaggtgcggatctgcatttagacaaagtgttgcctatgggcggcggcgttggcggcggttcatccaatgcggcaacggcattggttgcgttaaactatctctggaaaaccggcttatctgttaacgagcttgccgaattaggcttaaaactcggtgcggacgtacctattttcgtccacggtaaagccgcttttgccgaaggtgtcggtgaaaaaatcacctattgtgagcctcctgaaaaatggtatgcggtaattaaaccgaatgtatctatttccaccgccaaagttttttccgaacctgatttaacccgtgacaccaagaaaaaaccgcttgagcaattactacaacaagaatatacaaacgattgcgaaaaagttgtgagaaaactttatccggaggttgaagaactgctccgctggttggtaaaatacgcaccatcaagattgacggggagcggtgcttgcgtatttgctgaatttgctgatgaacaatcggcgcaaaccgtatttaatttaaaatctaaacagttttccggttttgttgcgcaaggattaaacgtttctccattacataaaatgttggaacaattaaaccgacagaatcacggttaa

SEQ ID NO: 2074 - protein, 302 aa, Mannheimia succiniciproducens
MKTHQFSTALFSDYKQGDSFNFPCPAKLNLFLYINGRRTDGYHELQTLFQFLDYGDWLSIKVRNDGKIRLTPEIPDLKTEDNLIYRAAKLLQQKTACRLGADLHLDKVLPMGGGVGGGSSNAATALVALNYLWKTGLSVNELAELGLKLGADVPIFVHGKAAFAEGVGEKITYCEPPEKWYAVIKPNVSISTAKVFSEPDLTRDTKKKPLEQLLQQEYTNDCEKVVRKLYPEVEELLRWLVKYAPSRLTGSGACVFAEFADEQSAQTVFNLKSKQFSGFVAQGLNVSPLHKMLEQLNRQNHG

SEQ ID NO: 2075 - DNA, 1218 bp, Mentha piperita
  CDS (1)..(1218)
atggcttcctcctcccatttcctctacagtcaccaccatagctacgcttcttacaattcgaagtcacatttcaattccttcaccaacgccacttttcctcaattctcttcgtttaagcctaatgggtcgtcgtcttttcgcaaaaagcttcagtcttcaagaatccatatcatcagagccgcggcttctgatcccacaactggcagaaatcaactcgaggtggtatatgatcttgagaataaattaaacaaattagctgatgaagtggatagggaggctgggatttcaagactcactcttttttcgccttgcaagattaatgttttcttaagaataactggcaagagagaagatggattccatgatttggcgtcactttttcatgttatcagcctaggagataaaataaagttctcgttgtcaccatcaaagttcaacggatcgtttgtcaccaatgtccccggagttcctcttgatgaaaaaaatttgataataaaggctctcaatctttttaggaaaaagacagggactgacaagcacttttggattcatcttgataagaaggttccgactggagctgggcttgggggtggcagtagcaatgctgctactgctttatgggcagcaaatcagttcagtggctgcattgcaactgaaaaggatcttcaagaatggtctggagaaattggctctgatatcccgttctttttctctcatggagctgcatattgtacgggtagaggagaggttgtagaagacattccaccacctgtacctcgtgatctttctatggttctcatgaagccacaagaggcatgtcccactggtgaagtttacaagcgtctccggttagaccaaacgagcgacattgatccattggtgttgctagagaagatatcgaagggtggaatctctcaggacgtttgcgttaatgatcttgaacctcctgcttttgaagtggtcccgtcactaaaaagacttaaacagcgcatagccgcagcaggtagaagccagtatgatgctgtcttcatgtccggaagtgggagcactattgtgggtgtgggttctccagatccacctcagtttgtgtacgatggcgatgagtacaaaaatatttttttctcagaggccaaattcatcacgcgctctgctaatcagtggtactcggagcctctctcgacagacgaatcaccgtcttttcctcaggatgctgaatga

SEQ ID NO: 2076 - protein, 405 aa, Mentha piperita
MASSSHFLYSHHHSYASYNSKSHFNSFTNATFPQFSSFKPNGSSSFRKKLQSSRIHIIRAAASDPTTGRNQLEVVYDLENKLNKLADEVDREAGISRLTLFSPCKINVFLRITGKREDGFHDLASLFHVISLGDKIKFSLSPSKFNGSFVTNVPGVPLDEKNLIIKALNLFRKKTGTDKHFWIHLDKKVPTGAGLGGGSSNAATALWAANQFSGCIATEKDLQEWSGEIGSDIPFFFSHGAAYCTGRGEVVEDIPPPVPRDLSMVLMKPQEACPTGEVYKRLRLDQTSDIDPLVLLEKISKGGISQDVCVNDLEPPAFEVVPSLKRLKQRIAAAGRSQYDAVFMSGSGSTIVGVGSPDPPQFVYDGDEYKNIFFSEAKFITRSANQWYSEPLSTDESPSFPQDAE

SEQ ID NO: 2077 - DNA, 876 bp, Methylococcus capsulatus
  CDS (1)..(876): transl_table=11
atggaccgtcgggaatcctccgtcatgaagtcgccttctctgcgtttgccggcaccggccaagctcaatctaacccttcgtatcacgggtcgccgtcccgacggataccatgatctgcagacggtgttccaattcgtggacgtgtgcgactggctcgaattccgcgccgatgcctccggcgaaatccgcttgcagacttcactggcgggcgtgccggcggaacggaatctgatcgtccgtgccgcccgcctgctcaaggaatatgcaggcgtggccgccggggccgacatcgtcttggagaaaaacctaccgatggggggcggtctgggcggcggaagctcgaatgcggcgaccacgctggtggcgctgaaccgcttgtgggatctgggtctggaccggcaaacgctgatgaatctcggtctccgcctcggagcggacgtgccgatcttcgtgttcggcgagggcgcctgggcggaaggtgtgggcgaaaggttgcaagtcctggaactgcccgagccgtggtacgtcatcgttgtgccgccatgccatgtttcgacggccgagatattcaacgcccctgatttgacaagagataacgacccgatcacaatagcggacttccttgcgggatcccatcagaatcattgcctggacgccgtcgtgcgtcgatatcccgtggtgggcgaggcgatgtgcgtgttggggcgatactcccgggatgtccggctaacgggtacgggtgcctgcgtatattcggtccacggtagcgaggaagaagccaaggccgcatgcgacgatctgtcccgcgattgggtcgcgatagtggcgtccggccgcaacctgtcgcctctgtacgaggcgctgaacgaacgatag

SEQ ID NO: 2078 - protein, 291 aa, Methylococcus capsulatus
MDRRESSVMKSPSLRLPAPAKLNLTLRITGRRPDGYHDLQTVFQFVDVCDWLEFRADASGEIRLQTSLAGVPAERNLIVRAARLLKEYAGVAAGADIVLEKNLPMGGGLGGGSSNAATTLVALNRLWDLGLDRQTLMNLGLRLGADVPIFVFGEGAWAEGVGERLQVLELPEPWYVIVVPPCHVSTAEIFNAPDLTRDNDPITIADFLAGSHQNHCLDAVVRRYPVVGEAMCVLGRYSRDVRLTGTGACVYSVHGSEEEAKAACDDLSRDWVAIVASGRNLSPLYEALNER

SEQ ID NO: 2079 - DNA, 858 bp, Moorella thermoacetica
  CDS (1)..(858): transl_table=11
ttggatgtcctcaccttgccggcctatggtaaaataaatctgactttaaaggtcctcgggcggcgttccgacggttatcacaacctgagcaccatcttccagtcaattgccctggcggatagactcactttcagccgttgccgggaaggaatacgcctggaaacctcagggctgccggtaccgcaaggaccggaaaacctggcctaccgggcagcagcccggttgcagtcccgttacggttttcccggggtgcggataaccctgaagaagcaaatccccctggcagccggcctggccgggggcagcgctgatgctgcggctaccctgataggtgtgaatgccctttttaacctgggcctgacccccggccagctggcccgggaaggggcggccctggggtcggacgtccctttttgcgttattggtggtacggccttaggacgggggcggggggaagaactctcccttttacctcccctcccgacactatggctggtactggtaaaaccgtccttcggggtcagtacggcagccgtataccggggttgggatgccagccccggccaaacccccatggaggcccccgacgaggaaagggccctggcggccattaggcggggcgaccgggcaggaattatggcatccctgggtaatgacctggaagcagtcacctgccgcctgtacccggaagttatggccattaagatgcgtctcctggccgaaggggcagagcgggcggtgatgtgcggcagcggcccggcggtcttcggggtggctgccgatggagaaaccgccaggcgcatcgcctcccggttacaggagacttaccccgaaactatagtcacccggaccttatga

SEQ ID NO: 2080 - protein, 285 aa, Moorella thermoacetica
MDVLTLPAYGKINLTLKVLGRRSDGYHNLSTIFQSIALADRLTFSRCREGIRLETSGLPVPQGPENLAYRAAARLQSRYGFPGVRITLKKQIPLAAGLAGGSADAAATLIGVNALFNLGLTPGQLAREGAALGSDVPFCVIGGTALGRGRGEELSLLPPLPTLWLVLVKPSFGVSTAAVYRGWDASPGQTPMEAPDEERALAAIRRGDRAGIMASLGNDLEAVTCRLYPEVMAIKMRLLAEGAERAVMCGSGPAVFGVAADGETARRIASRLQETYPETIVTRTL

SEQ ID NO: 2081 - DNA, 921 bp, Mycobacterium bovis
  CDS (1)..(921): transl_table=11
gtgcccaccgggtcggtcaccgttcgggtgcccggaaaggtcaacctctatctggcggtcggcgatcgccgcgaggacggctatcacgagctgaccacggtatttcatgccgtctcgctggtcgacgaggtaaccgttcgtaacgctgatgtgctctcgctcgagttggtcggcgagggggccgaccagctgccgaccgacgaacgcaatctcgcctggcaggcggccgagctgatggccgaacacgtgggccgggcgccggacgtctcgatcatgatcgacaaatccattccggtcgccggcggcatggccggtggcagcgcggacgctgcggcggtcctggttgcgatgaactcgttgtgggaactcaatgtgccccgccgcgacctgcgcatgctcgccgcgcggctaggcagcgatgtgccgtttgccctgcatggtggtaccgcgctggggacgggtcgcggcgaggagttggccaccgtgttatcccgcaacaccttccactgggtcctggcgttcgccgacagcgggttgctcacctccgcggtgtacaacgagctcgaccggctcagggaggtgggggatccgccccggcttggtgagcccgggccggttctggctgccttagctgcgggtgatccggatcagctggcgccgttgctgggtaatgaaatgcaagcggccgcggtgagcctggacccggcgctggctcgtgcgttacgcgccggtgtggaggccggcgcgctcgcaggcatcgtgtccggttcgggtcccacgtgtgccttcctgtgcacctcggcgagctcggcgatcgatgtcggcgcgcagctgtcgggggcgggagtttgtcgcaccgttcgagtcgccaccgggccggtacccggcgcccgcgtggtgtctgcgccgaccgaagtgtga

SEQ ID NO: 2082 - protein, 306 aa, Mycobacterium bovis
MPTGSVTVRVPGKVNLYLAVGDRREDGYHELTTVFHAVSLVDEVTVRNADVLSLELVGEGADQLPTDERNLAWQAAELMAEHVGRAPDVSIMIDKSIPVAGGMAGGSADAAAVLVAMNSLWELNVPRRDLRMLAARLGSDVPFALHGGTALGTGRGEELATVLSRNTFHWVLAFADSGLLTSAVYNELDRLREVGDPPRLGEPGPVLAALAAGDPDQLAPLLGNEMQAAAVSLDPALARALRAGVEAGALAGIVSGSGPTCAFLCTSASSAIDVGAQLSGAGVCRTVRVATGPVPGARVVSAPTEV

SEQ ID NO: 2083 - DNA, 936 bp, Mycobacterium leprae
  CDS (1)..(936): transl_table=11
atgcccaccgggtcggtcaccgttcaggttcccgggaagatcaatctctacctcgctgtcggtgattgctgcgataatggctaccacgagctggtgacggttttccatgctgtgtcgctggtcgaccaggttacggtgcgcaacgccgacgtgctgtcgctcggacttgtcggcgagggcgccaaccacgtgcccactgacgaacacaacattgcctggcgggcggccgagctaatggccgagcacgttggccgggctccggacgtttcgatcatgattgacaagtccattccggtggctggggggatggcgggcggcagcgccgatgcggccgcggtgttggttgcgatgaactcgttgtgggaactcagcctgcctcgacgcgatctgtgcatgctcgcagcgaagctaggcagcgacgtgccgttcgcactacacggtggtaccgcgctggggaccggtcgcggtgaggagctagctaccgtgttgtcccgcgccactttccactgggtgttggcgttcgccgacagcagtttgctcactccggcggtgtacaccgagtttgaccggctcagggatgtcggaaatccaccacggcttgccgaacccgggccggtgttggccgccctggtcgccgccgatcccgaacagttggcgccgttgctaggcaatgaattgcaagcggccgcggtcagcttggacccggcgctacggtgtgcgctccgcgccggtatggaagcgggtgcgctcgcgggcattgtgtctggctcgggtcctacctgcgcattcctgtgtgcctcggcgacttcggcgatcgatgtcggtgcgcagttggcaggggcgggtgtctgtcgcactgttcgggtcgccaccggaccagtacccggtgctcgggtggtacatgcgcccatgagccgaggtctgaatgacatgtga

SEQ ID NO: 2084 - protein, 311 aa, Mycobacterium leprae
MPTGSVTVQVPGKINLYLAVGDCCDNGYHELVTVFHAVSLVDQVTVRNADVLSLGLVGEGANHVPTDEHNIAWRAAELMAEHVGRAPDVSIMIDKSIPVAGGMAGGSADAAAVLVAMNSLWELSLPRRDLCMLAAKLGSDVPFALHGGTALGTGRGEELATVLSRATFHWVLAFADSSLLTPAVYTEFDRLRDVGNPPRLAEPGPVLAALVAADPEQLAPLLGNELQAAAVSLDPALRCALRAGMEAGALAGIVSGSGPTCAFLCASATSAIDVGAQLAGAGVCRTVRVATGPVPGARVVHAPMSRGLNDM

SEQ ID NO: 2085 - DNA, 846 bp, Neisseria gonorrhoeae
  CDS (1)..(846): transl_table=11
atgaatattgcggacggacggcaggcgtttcccgcacctgcaaaactgaatctcgatttgaggattaccggcaggcgggaagacggttatcacaatatcgaaagcatattctgcctgatagatttgcaggataccgtatatttgaaaccgagggacgacggcaaaatcatcctgcacaatcctgtcggcggaataccgcaggaagccgatttgagctaccgtgccgcatcgttgctgcaaaaatatgcgcgcaaccttgccggcgtggaaatatggctggacaaaaaaatcccgaccggcgccggcttgggaggggggagttccgatgccgcaacggttttgctggtgttgaaccgttggtggcagtgtggtttgacgcagtggcagctcattgatttgggtgcggctttgggtgcggacgtaccgttttttattttcggaaaaaatgcttttgcaagcgggataggtaaaaaactgataggaatggatattccgaaacagtggtatgttattgtcaaacctcccgtccacgtttccaccgcaaaaattttcacatacgaaggcttgacacgggattctgcctcaagcataatgccgactttccaaaacctgcaaccgttcagaaacgatatgcaggcagtggtatttaaagaataccctgaagtttggaaagcttattccgagttgtcgaaatacggttctgcaatgatgaccggctcaggagcctgtatatttgcagcatttcaagctaggaatagcgcatacaatatataccgacaagtttcaggtttgtacgaggcatatttggcagagggtctttcaaaacatcctttgttgtccgtataa

SEQ ID NO: 2086 - protein, 281 aa, Neisseria gonorrhoeae
MNIADGRQAFPAPAKLNLDLRITGRREDGYHNIESIFCLIDLQDTVYLKPRDDGKIILHNPVGGIPQEADLSYRAASLLQKYARNLAGVEIWLDKKIPTGAGLGGGSSDAATVLLVLNRWWQCGLTQWQLIDLGAALGADVPFFIFGKNAFASGIGKKLIGMDIPKQWYVIVKPPVHVSTAKIFTYEGLTRDSASSIMPTFQNLQPFRNDMQAVVFKEYPEVWKAYSELSKYGSAMMTGSGACIFAAFQARNSAYNIYRQVSGLYEAYLAEGLSKHPLLSV

SEQ ID NO: 2087 - DNA, 846 bp, Neisseria meningitidis serogroup A
  CDS (1)..(846): transl_table=11
atgagtgttacggacggacggcaggcgtttcccgcacctgcaaaactgaatctcgatttgaggattaccggcaggcgggaagacggttatcacaatatcgaaagcatattctgcctgatagatttgcaggataccgtatatttgaaaccaagggacgacggcaaaatcatcctgcacaatccggttgatggaatgccgcaggaggcggatttaagctaccgtgccgcatcgttgctgcaaaaatatgcacgcacccctaccggcgtggagatatggctggacaaaaaaattccgaccggggccggtttgggcggaggaagctcggatgcggcaaccgttttgctggtgttgaaccgttggtggcagtgcggtctgacgcagcggcagctcattgattcgggcgcggctctgggggcggacgtaccgttttttattttcggcaaaaatgcgtttgcgcggggtataggcgacaggctggacgaaatggatattccgaaacagtggtatgtcatcgtcaaaccgcccgtccacgtttccaccgcaaaaattttcacacacgaaggcttgacacgaaattccgcctcaagcataatgccgactttccaaaacctgcaaccgtttagaaatgatatgcaggcagttgtatttaaagaataccctgaagtttggaaagcctattccgagttgtctcgatatggatttgccttaatgacaggttctggtgcgtgtgtattcacggcgtgtcaagataggaatagcgcatacaatatataccgacaagtttcagatttgtacgaggcatatttggcagagggtctttcaaaacatcctttgttgtccgtataa

SEQ ID NO: 2088 - protein, 281 aa, Neisseria meningitidis serogroup A
MSVTDGRQAFPAPAKLNLDLRITGRREDGYHNIESIFCLIDLQDTVYLKPRDDGKIILHNPVDGMPQEADLSYRAASLLQKYARTPTGVEIWLDKKIPTGAGLGGGSSDAATVLLVLNRWWQCGLTQRQLIDSGAALGADVPFFIFGKNAFARGIGDRLDEMDIPKQWYVIVKPPVHVSTAKIFTHEGLTRNSASSIMPTFQNLQPFRNDMQAVVFKEYPEVWKAYSELSRYGFALMTGSGACVFTACQDRNSAYNIYRQVSDLYEAYLAEGLSKHPLLSV

SEQ ID NO: 2089 - DNA, 846 bp, Neisseria meningitidis serogroup B
  CDS (1)..(846): transl_table=11
atgaatattgcggacggacggcaggcgttttccgcacctgcaaaactgaatctcgatttgaggattaccggcaggcgggaagacggttatcacaatatcgaaagcatattctgcctgatagatttgcaggataccgtatatttgaaaccgagggacgacggcaaaatcatcctgcacaatccggttgatggcatgccgcaggaagtagatttgagctaccgtgccgcatcgttgctgcaaaaatatgcgcgcaaccccgccggcgtggaaatatggctggacaaaaaaatcccgacaggggcgggtttgggcggcggaagctcggatgcggcaaccgttttgctggtgttgaaccgttggtggcagtgcggtctgacgcagcggcagctcattgattcgggcgcggctctgggggcggacgtaccgttttttattttcggcaaaaatgcgtttgcgcggggtataggcgacaggctggacgaaatggatattccgaaacagtggtatgtcatcgtcaaaccgcccgtccacgtttccactgcaaaaattttcacacacgaaagcttgacacgaaattccgcctcaagcataatgccgactttccaaaatctgcaaccgtttagaaatgatatgcaggcagttgtatttaaagaataccctgaagtttggaaagcctattccgagttgtcccgatatggatttgccttaatgacaggttccggtgcgtgtgtattcacggcgtgtcaagataggaatagcgcatacaatatataccgacaagtttcagatttgtacgaggcatatttggcagagggtctttcaaaacatcctttgttgtccgtataa

SEQ ID NO: 2090 - protein, 281 aa, Neisseria meningitidis serogroup B
MNIADGRQAFSAPAKLNLDLRITGRREDGYHNIESIFCLIDLQDTVYLKPRDDGKIILHNPVDGMPQEVDLSYRAASLLQKYARNPAGVEIWLDKKIPTGAGLGGGSSDAATVLLVLNRWWQCGLTQRQLIDSGAALGADVPFFIFGKNAFARGIGDRLDEMDIPKQWYVIVKPPVHVSTAKIFTHESLTRNSASSIMPTFQNLQPFRNDMQAVVFKEYPEVWKAYSELSRYGFALMTGSGACVFTACQDRNSAYNIYRQVSDLYEAYLAEGLSKHPLLSV

SEQ ID NO: 2091 - DNA, 837 bp, Nitrosomonas europaea
  CDS (1)..(837): transl_table=11
atggacatatttccagcgccggccaaactcaacctgtttctgcacgtgatcggacgtcgggaagatggttaccatctgttgcagaccgtcttccgctttatcgaccattcagatcgactgcattttgacatcactcatgatggtgtcatcaggcatgagaacctgattcccggcctgacggaaacggatgatttatgcgttcgggcagcaaaattgttgcggcaacggtttggcagagagtcactcggagtgaaaattcatctggaaaagaacattccgctgggcggagggctgggcggaggaagttccgatgcggccacaacactgattgccctgaacaggctgtgggggatcaactggaaaagagaacgcctgatggcactgggactggaattgggcgccgatgtgccggtgttcatctatggcaggaatgcatttgccgagggagtgggggaagaactgcatgctgtcgatttgccatcggcctggtatgtcgtgctgacgccgcctgtccagatttccacagcggcggttttcaccagcaaagagttgacacgaaatacaattcctatcaaaatggcggccttttccatgggacaggggcataatgatcttgagcccgttgcgatgcgcatgcagcctgtcattgctggatggctgggatggttgaagcagcagcatggcacgacgaaagtggcgatgagtggttcagggtcgtgtatgtttgcggaattcccttccgaatcggctgcgcgcgaggtattcgggcggttgccgggcgatatgagcggatttgtcgtgtcagggctcgcaagacatcctttgtcggatttttag

SEQ ID NO: 2092 - protein, 278 aa, Nitrosomonas europaea
MDIFPAPAKLNLFLHVIGRREDGYHLLQTVFRFIDHSDRLHFDITHDGVIRHENLIPGLTETDDLCVRAAKLLRQRFGRESLGVKIHLEKNIPLGGGLGGGSSDAATTLIALNRLWGINWKRERLMALGLELGADVPVFIYGRNAFAEGVGEELHAVDLPSAWYVVLTPPVQISTAAVFTSKELTRNTIPIKMAAFSMGQGHNDLEPVAMRMQPVIAGWLGWLKQQHGTTKVAMSGSGSCMFAEFPSESAAREVFGRLPGDMSGFVVSGLARHPLSDF

SEQ ID NO: 2093 - DNA, 924 bp, Nocardia farcinica
  CDS (1)..(924): transl_table=11
gtgctgtcagttgtgcccagtccggttctcgtgcgcgcgccctcgaaggtgaacctgcacctcggtgtcggcgacctgcgccccgacggctaccacgacctgaccacggtgttccaggcgctgtccctcggcgacgacctgcggatctcgcccgcctcggcgctcacggtgaaggtgaacggcgagggcgccgccgaggtgcccaccgatcgcacgaatctggtgtggaaggccgcggtgcgcttggcccacctggtcgggcgggcgccactggtggagatcgtcatcgacaagggcatcccggtggcgggcgggatggccggcggcagcgccgacgccgccgccgcgctggtcggcctcaacgagctgtgggacatgggcctgggccgtgacgaattgtccgcgctcgccgccgaactcggcagcgacgtgccctttgccctgcacggcggcaccgcgctgggcaccggccggggcgagcgattgcttccggtgctgtcgcgcaacacctttcactgggtgctcgccttcgccaagggcgggctgtccaccccggcggtgttcgccgaactcgaccggctgcgcgagcacggcgacccgccgcgcctcggcgacccgcaggccctgatgcaggcgctggcctccggcgaccccgcccagctcgcgccgctgctcggcaacgacctacaggccgcggcggtctcgttgaagcccgagctgcgccgcacgctgcgcgcgggcgtcaccgcgggcgcgctggccgggctggtctccggctccggacccacctgtgcgttcctgtgcgagagcgcggacgccgccgtcgcggtcgcggcggagctggccggggcgggcgtggcccgcagcgtgcgcaccgcgagcgggccggtgcccggcgcgcgcgtcatcgatccggagagctga

SEQ ID NO: 2094 - protein, 307 aa, Nocardia farcinica
MLSVVPSPVLVRAPSKVNLHLGVGDLRPDGYHDLTTVFQALSLGDDLRISPASALTVKVNGEGAAEVPTDRTNLVWKAAVRLAHLVGRAPLVEIVIDKGIPVAGGMAGGSADAAAALVGLNELWDMGLGRDELSALAAELGSDVPFALHGGTALGTGRGERLLPVLSRNTFHWVLAFAKGGLSTPAVFAELDRLREHGDPPRLGDPQALMQALASGDPAQLAPLLGNDLQAAAVSLKPELRRTLRAGVTAGALAGLVSGSGPTCAFLCESADAAVAVAAELAGAGVARSVRTASGPVPGARVIDPES

SEQ ID NO: 2095 - DNA, 858 bp, Novosphingobium aromaticivorans
  CDS (1)..(858): transl_table=11
atgcaggaggcgtcggggcttgctccggcgcctcttccgtttcaggggagggccatgagtctgcgcgaaaccgcctatgccaagatcaaccttgccctccacgtaaggcggcgcagggatgacgggtatcacgagctggaaacgctgttcgcgttcgtcgatgcgggggatgagctgacggcgaagccggctcctgcggactccttgcgagtcttcggcgagtttggcggggcgctggacgatccgttcggtaacatcgtagccaaggcgctcgggaccttgccgcatggcgagggctgggcggtgacgctggagaagcatctcccggtcgccgcgggcctcggtggaggatccgccgatgcgggggcggtcttccgcatggtggagcgcagccacggccttccggcagactggcatgcccgcgctgccaggctgggcgcggatgtccccgcctgtgtcgaaagcgcggcctgcatcggtcgcggcacgggaaccgaactcgaacccatccctaacgaccttgccggaacgccggttcttctcgtcaatccgcgcatcccgcttgcgaccggcccggtgttcaaggcctgggatggcgtggaccggggcgcgcttgaaggcgccaccgctcgcgaagtcgcctttgccggacgcaacgacctcgaggcgcccgcgctctcgctcgtgccggagatcggcgctgtcctcgttaccctgcgccagactggcggatggctcacgcgcatgtccggctcgggcgcaacctgcttcgcgctctacgacacgccggagcagcgcgatctggcgcaggccgcgatgccgccatcgtggtggacactggggggagccctgcgttga

SEQ ID NO: 2096 - protein, 285 aa, Novosphingobium aromaticivorans
MQEASGLAPAPLPFQGRAMSLRETAYAKINLALHVRRRRDDGYHELETLFAFVDAGDELTAKPAPADSLRVFGEFGGALDDPFGNIVAKALGTLPHGEGWAVTLEKHLPVAAGLGGGSADAGAVFRMVERSHGLPADWHARAARLGADVPACVESAACIGRGTGTELEPIPNDLAGTPVLLVNPRIPLATGPVFKAWDGVDRGALEGATAREVAFAGRNDLEAPALSLVPEIGAVLVTLRQTGGWLTRMSGSGATCFALYDTPEQRDLAQAAMPPSWWTLGGALR

SEQ ID NO: 2097 - DNA, 843 bp, Oceanobacillus iheyensis
  CDS (1)..(843): transl_table=11
atggagaaagcacctgcaaagattaatctgtctttagatgttttgcataagcgagatgatggttatcatgatgttgaaatggtgatgacaaccattgatttatctgaccgaatcgaattacaacaacttcctaaagatgagatacaaattgcattggaaagcagatatgttcccagtgatgaacggaatttagcttaccaagcagcaaaattatttaagaagacatatcaaattccaaatggagttcgtatccaaatagagaaaaacatccctgtatctgcaggtcttgctgggggtagtacagatgctgcagctgttttacgaggattaaatcgcttatttcatgtaaatgcgcctctgaaagatttagcaaaattaggttctaatctaggtgcagatgttgctttttgtgtatatggaaagacagccattgcaaagggcttcggagatcaaattgaaatgcttccctcaccaccaaactgttgggtaattactgcaagaccagatattggagtgtccactagaacgatctttgaacggattgaactacaacaccttcaacacccggatacaaagaaagtattagaggcactacaaaaaagagatttttatcaaatttgtataagtttaggaaatgctttggaagatataacatttgcacttcatccggaagttaatcgaattaagaatgccatgctgcaagctggtgccgacggagcaatgatgagtggtagcgggccaacagtattcggtctggtacaacactttagtaaagcgcaacggatttataatagtatgcgcggtttttgtgaggatgtacagttggtccggattttaggatga

SEQ ID NO: 2098 - protein, 280 aa, Oceanobacillus iheyensis
MEKAPAKINLSLDVLHKRDDGYHDVEMVMTTIDLSDRIELQQLPKDEIQIALESRYVPSDERNLAYQAAKLFKKTYQIPNGVRIQIEKNIPVSAGLAGGSTDAAAVLRGLNRLFHVNAPLKDLAKLGSNLGADVAFCVYGKTAIAKGFGDQIEMLPSPPNCWVITARPDIGVSTRTIFERIELQHLQHPDTKKVLEALQKRDFYQICISLGNALEDITFALHPEVNRIKNAMLQAGADGAMMSGSGPTVFGLVQHFSKAQRIYNSMRGFCEDVQLVRILG

SEQ ID NO: 2099 - DNA, 867 bp, Protochlamydia amoebophila
  CDS (1)..(867): transl_table=11
ttgcgcctatctattattgagataataaatagtatgttttccattcgattattttcaccggcaaaaataaatttatttttaaaagttattggcaaaagagcggatgggtatcatgagctttcctcacttttccaaacaatctctgctggggatattttaacatttcaaaggcagacaatagatacgctcacctgttcagatccttatcttcccaccgatgattctaatttagttcttaaagccatgcgtttatttcgttcaaaaactggtttggatttacacttgcgcattcatttagataaacgacttccttctcaagcaggacttggaggaggtagcagtaatgctgcgactactctttgggcttgtaatcaactagcaggagaaatcgtaacaacagaagagttaatgcaatggggatccgaaattggggcagacattccttttttcttttccaaaggaactgctcattgtactggcagaggagaatgtgtaaattctttagaacctttagctcattgtaaaatttggattgttaagcctccttttggactttcgactccagaagtttataagcacttaaatttctctcagcctaatgaaaataataacgattatgcaagctttaaagaaaaaccttattttaatgatttagaagcttcggcttttgaaatcaaacctgaattaaaaatactaaaaaacactcttctgtcttctggttttgatacagtgcttatgtctgggtcaggatcttcttttttttgtattggtcaagggcaaattcctgcttcttttaaagctttttctgcgtactttatcaaccgttcatccaatcgttggtattctacgctgcccaaattaacctga

SEQ ID NO: 2100 - protein, 288 aa, Protochlamydia amoebophila
MRLSIIEIINSMFSIRLFSPAKINLFLKVIGKRADGYHELSSLFQTISAGDILTFQRQTIDTLTCSDPYLPTDDSNLVLKAMRLFRSKTGLDLHLRIHLDKRLPSQAGLGGGSSNAATTLWACNQLAGEIVTTEELMQWGSEIGADIPFFFSKGTAHCTGRGECVNSLEPLAHCKIWIVKPPFGLSTPEVYKHLNFSQPNENNNDYASFKEKPYFNDLEASAFEIKPELKILKNTLLSSGFDTVLMSGSGSSFFCIGQGQIPASFKAFSAYFINRSSNRWYSTLPKLT

SEQ ID NO: 2101 - DNA, 888 bp, Pasteurella multocida
  CDS (1)..(888): transl_table=11
atgcaacattatcatttttctcactcacttttagcacaacaagaaaaaccatatcgtttcccttgtccggctaaacttaacttatttctctacattaatgggaaacgtcaagatggttatcacgaactacaaaccctttttcaatttgttgattttggtgattggttagatattgaggttcgcgaagataacgaaatctgcctaacgccagaacttccctcactaaaaaatgaagataatttagtctatcgcgcagcaaaattactgcaacagaaaaccaattgtgctttaggcgccaatctgacacttgataagattctaccgatgggaagtgggctcggaggaggctcgtctaatgcggcaacagcattagtcgcattaaattacctgtggaatacgcaactcagcacaaaacaacttgctaaactaggattaatgctcggtgcagacgtaccaatttttgtccatggtcacgcggcatttgccgaaggagtaggtgaaaaaattacttattgtgagccaaaagagaaatggtatgtggttttaaagccaaatgtgtctatatcaaccgcgaccgtcttttctgatccagatttaattcgtaatacccctaagcaatctctggagcaactcctcaatcaaaaatatgcaaacgattgtgaaaaagttgtgttaaatcattatccagaggttgaagaaatactccacagattgttacaatatgcgccatcaagattaacaggcaccggcgcttgtgtatttgccgaatttaatgacgaagaaagtgcacaactcgcatttcaaacaatacccaaaaactattttggttttgtcgcacaaggattaaataaatcacctttacataatatgctagcgaaaatcagctag

SEQ ID NO: 2102 - protein, 295 aa, Pasteurella multocida
MQHYHFSHSLLAQQEKPYRFPCPAKLNLFLYINGKRQDGYHELQTLFQFVDFGDWLDIEVREDNEICLTPELPSLKNEDNLVYRAAKLLQQKTNCALGANLTLDKILPMGSGLGGGSSNAATALVALNYLWNTQLSTKQLAKLGLMLGADVPIFVHGHAAFAEGVGEKITYCEPKEKWYVVLKPNVSISTATVFSDPDLIRNTPKQSLEQLLNQKYANDCEKVVLNHYPEVEEILHRLLQYAPSRLTGTGACVFAEFNDEESAQLAFQTIPKNYFGFVAQGLNKSPLHNMLAKIS

SEQ ID NO: 2103 - DNA, 876 bp, Photorhabdus luminescens subsp
  CDS (1)..(876): transl_table=11
atgacattcacttggccctcaccggcaaaactgaacctatttctctatatcaccggtcgtcgcgctgacggttaccaccagttacaaacgctatttcaatttcttaattatggtgatgaaattacgattacccctcgtcaggataatgaaattcgtttactgacacccgtggagggagtggaacacgataacaacctgattgttcgcgcagcacgtctcctgcaatcctatagcgacaaacaccatgcgggtattgctcataaaggtgctgatattcatatcaacaaacgtctgccaatgggcggtgggttaggcggaggttcatccaatgccgctaccgtactcatagccctgaattatcactggcaaaccggtttcacagacgaaacactggccgccctcggcgtaagtcttggtgctgatgtgcccatctttgtcaaagggcatgccgcattcgcagaaggtattggtgaaatcctgcacatagccgagccggaagaaaaatggtatctggttgcgcatcctggtattgaaatctcaactctgcgtgtcttcacagatccagaattaaaacgtgatacaccaattcgccctctggccgcattattaaaggctccgtacctaaatgattgtgaatctcttgtaagaaaacgtttccgtaaggttgaacagcttctttcatggctgctagaatacgcgccgtcacgcctgaccggaaccggtgcatgtgtattcggtgaatttgaatcagaagcatcggcccgtaaggtgttaaatcaagcccctgagtggttgcagggttttgttgcgcgtggcgttaacaattcacctttgcacaatttccgctctgggatacccgtgttattgagccaatga

SEQ ID NO: 2104 - protein, 291 aa, Photorhabdus luminescens subsp
MTFTWPSPAKLNLFLYITGRRADGYHQLQTLFQFLNYGDEITITPRQDNEIRLLTPVEGVEHDNNLIVRAARLLQSYSDKHHAGIAHKGADIHINKRLPMGGGLGGGSSNAATVLIALNYHWQTGFTDETLAALGVSLGADVPIFVKGHAAFAEGIGEILHIAEPEEKWYLVAHPGIEISTLRVFTDPELKRDTPIRPLAALLKAPYLNDCESLVRKRFRKVEQLLSWLLEYAPSRLTGTGACVFGEFESEASARKVLNQAPEWLQGFVARGVNNSPLHNFRSGIPVLLSQ

SEQ ID NO: 2105 - DNA, 891 bp, Photobacterium profundum
  CDS (1)..(891): transl_table=11
gtgaataatcaatcaaattgcgcccccatttttaatcgtgaaacacattggccttcccctgcaaaactgaacctttttttatacattacagggcaacgaccgaacggttatcatgagctccaaacgctgtttcaatttttggattacggcgatacattaacaattacagcaaccaatacatcggctattacaatcaatcctgccattgaaggcgtgaccaccgaagataaccttatctatcgtgcagctgatgcattgcgtcaagcgacagggacaatgcttggcgctcatatagaaattgataagattttaccgatgggaggagggttaggcggaggttcatcaaacgcagcgaccacactggttgcgctcaattacttatggcaaacccagctagatttagataaattggctgatattggtcttgcattaggggctgatgtacccgtttttgtgaaaggttttagtgcatttgccgaaggcgttggtgaaaaattactgccagcaacccctcaagaaaagtggttcctagtcacaaaacccaatgtaagcattgcaactgttgatattttcacccatcccgatttaattagaaataccgaaaaacgtagcctgaaagcccttttagcaggcgtttacgaaaacgattgcgaaaaaattgtcagaagactgcatcccgaggttgataaggcggtttcgtggctgttagaatacgcgccgtcaagattgactggcactggcgcttgtgtgttcgctgaattcagctcacaacaagaagctgatgccattttaaagaaattacctgactggctccacggatttgtcgctaaaggtgttaatacatctcccctgatggcaaccctgcacgtacattctacggattgtcagtaa

SEQ ID NO: 2106 - protein, 296 aa, Photobacterium profundum
MNNQSNCAPIFNRETHWPSPAKLNLFLYITGQRPNGYHELQTLFQFLDYGDTLTITATNTSAITINPAIEGVTTEDNLIYRAADALRQATGTMLGAHIEIDKILPMGGGLGGGSSNAATTLVALNYLWQTQLDLDKLADIGLALGADVPVFVKGFSAFAEGVGEKLLPATPQEKWFLVTKPNVSIATVDIFTHPDLIRNTEKRSLKALLAGVYENDCEKIVRRLHPEVDKAVSWLLEYAPSRLTGTGACVFAEFSSQQEADAILKKLPDWLHGFVAKGVNTSPLMATLHVHSTDCQ

SEQ ID NO: 2107 - DNA, 825 bp, Porphyromonas gingivalis
  CDS (1)..(825): transl_table=11
atgatcgtttttcccaatgcaaaaatcaacctcggcttgcaggttgtagccaagcgagcggacggctaccacaacatcgagacagtcttctatccgatcccgctgaccgatgctttggagatcgaagtacgagaggatacttgcgaccgtctttccgtccatggcgttcccattgatgctgcaacggaggataatttggttatgaaagcggtcatggctcttcgccgaaaatttgattttcccccactgactatcgagcttatcaagcacattccatcaggagcaggtttgggaggaggttcttcgaatgcgtctttcatgctgaagttggtgagggactatttctctctaccgatcgatgacgaagaattggcggcaatagcactgacgatcggtgccgattgtccttttttcgtaggaaatcggccggtattagccaccgaccttggccaagtctttactccgctacccaatttttctctgtccggtctccatatcgctatagtaaaaccacccatccatatcaacacagcagctgcatacaaaggtctcaagcatgtgggcaaacgagagacaatgccggatgagattgtttacatgcccgtagaagaatggagagggaaattggtgaacgatttcgaagaaagccttttccctgaacatcctcgacttgccgaactaaaagaaatgctctatcggtcgggggctttgtacgctgcaatgtccggttccggatctgcactattcggtcttttccgggaaaagcctcagctcgataaggctgctatcaccgactgcttccgatggcaaagcatcatcccctga

SEQ ID NO: 2108 - protein, 274 aa, Porphyromonas gingivalis
MIVFPNAKINLGLQVVAKRADGYHNIETVFYPIPLTDALEIEVREDTCDRLSVHGVPIDAATEDNLVMKAVMALRRKFDFPPLTIELIKHIPSGAGLGGGSSNASFMLKLVRDYFSLPIDDEELAAIALTIGADCPFFVGNRPVLATDLGQVFTPLPNFSLSGLHIAIVKPPIHINTAAAYKGLKHVGKRETMPDEIVYMPVEEWRGKLVNDFEESLFPEHPRLAELKEMLYRSGALYAAMSGSGSALFGLFREKPQLDKAAITDCFRWQSIIP

SEQ ID NO: 2109 - DNA, 936 bp, Prochlorococcus marinus
  CDS (1)..(936): transl_table=11
atgcaagatttagctaaaacgaaaattaatataaaatctcctgccaaaataaatttgcaccttgaagttattggtaagagagaggatggatttcatgagttagcaatgattatgcaaaatatcgatctttctgattatttagaatttgaaattaataatgaaggtttaattaaacttgagtctgattgtaatgatttaagcttatctgatgataacttaattgttaaatcggcaaatctattaaggaaaaaatcaaatatagattacggtgcgaatatatttttaagaaaaaatattccaattggcgcaggattagctggtggatccagtaattcagcagcaacattaattggtcttaataagttatgggatttgaacttaggtcaagaagcattatgttcattagcatcaactttaggatctgatattcccttttttataaatggtggtattcaattatgttttggaagaggagaagttttggagaaattagattcaaactttgaatatggagtaattcttttaaaaaatccaaatgtatcagtatctacagctgaaacttataaaaaatatagtaatagattttgtcatcaataccttactgatagagaaatgattgagaacataagaaaaaatttaagagaaaatggtttaaataacttaaatcttgataatcaacatttatctattaaaaatgatttgcagttagttgttgaaaatgaaaatgattctgtaaagcaggcattatatttactttctaaattagaaaattgtctcacattttcaatgagtggatcaggtcctacatgctttgcactctttaaagatatagagactgctaaaaaagaattaactgcgaattataaattgtttagaaataaaggttacgattcatgggtttgcactttccttgaaaagggaataacattcatttaa

SEQ ID NO: 2110 - protein, 311 aa, Prochlorococcus marinus
MQDLAKTKINIKSPAKINLHLEVIGKREDGFHELAMIMQNIDLSDYLEFEINNEGLIKLESDCNDLSLSDDNLIVKSANLLRKKSNIDYGANIFLRKNIPIGAGLAGGSSNSAATLIGLNKLWDLNLGQEALCSLASTLGSDIPFFINGGIQLCFGRGEVLEKLDSNFEYGVILLKNPNVSVSTAETYKKYSNRFCHQYLTDREMIENIRKNLRENGLNNLNLDNQHLSIKNDLQLVVENENDSVKQALYLLSKLENCLTFSMSGSGPTCFALFKDIETAKKELTANYKLFRNKGYDSWVCTFLEKGITFI

SEQ ID NO: 2111 - DNA, 960 bp, Prochlorococcus marinus
  CDS (1)..(960): transl_table=11
atgaatattaattattctgagctgagttcatcaagatctttaagtgtaattgcacctgcaaagatcaatttgcatttagaagttcttggttttcgtaaggatggttttcatgaattggcaatgttaatgcagagtattaatttgtttgatgaaattgattttttaaaaactgataatggtgaaataacgctgacatctgacgaccctaacttaagtacaggcgatgacaatttaattttaaaggctgcacaattgatacagacttgctctagtgataaaaatgtgggtgccgagattcatttgaagaagaatattcctattggagcaggtctagcaggtggttctagtgatgcagcggcaactttagtcggtcttaattccctatgggggatagggtcttctgaaaaacaattggaaaaattaggatctgaacttggctctgatgtccctttttgcttaagggggggaactcaattttgctttggtcgaggagaatctctggaaatgatccctgagataaaacaatctatggctgttgttctggttaaagaccctttagttgaagtctctactccttgggcttattcaaaattcaaggagatatatggcaatgattatttaaagatggaagaagattttgaaaagaggcgtcaatcacttagagacgcgtcatggttgaatccattgaattgtacaaatccaccacctttgcaaaatgaccttcagaaggtcatcgaacccattactccagcggtaagaaatgctttggagtttctttcttctcttgaaggggtactttcacttgctatgagtggatcaggaccaagctgttttggtatttttgctgatcttaatggagcacaaatagcattagaagaaaatagaaataaactaaaattgtcaggattggatgcgtggtgttgtgcatttaaatcgtcaggagtttctttaagattgtga

SEQ ID NO: 2112 - protein, 319 aa, Prochlorococcus marinus
MNINYSELSSSRSLSVIAPAKINLHLEVLGFRKDGFHELAMLMQSINLFDEIDFLKTDNGEITLTSDDPNLSTGDDNLILKAAQLIQTCSSDKNVGAEIHLKKNIPIGAGLAGGSSDAAATLVGLNSLWGIGSSEKQLEKLGSELGSDVPFCLRGGTQFCFGRGESLEMIPEIKQSMAVVLVKDPLVEVSTPWAYSKFKEIYGNDYLKMEEDFEKRRQSLRDASWLNPLNCTNPPPLQNDLQKVIEPITPAVRNALEFLSSLEGVLSLAMSGSGPSCFGIFADLNGAQIALEENRNKLKLSGLDAWCCAFKSSGVSLRL

SEQ ID NO: 2113 - DNA, 960 bp, Prochlorococcus marinus
  CDS (1)..(960): transl_table=11
atgagcatatctaacccttcagctgcttcagagcatctggttagcgtctcggcgccagccaagatcaatctccatcttgaggtgcttggcctgaggtctgatggttttcatgagctagcgatggtgatgcagagcatcgaactcgctgatcaacttcatttccgcaatacggctgatggcagcatcagccttcgctgcgatgattccagcctcagcactgctggcgacaatttgatcgtgcgagctgcgcatttattacgcgagcgctcagggttctctgaccttggtgccgcgattgaattgcaaaaacgcatcccaattggagctggtcttgcgggcggctcaagtgatggtgcagcaacactggtggggttaaacggtctctggaatctcaatttttctcagggtcaacttgaaggttttgcggctgagcttggctccgacatgcccttttgcctggcaggtggaagccaattgtgtttcggccgtggggaaaggttggaatcgctacaagcgatgaaagcatcaatggccgtggtgttggtgaaggatccatcagtgagcgtttcaaccccctgggcttatggacgctgtaaggaacttttcagtagtcgttatctttcaaaggaatctgattttgagcaacgtcgtcagcagctcagagaatcttcttggctgaatcctttacgggctgatgatccgccacctctgcgcaacgaccttcaggaggttgttgcacccgaagtttcggctgtgcaaaccacattgaagttgctcactgatttgcctggttctcttgcagtatcgatgagtggatctggtccaagctgttttgccctttttgctgacgttgcttcagctcaggctgcacttcagctccaacagcctgccttcgccgcagctggtttaagcagttggtgctgcgcgttccgctgtgaaggcatcaaactggaagcatga

SEQ ID NO: 2114 - protein, 319 aa, Prochlorococcus marinus
MSISNPSAASEHLVSVSAPAKINLHLEVLGLRSDGFHELAMVMQSIELADQLHFRNTADGSISLRCDDSSLSTAGDNLIVRAAHLLRERSGFSDLGAAIELQKRIPIGAGLAGGSSDGAATLVGLNGLWNLNFSQGQLEGFAAELGSDMPFCLAGGSQLCFGRGERLESLQAMKASMAVVLVKDPSVSVSTPWAYGRCKELFSSRYLSKESDFEQRRQQLRESSWLNPLRADDPPPLRNDLQEVVAPEVSAVQTTLKLLTDLPGSLAVSMSGSGPSCFALFADVASAQAALQLQQPAFAAAGLSSWCCAFRCEGIKLEA

SEQ ID NO: 2115 - DNA, 939 bp, Prochlorococcus marinus subsp
  CDS (1)..(939)
atgtcaaaattatctacaactaagatttgtgttaaatcacctgcaaagataaacctccatcttgaaatcatcggaaaaagaaaggacggatatcatgaattagcgatgataatgcagaacattgatctatctgattatatagaatttgagaataatcaaattggcgaaattaagttaaagtctaatagcaaagatctatctctagatgaagataatttaataataaaagcggcgaattatataaaggacatgtcaaaaaataaagaattaggggctaatatatttttaaaaaagaatattcctattggtgctggtttagctggtggttctagtaatgcagctgcaacgttagttggacttaataaattatgggatttggaccttgattacgaaactatttttatactttcggcaaaacttggttcagatgtacctttttttatagaaggaggatgccaattttgttttggaaggggagaaattcttgagaaatacagttctaattttgactttggcgtaattcttttaaaaaacccaaatatttcaatttcaactgtagatacttataaaaaatatagtcaagaattttgtccaaaatattttactgaaactgagaaaacaaacaaaattagaaatgatttaagagtaaacggattcaatgatttcaaattatcagaacaaaggataaatgtaaaaaatgatttacaagttattgttgagagagaaaataactctgtaaagaaagcattatatctactttcaaatttgcaaaattgtttatcatactcaatgagtggatctggtccaacatgttttgctctttttaaagatataaatatagctaatgaagtttttgaacaaaattataaaatgtttaataataatggatttgaagcgtgggtctgtaaattaattaatagcggtattaccttattgtaa

SEQ ID NO: 2116 - protein, 312 aa, Prochlorococcus marinus subsp
MSKLSTTKICVKSPAKINLHLEIIGKRKDGYHELAMIMQNIDLSDYIEFENNQIGEIKLKSNSKDLSLDEDNLIIKAANYIKDMSKNKELGANIFLKKNIPIGAGLAGGSSNAAATLVGLNKLWDLDLDYETIFILSAKLGSDVPFFIEGGCQFCFGRGEILEKYSSNFDFGVILLKNPNISISTVDTYKKYSQEFCPKYFTETEKTNKIRNDLRVNGFNDFKLSEQRINVKNDLQVIVERENNSVKKALYLLSNLQNCLSYSMSGSGPTCFALFKDINIANEVFEQNYKMFNNNGFEAWVCKLINSGITLL

SEQ ID NO: 2117 - DNA, 960 bp, Prochlorococcus marinus
  CDS (1)..(960): transl_table=11
atggtaccttccaaagcaaatgaagattttcttatcgcaaatgcacatgcaaaaattaatctacatttagaggttttaggtattaggagcgatggctttcatgaattagcaatggtcatgcaaagtattaatttaagtgatcaattgaaaatgataaaaagagtagataatactattaatctaaaatctaataataaagaaattagtaatggtgacgataatctaataataaaagctgcaaagctgttgagaaataaagtagaaaatcaagaattaggtgttgatattgaacttgagaaaaacatacctattggggcaggattggcagggggatctacagatgcagctgcaacattacttggattaaataaactctggaagctaaatcttaagattgatgaattagagaacctatcaaaagaaataggatcagatatccctttttgcatatcaggagggaggcaaatatgttttggtagaggtgaaattttagaaaaattgaaatttgatcaaattcagttaggtcttgttttagttaaagacccttcaatacaagtatctactccagttgcatacaaaaaatataaagagcagtttggtgaaagctatcttgaagatgatagggattttgaaatcaaaagaaactctattagatctattgactggtctgatcagtcgctttttgataatcgtaaagaaatacaaaatgatttacaaaaaagcattcgccctatgacaccagaggttgagaagtcattgaatttattatctagtttgccagattcacgtcttgtttcaatgagtggttctggtccaagttgttttgccttgtttcaaaattatgaccaagcaaataaagtactcaaagaacatgttaacgaatttgaaagggctggtttatcagcttgggcatgttcaatgatgtctaatggagttgaattaagaaatgaattcacctag

SEQ ID NO: 2118 - protein, 319 aa, Prochlorococcus marinus
MVPSKANEDFLIANAHAKINLHLEVLGIRSDGFHELAMVMQSINLSDQLKMIKRVDNTINLKSNNKEISNGDDNLIIKAAKLLRNKVENQELGVDIELEKNIPIGAGLAGGSTDAAATLLGLNKLWKLNLKIDELENLSKEIGSDIPFCISGGRQICFGRGEILEKLKFDQIQLGLVLVKDPSIQVSTPVAYKKYKEQFGESYLEDDRDFEIKRNSIRSIDWSDQSLFDNRKEIQNDLQKSIRPMTPEVEKSLNLLSSLPDSRLVSMSGSGPSCFALFQNYDQANKVLKEHVNEFERAGLSAWACSMMSNGVELRNEFT

SEQ ID NO: 2119 - DNA, 867 bp, Pseudomonas syringae pv
  CDS (1)..(867): transl_table=11
atgactgcattacaggatatggccaaggcccagctggttttgcctgctccggcaaagctgaacctgatgctgcacattctgggacgccgtccggacggctaccatgagttgcaaaccctgtttcagtttctcgattacggtgacgaactgggctttaccgttcgcgaggacggcgagattcgcctgcagaccgatgtccccggtgtcccgcatgacagcaacctgatcgtcaaagccgcccgcgcgctgcaaaaacagtccggttgcacactgggcatggatatctggctggaaaaacgcttgcccatgggcggcggcatcggcggcggcagctcggatgctgccaccacactgctggcgctgaatcatttgtggcagcttggctgggatgaagatcgtctggcgcaactgggcctgactctgggcgctgatgtaccggtttttgtccgtggacacgccgcatttgctgagggtgtcggggaaattctcaccccggttgaccccgaagaaccctggtatttggtgctcgttccgcaagtcgctgtaagtacagcagaaattttttcagatccgttgttgacacgcgacacgccgcccattaaagtgcgccccgttcccaagggaaacagtcgaaatgactgtaaggcggttgtagagaggcgttacccagaagtacgtaacgctttgaatttgttaggtaattttaccgaagcaaaattaaccggaactggaagttgtgtgtttggggcattcccaaacaaagctgaagctgataaagtctcggcccttcttacagagacccttacagggttcgtagcgaaaggaagtaacatttcgatgttgcatcgcaagctgcaaattctgtaa

SEQ ID NO: 2120 - protein, 288 aa, Pseudomonas syringae pv
MTALQDMAKAQLVLPAPAKLNLMLHILGRRPDGYHELQTLFQFLDYGDELGFTVREDGEIRLQTDVPGVPHDSNLIVKAARALQKQSGCTLGMDIWLEKRLPMGGGIGGGSSDAATTLLALNHLWQLGWDEDRLAQLGLTLGADVPVFVRGHAAFAEGVGEILTPVDPEEPWYLVLVPQVAVSTAEIFSDPLLTRDTPPIKVRPVPKGNSRNDCKAVVERRYPEVRNALNLLGNFTEAKLTGTGSCVFGAFPNKAEADKVSALLTETLTGFVAKGSNISMLHRKLQIL

SEQ ID NO: 2121 - DNA, 849 bp, Pseudomonas aeruginosa
  CDS (1)..(849): transl_table=11
atgagcgtgcgcctcagcctgccagccccggccaagctcaatctgttcctgcatatcctcggccgccgcgacgatggctatcacgagttgcagaccctgttccaattcctcgaccacggcgacgagctgcatttcgaagcccgccaggacggccaggtacgcctgcacacggaaatcgccggggtgccgcacgacagcaacctgatcgtgcgcgccgcgcgcgggctgcaggaagcctccggcagcccgcaaggcgtcgacatctggctggacaagcgcttgcccatggggggcggcatcggcggcggcagctccgacgccgccacgacgctcctggccttgaaccatctctggcaactcggctgggacgaggaccgcatcgccgccctgggcctgcgcctgggcgccgacgtgccggtcttcacccgcggacgcgcagctttcgccgagggcgtgggcgaaaagctcaccccggtggacatcccggagccctggtatctcgtcgtggttccgcaagtacttgtcagcacagcagaaattttttcagatccactgttgacacgcgattctcccgccattaaagtgcgcaccgttctcgagggggacagccgaaacgactgtcagccggtagtcgagaggcgttacccagaagttcgtaacgctttgatcttgctaaacaaatttgtttcagctagattaaccggcactggaggttgtgtgtttgggagcttcccaaacaaagctgaagctgataaagtctcggcccttcttccagaccaccttcagaggttcgtcgccaaaggaagcaacatctcgatgttgcaccggaagctggaaactctggtctga

SEQ ID NO: 2122 - protein, 282 aa, Pseudomonas aeruginosa
MSVRLSLPAPAKLNLFLHILGRRDDGYHELQTLFQFLDHGDELHFEARQDGQVRLHTEIAGVPHDSNLIVRAARGLQEASGSPQGVDIWLDKRLPMGGGIGGGSSDAATTLLALNHLWQLGWDEDRIAALGLRLGADVPVFTRGRAAFAEGVGEKLTPVDIPEPWYLVVVPQVLVSTAEIFSDPLLTRDSPAIKVRTVLEGDSRNDCQPVVERRYPEVRNALILLNKFVSARLTGTGGCVFGSFPNKAEADKVSALLPDHLQRFVAKGSNISMLHRKLETLV

SEQ ID NO: 2123 - DNA, 852 bp, Pseudomonas fluorescens
  CDS (1)..(852): transl_table=11
atgtccatggaaaaactgaccctgccctccccggccaagctcaatctgatgctgcacatcctcggtcgccgtgaagatggctatcacgagctgcagaccctgttccagtttctcgactacggcgatgaaatcactttcgccctgcgcgatgacggcgtgattcgcctgcacaccgcattcgaaggcgtgccccacgacagcaacctgatcgtcaaggcggcgaagaaactccaggaacaatcgggctgcacccagggcatcgacatctggatcgacaagatcctgcccatgggcggcggcatcggcggcggcagttcgaatgccgccaccaccctgctgggcctcaatcacttgtggcaactgggctgggacgaagaccgactggctgcactggggctgaccctgggcgccgatgttccggttttcgtccgcgggcatgctgccttcgccgaaggtgtgggggaaaaactgacccctgaatatcccgaagaaccctggtatctggtactggtcccgcaagtgtctgttagtacagcagaaattttttcagatcctttgttgacacggaacaccgcgcccattaaagtgcgccccgttcccaagggaaacagcagaaatgactgccttccggtagtcgcaaggcgttatccagaagtacgtaacgcattgaatttgctaggtaaatttaccgaagcaaaactgactggaactggaagttgtgtgtttgggggcttcccaagcaaagctgaagctgataaagtctcggcccttcttacagagacccttacagggtttgtagccaaaggaagcaacgtttcgatgttgcatcgcaagctgcaaagtctgctctaa

SEQ ID NO: 2124 - protein, 283 aa, Pseudomonas fluorescens
MSMEKLTLPSPAKLNLMLHILGRREDGYHELQTLFQFLDYGDEITFALRDDGVIRLHTAFEGVPHDSNLIVKAAKKLQEQSGCTQGIDIWIDKILPMGGGIGGGSSNAATTLLGLNHLWQLGWDEDRLAALGLTLGADVPVFVRGHAAFAEGVGEKLTPEYPEEPWYLVLVPQVSVSTAEIFSDPLLTRNTAPIKVRPVPKGNSRNDCLPVVARRYPEVRNALNLLGKFTEAKLTGTGSCVFGGFPSKAEADKVSALLTETLTGFVAKGSNVSMLHRKLQSLL

SEQ ID NO: 2125 - DNA, 852 bp, Pseudomonas fluorescens
  CDS (1)..(852): transl_table=11
atgaccgctccacgcctcactttgccttcaccggccaaactcaacctgatgttgcacattctcggtcgccgtgaagacggttatcacgaattgcagacgctttttcagttcctcgactacggcgacgaaatcaccttcgccgtccgtgacgacggcgtgattcgcctgcacaccgaattcgacggagtgccccacgacagcaacctgatcgtgcgcgcggcgaaaaaactgcaggaacaatccgcctgctcgctcggcatcgacatctggatcgacaagatcctgccgatgggcggcggcatcgggggcggcagctcgaatgcggccaccaccctgcttggcctcaatcatttgtggcgactgggttgggatgaagatcgcctggctgcactgggcctgacgctgggcgccgacgtgccggtgttcgtgcgtggtcatgcggcttttgccgaaggtgtcggtgagaaactgaccccggtcgagcccgccgaaccgtggtacgtcgtgctcgttccgcaagtctctgttagtacggcagaaattttttcagatcctttgttgacacgtaacacgccgcccattaaagtgcgccccgttcccgagggaaacagtcgaaatgactgcttgccggtggtctcgaggcgttatccagaagtacgtaacgcattgaatttgttaggtaattttaccgaagcaaaacttaccggaactggaagttgtgtgtttgggggcttcccaagcaaagctgaagctgataaagtctcggcccttctgacagagacccttacagggtttgtagcgaaaggaagcaacgtttcgatgttgcatcgcaagctgcaaagtctgctctaa

SEQ ID NO: 2126 - protein, 283 aa, Pseudomonas fluorescens
MTAPRLTLPSPAKLNLMLHILGRREDGYHELQTLFQFLDYGDEITFAVRDDGVIRLHTEFDGVPHDSNLIVRAAKKLQEQSACSLGIDIWIDKILPMGGGIGGGSSNAATTLLGLNHLWRLGWDEDRLAALGLTLGADVPVFVRGHAAFAEGVGEKLTPVEPAEPWYVVLVPQVSVSTAEIFSDPLLTRNTPPIKVRPVPEGNSRNDCLPVVSRRYPEVRNALNLLGNFTEAKLTGTGSCVFGGFPSKAEADKVSALLTETLTGFVAKGSNVSMLHRKLQSLL

SEQ ID NO: 2127 - DNA, 861 bp, Pseudomonas putida
  CDS (1)..(861): transl_table=11
atgcaaaagctcaccctgcccgccccggccaagctcaacctgtggctgcacatcatcggccgccgcgcagacggctaccacgaactggaaacggtgtttcagtttctagaccatggcgacgaactgagttttgccctgcgtgacgatggcgtgatccgcttgcacaccgagatcgaggccgtcccccacgacagcaacctgatcgtacgggccgcgcgcatgctgcaagcacaatcgggcaccacgcttggcgccgacatctggctgaccaaggtactgcccatgggcggaggtatcggcggtggcagctcagacgccgcgaccaccctgctggccctggcccacctgtggcaactggactgggacgaagaccgcctggccgcactgggcctgagcctgggcgccgatgtgccggtgttcgtacgcggccacgcagcattcgcgcaaggcgtaggcgaacaactgaccccggtcgacccgatcgaaccctggtatgtcgtgctggtgccgcaagtgtctgtcagcacagtagaaattttttcacatccacagttgacacgtgattctctcccccttaagatgcgccccgttcccgagggaaacagtcgaaatgactgccaaccggtggtagagcagaattacccagaagttcgcaatgcgttgaattcactgggaaaattcactgaggctcgactaaccggcactggaagttgtgtgtttggggccttcccaagcaaagccgaagctgataaagttctggcccttctttcagcgacccaaacagggtttgtggccaaaggaagcaatgtttcgatgttgcatcgtaagctgcaaagtctggtcaagaagtcgagcgcatga

SEQ ID NO: 2128 - protein, 286 aa, Pseudomonas putida
MQKLTLPAPAKLNLWLHIIGRRADGYHELETVFQFLDHGDELSFALRDDGVIRLHTEIEAVPHDSNLIVRAARMLQAQSGTTLGADIWLTKVLPMGGGIGGGSSDAATTLLALAHLWQLDWDEDRLAALGLSLGADVPVFVRGHAAFAQGVGEQLTPVDPIEPWYVVLVPQVSVSTVEIFSHPQLTRDSLPLKMRPVPEGNSRNDCQPVVEQNYPEVRNALNSLGKFTEARLTGTGSCVFGAFPSKAEADKVLALLSATQTGFVAKGSNVSMLHRKLQSLVKKSSA

SEQ ID NO: 2129 - DNA, 849 bp, Pseudomonas syringae pv
  CDS (1)..(849): transl_table=11
atggttgaagcacaactggtgctgcccgccccggcaaaacttaacctgatgctgcacattctgggtcgccgtcctgacggctaccatgaactgcaaaccctgtttcaatttctcgattacggcgacgagctcggctttgcgcttcgccaagacggtgttattcgcctgcagaccgacgtccccggcgttgcgcatgacagcaacctgatcgtcaaagccgcccgcgccctgcaaaaacagtccggctgcaccctgggcatggacatctggctggaaaaacgcctgcccatgggtggcggtatcggcggtggcagctcggatgcggcaaccacattgctgggcctcaatcatttgtggcagttgggctgggatgaagatcgcctcgcacaactgggcctcacactgggtgccgatgtaccggtttttgtccgtggacacgccgcttttgctgagggtgtcggggaaattctgacccccgtagacccggaagaaccatggtatttggtgctcgtgccgcaagtcgctgtaagtacagcagaaattttttcagatccgttgttgacacgcgacactgcgcccattaaagtgcgccccgttcccaagggaaacagtcgaaatgactgtaaggcggctgtagagaggcgttacccagaagtacgtaacgctttgaatttgttaggtaaatttaccgaagcaaaattaaccggaactggaagttgtgtgtttggggccttcccaaacaaagctgaagctgataaagtctcggcccttcttacagagacccttacggggttcgtagcgaaaggaagtaacatttcgatgttgcatcgcaagctgcaaattctgtag

SEQ ID NO: 2130 - protein, 282 aa, Pseudomonas syringae pv
MVEAQLVLPAPAKLNLMLHILGRRPDGYHELQTLFQFLDYGDELGFALRQDGVIRLQTDVPGVAHDSNLIVKAARALQKQSGCTLGMDIWLEKRLPMGGGIGGGSSDAATTLLGLNHLWQLGWDEDRLAQLGLTLGADVPVFVRGHAAFAEGVGEILTPVDPEEPWYLVLVPQVAVSTAEIFSDPLLTRDTAPIKVRPVPKGNSRNDCKAAVERRYPEVRNALNLLGKFTEAKLTGTGSCVFGAFPNKAEADKVSALLTETLTGFVAKGSNISMLHRKLQIL

SEQ ID NO: 2131 - DNA, 849 bp, Pseudomonas syringae pv
  CDS (1)..(849): transl_table=11
atgagcacgccacaactggttttgcctgccccggcaaaactcaacctcatgctgcacattctcggacgtcgtcctgacggttatcacgaactgcagacgctgtttcagtttctcgattacggcgacgaactgggttttagcgttcgcgaagatggcgagattcacctgcagaccgacgttcccggtgtcccgcatgacagtaacctgatcgtcaaagccgcccgtgccctgcaacaacagtccggttgtacactgggcatggacatctggctggaaaaacgcctgcccatgggtggcggtatcggcggcggcagctcggatgcagcgaccaccctgctggccctgaatcatttatggcagctcggctgggatgaggatcgtctggcgcaactggggctgacactgggcgccgatgtaccggttttcgtacgtggacatgccgcttttgctgagggcgtcggcgaaattctcaccccggtggacccggaagaaccctggtatttggtgctcgtcccgcaagtatctgtaagtacagcagaaattttttcagatccgttgttgacacgcgacacgccgcccattaaagtgcgccccgttcccaagggaaacagtcgaaatgactgtaaggcggttgtagagaggcgttacccagaagtacgtaacgctttgaatttgttaggtaaatttaccgaagcaaaattaaccggaactggaagttgtgtgtttggggccttcccaaacaaagctgaagctgataaagtctcggcccttcttacagagacccttacggggttcgtagcgaaaggaagcaacatctcgatgttgcatcgcaagctgcaaattctgtag

SEQ ID NO: 2132 - protein, 282 aa, Pseudomonas syringae pv
MSTPQLVLPAPAKLNLMLHILGRRPDGYHELQTLFQFLDYGDELGFSVREDGEIHLQTDVPGVPHDSNLIVKAARALQQQSGCTLGMDIWLEKRLPMGGGIGGGSSDAATTLLALNHLWQLGWDEDRLAQLGLTLGADVPVFVRGHAAFAEGVGEILTPVDPEEPWYLVLVPQVSVSTAEIFSDPLLTRDTPPIKVRPVPKGNSRNDCKAVVERRYPEVRNALNLLGKFTEAKLTGTGSCVFGAFPNKAEADKVSALLTETLTGFVAKGSNISMLHRKLQIL

SEQ ID NO: 2133 - DNA, 891 bp, Ralstonia eutropha
  CDS (1)..(891): transl_table=11
ttgaccgcagccttgaccgcggcacccaccctgccgccgccggaactgcgcgactgccccgcgccagccaagctcaacctgttcctgcacgtcacgggccggcgcccggacggctaccacatgctgcagacggtattccagctcgtggactggtgcgacacgctgcatttccgccgccgcgatgacggcgtcgtgacgcgcaccaccgacatcccgggcgtaccggcggagaccgacctgatcgtgcgtgccgcgcgcgcgttgcagcaggccacgggcacgcgcttcggtgccgatatcgcgatcgacaagatcctgccgatgggcggcggcatcggcggcggctcgtccgacgccgccacgacgctgctcgcgctgaaccacctgtggggcctgggcctgccgcgcgccgaactcatgcggatcgggctggcgctgggtgccgacgtgcccgtgttcgtgttcggcgagaacgcgttcgccgagggcattggcgaggaactgactgccgtcgacttgccggacagctggttcgtgatcgtccatccgaaacaacatgtgccgaccgcagaaattttttcggacgagtgcttgacaagggacacgcccctctccataattgcggtcttcgctgcttgcacaaacaaattctctttcggtcgcaacgacctggaagcgatagcaacagcgaagttcggcgaagttgcccgagcccttgaatggctgaagcagtttaatcagcatgcaaggatgaccggctccggagcctgcgtgtttgcacgttttcccgacgagcagaaggcgcagcaggttctgaagcggttgcctcccgagtgggatggcaggtgtgtgcgcagtctggcacgtcacccgctcgcagcgttcgcatag

SEQ ID NO: 2134 - protein, 296 aa, Ralstonia eutropha
MTAALTAAPTLPPPELRDCPAPAKLNLFLHVTGRRPDGYHMLQTVFQLVDWCDTLHFRRRDDGVVTRTTDIPGVPAETDLIVRAARALQQATGTRFGADIAIDKILPMGGGIGGGSSDAATTLLALNHLWGLGLPRAELMRIGLALGADVPVFVFGENAFAEGIGEELTAVDLPDSWFVIVHPKQHVPTAEIFSDECLTRDTPLSIIAVFAACTNKFSFGRNDLEAIATAKFGEVARALEWLKQFNQHARMTGSGACVFARFPDEQKAQQVLKRLPPEWDGRCVRSLARHPLAAFA

SEQ ID NO: 2135 - DNA, 870 bp, Ralstonia solanacearum
  CDS (1)..(870): transl_table=11
atgccctccgcgcccaccgaactgcgcgactgtcccgcgcccgccaagctcaacctgttcctgcacgtggtcggccgccggccggacggctatcacctgctgcagaccgtgttccagctgatcgactggtgcgacaccctgcacttcggccgccgcgccgacggccgcttggtgcgcaccaccgacatccccggcgttccggcggacgaagacctggtcatccgcgccgcccgcctgctgcaggcggagaccggctgcgcctacggcgccgacatcgcgctggaaaagcgcctgccgatgggcggcggcatcggcggcggctcgtccgatgcggcgacggcgctgctggcgctcaaccgcctgtgggggctcgacctgccgcgcgcgaagctgatgtcgctgggcctgcgcctgggcgctgacgtgcctttcttcctgttcggccagaacgcatttgccgagggcatcggtgaagcgctgacaccgatcgcgctgccgccggcgacctttgtggtcatccatccgcgcgtccatgtccccacccccgaaattttttccgatgaggggttgacacgtaacactcccctcaccataattacggactttcctgaccaacaaattgttttcgcttacggtcgcaacgatctgcaagcggtggcggaaaggaaatacggcgaaatcgcccgagctcttgcctggctgcgtcagttcagcccactggcaaggatgaccggatccggcgcctgcgtgttcgcaccgtttgatcgtgcagaacaggcacaagcggtggcggatcaggtgccttccgaatgggaaggtcggtgtgcggcaggtctgacgcatcacccgctcgcgatgttcgctgtataa

SEQ ID NO: 2136 - protein, 289 aa, Ralstonia solanacearum
MPSAPTELRDCPAPAKLNLFLHVVGRRPDGYHLLQTVFQLIDWCDTLHFGRRADGRLVRTTDIPGVPADEDLVIRAARLLQAETGCAYGADIALEKRLPMGGGIGGGSSDAATALLALNRLWGLDLPRAKLMSLGLRLGADVPFFLFGQNAFAEGIGEALTPIALPPATFVVIHPRVHVPTPEIFSDEGLTRNTPLTIITDFPDQQIVFAYGRNDLQAVAERKYGEIARALAWLRQFSPLARMTGSGACVFAPFDRAEQAQAVADQVPSEWEGRCAAGLTHHPLAMFAV

SEQ ID NO: 2137 - DNA, 888 bp, Rhizobium loti
  CDS (1)..(888): transl_table=11
gtggacaccgacatcggttcgcgcacctggcacgcgcatgccaagatcaatctggcgctgcacgtcaccggcaggcgtgctgacggctaccatctgatcgacagcctggcggtgttcacgcgcttcggcgacagggtcgagatcgccctcgccgacagcgacgatttcaccgtatccggccgttatgccccggcggttccgctcgacgccggcaatcttgtgctcaaggcgcgcgatgccttgcggcgggaggccggctccgggcgcaccccgccggtctcgataaagctggaaaagaacctgccgatcgcctccggcgttggcggcgggtcgagcgatgcagcggccgtgttgcgcggactggcacagacatgggccctggacatcgacgacgccgggctggcgcggatcggtctctcgcttggcgccgacgtgccgatgtgccttgcggcaaagccgctggtggcgcgcggcattggtgacgagctgtcgatggtaccggacttttcagcgctggggctggtcctggtcaatccaggcacgccggtctcgacggcggatgtcttcgcggccctgtcccgccgcgacaacgagcccctgccgccgctgccgcgcagcatcgatttccacagcctgcgcaactggctggaggtcacccgcaatgatctggagcctgcagcccttgcgctgcagcccgccataggcagggcgctatcatggctcaataaggccggatcgggattttcacgcatgtcgggatcgggcgcgacttgtttcggcctgttcgagaccggcaatgtcgccaagcgcgcggcggccgaaatccgcagccgccagcccgactggttcgtcgcggcgacgcgcagcatgtcatcagaggctgagtga

SEQ ID NO: 2138 - protein, 295 aa, Rhizobium loti
MDTDIGSRTWHAHAKINLALHVTGRRADGYHLIDSLAVFTRFGDRVEIALADSDDFTVSGRYAPAVPLDAGNLVLKARDALRREAGSGRTPPVSIKLEKNLPIASGVGGGSSDAAAVLRGLAQTWALDIDDAGLARIGLSLGADVPMCLAAKPLVARGIGDELSMVPDFSALGLVLVNPGTPVSTADVFAALSRRDNEPLPPLPRSIDFHSLRNWLEVTRNDLEPAALALQPAIGRALSWLNKAGSGFSRMSGSGATCFGLFETGNVAKRAAAEIRSRQPDWFVAATRSMSSEAE

SEQ ID NO: 2139 - DNA, 906 bp, Rhizobium meliloti
  CDS (1)..(906): transl_table=11
atgcaggcaggcggcattccgggcttcgcactgacctttgcggcgcccgccaagatcaatctcgcgctgcacgtcgtcgggcagcgcgccgacggccaccatctgctggaaagcctggtgaccttcgccgaatgtggcgaccgggtcgggctgatcgcggcggacagggaccgtttcacggtgtcgggccgcttcgcgaccgacctttcagccgagggcaatggtggtaatctcgtgctccgcgcccgggacctgctgcggcgcgagcttgcggcgcagggtagaatggcaggcccggttcatctgcatctcgagaagaacctgccgatagcatcggggatcggcggcggctcggccgatgcagccgcgactctgcgcgggctgctgtcgctctggggcgcgactgtcgaagcggcaagcctcaacagccttgcgctgcagctcggcgcggacgtcccgatgtgtctcgaccgggggcccctcgtcgcgagaggcatcggcgaagagatcacgcctcttcccgatctgccgcccttcgacgtcgtcctcgtcaatcccctcgtcgcggtctccacgccggttatcttccgatcgctcgtcaggaagaccaatcctccgctggtcttgcctgaagatgcccgctcgactgccgaatggctgacggccatggcggccatgcggaacgacctggagccgccggcacgtgcgcacgagccgatgatcgaaaccgtctcgaacgcattgcgcgacgcaggcgcggcgctcgtgcggatgtccggctcgggtgccacctgcttcggcctgttcacggggatgaaaagcgccgaacgtgccgctgagaccatttccgccggccacccgcgatggtacgttcaggcgacgcgaaccgcgggaaaatcaggataa

SEQ ID NO: 2140 - protein, 301 aa, Rhizobium meliloti
MQAGGIPGFALTFAAPAKINLALHVVGQRADGHHLLESLVTFAECGDRVGLIAADRDRFTVSGRFATDLSAEGNGGNLVLRARDLLRRELAAQGRMAGPVHLHLEKNLPIASGIGGGSADAAATLRGLLSLWGATVEAASLNSLALQLGADVPMCLDRGPLVARGIGEEITPLPDLPPFDVVLVNPLVAVSTPVIFRSLVRKTNPPLVLPEDARSTAEWLTAMAAMRNDLEPPARAHEPMIETVSNALRDAGAALVRMSGSGATCFGLFTGMKSAERAAETISAGHPRWYVQATRTAGKSG

SEQ ID NO: 2141 - DNA, 990 bp, Rhodopirellula baltica
  CDS (1)..(990): transl_table=11
gtgaccgaatctcgctggtattccacgtcgcctcccgccaaactcaatctcttcctcgaactcttggcacgtcgcgacgacggttttcatgaactggataccgtgatggtcgcgatcgattggcgagatgaacttcatgtccgtcgcaccacgaatcccggtgtccaactttcggttgattggacggatggacgaacttcggtcgctgcagaattgcaagtcgacgaagacaacgaattgctactggtcccgaccgatgacaaaaacctggtcgtgcgtgctctcaatcgtctcactgaaacgctgaggttagacggcggctgggaagttcaactgaacaaaaacattccaagcggggcgggaatgggtggcgccagcagcgatgctgcgtcggcgttgcaattgggatgggccgccgctcgtgagacgcaatcggacctgcccgaaacgcttaagaatgagacgcttctttctttagcagcggaaattggaagtgacgtcccatttttcttaggtgatctgcaagccgaccgtttggttcaatgcgcacatgcaaccggacgtggtgagaaattgaacttcttcacattagccaatccactgcacgcagtcgtcatttacccagcggcgagtgtttcgaccgcacaagtctattcaaggtgccaagtccccgattctccccaatctagcaacgaattattgcgtgctttgcaaggaatcgcagcggaatccgagttttcattgcataacgccttgcaagcgcccgcacgcgggctttcatcgcgcatcgatcccgccctagaatgtctgtcgaaggctggactgacacattgccacatgacgggcagcggttcggcttgcttcgctttggcagactcgtcgcaacaagcagcaatcgctgctgaaactttgcgttcgacttttccgggcggcgcattgatccgaccggttatgagttgtgtggtgccgtcggagatccacatcgcatag

SEQ ID NO: 2142 - protein, 329 aa, Rhodopirellula baltica
MTESRWYSTSPPAKLNLFLELLARRDDGFHELDTVMVAIDWRDELHVRRTTNPGVQLSVDWTDGRTSVAAELQVDEDNELLLVPTDDKNLVVRALNRLTETLRLDGGWEVQLNKNIPSGAGMGGASSDAASALQLGWAAARETQSDLPETLKNETLLSLAAEIGSDVPFFLGDLQADRLVQCAHATGRGEKLNFFTLANPLHAVVIYPAASVSTAQVYSRCQVPDSPQSSNELLRALQGIAAESEFSLHNALQAPARGLSSRIDPALECLSKAGLTHCHMTGSGSACFALADSSQQAAIAAETLRSTFPGGALIRPVMSCVVPSEIHIA

SEQ ID NO: 2143 - DNA, 900 bp, Rhodopseudomonas palustris
  CDS (1)..(900): transl_table=11
gtgactgacggctctgcgatgacactgcgcgacgaggcgcgcgccaaggtgaacctgacgctgcgtgtagtcggccgtcgccccgacggctaccacgagctggaaagcgtggtggcgttcgccgattgcgccgatcacctgaccctgcagcccggcgcagcgctgagcctgaccacgatcggccccggcgctcaggattgcggcgacagcgccgacaatctggtgctgaaggctgcgcggctgctcggtgagcgggtgccggacctgacgaccggcgccttcaccctcgacaagcatctgccggtggcggccggcatcggcggcggctcggccgacgctgccgcagcgctgcggctgctcgcccgcgccaatgatcttgccgtcgatgatccgcgcctgattgaagccgcccggctgaccggcgcggatgttccggtgtgcctgccgtcgaagccgtgtgtgatgaccggtgtcggcgagaagctgtcgccgctgccgctgccgcggatcccggccgtgatggtcaatccgcgggtaccggtggccaccaaggacgtgttcaccgcgctcggtctgaagcccggctcgctcgcagtcggcgccactgacgtcctcgctgcaccggcttggccggaagccggcgcgccgctcgccgattgggtcgtggcgctcgaggccggcaccaacgatctcgaaccgccggccctcaaggtcgagccggtggtcggcaccgtgctggaggcgctgcgcgcgaccgccggtgtgcagctcgcccggatgtccggctcgggcgcgacctgctttgcgctgtatgccgatgacgcctcggcccgcgccgccgcagacgcgctctgcgccgcgcatcccggctggtgggtccacgccggcagcctgagctga

SEQ ID NO: 2144 - protein, 299 aa, Rhodopseudomonas palustris
MTDGSAMTLRDEARAKVNLTLRVVGRRPDGYHELESVVAFADCADHLTLQPGAALSLTTIGPGAQDCGDSADNLVLKAARLLGERVPDLTTGAFTLDKHLPVAAGIGGGSADAAAALRLLARANDLAVDDPRLIEAARLTGADVPVCLPSKPCVMTGVGEKLSPLPLPRIPAVMVNPRVPVATKDVFTALGLKPGSLAVGATDVLAAPAWPEAGAPLADWVVALEAGTNDLEPPALKVEPVVGTVLEALRATAGVQLARMSGSGATCFALYADDASARAAADALCAAHPGWWVHAGSLS

SEQ ID NO: 2145 - DNA, 915 bp, Rhodospirillum rubrum
  CDS (1)..(915): transl_table=11
atgacagcagtctttcccgccgccgacagcgtgatcgaagcggcctgcgccaaggtcaatctgacccttcacgtgaccgggcggcgcgccaatggctatcacgacctcgacagtctggtggttttcagcggcgcccacgacacgctgatcgcctgcccggccgaagggctgtcgcttgccatgaccggccccaccgccgccctgctcgacgccgaagacgacaacatcattctgcgggcggcgcggcggctggccgagcgcgccggtcaccggcccgatgcccggttaaccctgatcaagcgcctaccggtcgccgccggcatcggtggcggctcggccgatggcgcggcgaccctgcgggcgctgtcgcgcttgtggaagatcgccctgccgcaagccgagatgctgaccctagccgccgagctgggcgccgatgtgccggtgtgcctggtcggcaaggccgtgaccatggccggcatcggcgaccatctgacccccgccccgcccctgcccgaagcttggctgctgctggtcaatccgcgtcgggcggtgcccacgccccaggtgttcaaggcccgccagggcggcttttccgccgccaacccgttgacggaaagcccggccagcgcccaggccctggccgaggcgctcaaacggcggaccaacgacctcgccgaaccggcccgtcggatcgagccggtgatcgacgaggtcttgcgcaccctcgcggctctgccgggttgcctgctcgcccgcatgtcgggcagcggcgccacctgctttggtctgttcgccgaccagacctccgccgatttcggcatggcttcattgcgtgaaacgcatgggtcatggtgggcctcggccgaccgcctgatcggcgataccgcccgggttcccgccgcgcttgcggtttga

SEQ ID NO: 2146 - protein, 304 aa, Rhodospirillum rubrum
MTAVFPAADSVIEAACAKVNLTLHVTGRRANGYHDLDSLVVFSGAHDTLIACPAEGLSLAMTGPTAALLDAEDDNIILRAARRLAERAGHRPDARLTLIKRLPVAAGIGGGSADGAATLRALSRLWKIALPQAEMLTLAAELGADVPVCLVGKAVTMAGIGDHLTPAPPLPEAWLLLVNPRRAVPTPQVFKARQGGFSAANPLTESPASAQALAEALKRRTNDLAEPARRIEPVIDEVLRTLAALPGCLLARMSGSGATCFGLFADQTSADFGMASLRETHGSWWASADRLIGDTARVPAALAV

SEQ ID NO: 2147 - DNA, 837 bp, Rhodobacter sphaeroides
  CDS (1)..(837): transl_table=11
atgactgaagcctttgcccgcgcgaagatcaacctgaccctgcatgtcaccggccagcggccggacggctatcaccttctcgactcgctcgtggtcttcgccgatgtgggcgaccgggtgcgggccgaaccggccgaagcgctgagcctcgccatcaccgggccgcaggcggcgaacctgccggtggcggacgacaatctggtgctgcgcgccgcccggacgctgggcggtcagggggcgcggctcacgctcgagaagcatctgcccgtggcctcgggtatcggcggcggctccgccgatgcggcggcggccctcgtggcgctggcccggctctggcaggtgccgctgccggaacccgccgctgtcctgaagctcggggccgacgtgccggtctgcctcgaaggccgcgcggtgcggatggccggggtgggcgagatcctgacgccgcttgcagcgcccttgcccgaaggctggctggtgctggcgaaccccggcgtgtcggtgccgacgcccccggttttcaaggcgctcgcccggcgggacaacccgccgatgcccgacgatctgcccggctggcccaccgtcgaggccctggccgcgttcctggccacgcagcgcaacgatctggagccgccggccatcgcgcttgcgcccgagatcgcccggacccgcgccgcccttgccgcgcaacgggggtgcctgctggcccgcatgtcgggatcgggcgcgacctgcttcggcctctttgccgccgaagaggccgcgcgggctgcggccgaggccatcggggcagagcaccccggctggtgggtggcgcctgcccgtatggtgggctga

SEQ ID NO: 2148 - protein, 278 aa, Rhodobacter sphaeroides
MTEAFARAKINLTLHVTGQRPDGYHLLDSLVVFADVGDRVRAEPAEALSLAITGPQAANLPVADDNLVLRAARTLGGQGARLTLEKHLPVASGIGGGSADAAAALVALARLWQVPLPEPAAVLKLGADVPVCLEGRAVRMAGVGEILTPLAAPLPEGWLVLANPGVSVPTPPVFKALARRDNPPMPDDLPGWPTVEALAAFLATQRNDLEPPAIALAPEIARTRAALAAQRGCLLARMSGSGATCFGLFAAEEAARAAAEAIGAEHPGWWVAPARMVG

SEQ ID NO: 2149 - DNA, 852 bp, Salmonella choleraesuis
  CDS (1)..(852): transl_table=11
atgatgacccattggccttctccggcaaaattaaatctgtttttatatatcaccggacagcgagcagacggctaccacacgctgcagacgctgtttcagtttctggattatggcgacacactccacatcgaaccgcgtcacgatggcgaaatccatttattaacgccggttaacggcgttgaaaatgaagacaatctgatcgtccgcgccgcgcggctgttgatgaaagtcgcctcggagagtggacgcctgcccgccggaagcggcgcggatatcagcattgagaagcgccttcccatgggcggcggtctgggtggcggctcgtctaacgccgcgaccgttctggtggcgctcaatcatctttggcaatgcgggctttccattgatgaactggcgacgctcggcctgacgctcggcgccgacgtcccggtctttgttcgtggccacgccgcgtttgccgaaggcgtaggcgaaatattaacgccggtgaatccgccggaaaaatggtatctggtcgcgccccctggcgtaagccttccgacgccggttatctttaaagatcctcaattgccgcgtaatacgccaaaaaggtcaatagatacgttactaaaatgtgaattcagcaatgattgcgaggttatcgcaagaaaacgttttcgcgaggttgatgcggcgctttcctggctgttagaatacgcgccgtcgcgcctgactgggacaggggcctgtgtctttgctgaattcgatacagagtcttgtgctcgccaggtgcttgagcaagccccggaatggctcaatgcttttgtggcgaagggtgtcaacctctccccattgcatcgagagttactctaa

SEQ ID NO: 2150 - protein, 283 aa, Salmonella choleraesuis
MMTHWPSPAKLNLFLYITGQRADGYHTLQTLFQFLDYGDTLHIEPRHDGEIHLLTPVNGVENEDNLIVRAARLLMKVASESGRLPAGSGADISIEKRLPMGGGLGGGSSNAATVLVALNHLWQCGLSIDELATLGLTLGADVPVFVRGHAAFAEGVGEILTPVNPPEKWYLVAPPGVSLPTPVIFKDPQLPRNTPKRSIDTLLKCEFSNDCEVIARKRFREVDAALSWLLEYAPSRLTGTGACVFAEFDTESCARQVLEQAPEWLNAFVAKGVNLSPLHRELL

SEQ ID NO: 2151 - DNA, 849 bp, Salmonella paratyphi
  CDS (1)..(849): transl_table=11
atgacccattggccttctccggcaaaattaaatctgtttttatatatcaccggacagcgtgcagacggctaccacacgctgcagacgctgtttcagtttctggattatggcgacacactccacatcgaaccgcgtcgcgatggcgaaatccatttattaacgccggttaacggcgttgaaaatgaagacaatctgatcgtccgcgccgcgcaactgttgatgaaaatcgcctcggagagtggacgcctgcccgccggaagcggcgcggatatcagcattgagaagcgccttcccatgggcggcggtctgggtggcggctcgtctaacgccgcgaccgttctggtggcgctcaatcatctttggcaatgcgggctttccattgatgaactggcgacgctcggcctgacgctcggcgccgacgtcccggtctttgttcgtggccacgccgcgtttgccgaaggcgtaggcgaaatattaacgccggtgaatccgccggaaaaatggtatctggtcgcgcaccctggcgtaagcattccgacgccggttatctttaaagatcctcaattgccgcgtaatacgccaaaaaggtcaatagatacgttactaaaatgtgaattcagcaatgattgcgaggttatcgcaagaaaacgttttcgcgaggttgatgcggcgctttcctggctgttagaatacgcgccgtcgcgcctgactgggacaggggcctgtgtctttgctgaattcgatacagagtcctgtgctcgccaggtgcttgagcaagccccggaatggctcaatgcttttgtggcgaagggtgtcaacctctccccattgcatcgagagttactctaa

SEQ ID NO: 2152 - protein, 282 aa, Salmonella paratyphi
MTHWPSPAKLNLFLYITGQRADGYHTLQTLFQFLDYGDTLHIEPRRDGEIHLLTPVNGVENEDNLIVRAAQLLMKIASESGRLPAGSGADISIEKRLPMGGGLGGGSSNAATVLVALNHLWQCGLSIDELATLGLTLGADVPVFVRGHAAFAEGVGEILTPVNPPEKWYLVAHPGVSIPTPVIFKDPQLPRNTPKRSIDTLLKCEFSNDCEVIARKRFREVDAALSWLLEYAPSRLTGTGACVFAEFDTESCARQVLEQAPEWLNAFVAKGVNLSPLHRELL

SEQ ID NO: 2153 - DNA, 852 bp, Salmonella typhi
  CDS (1)..(852): transl_table=11
atgatgacccattggccttctccggcaaaattaaatctgtttttatatatcaccggacagcgtgcagacggctaccacacgctgcagacgctgtttcagtttctggattatggcgacacactccacatcgaaccgcgtcacgatggcgaaatccatttattaacgccggtaaccggcgttgaaaatgaagacaatctgatcgtccgcgccgcgcggctgttgatgaaagtcgcctcggagagtggacgcctgcccgccggaagcggcgcggatatcagcattgagaagcgccttcccatgggcggcggtctgggtggcggctcgtctaacgccgcgaccgttctggtggcgctcaatcatctttggcaatgcgggctttccattgatgaactggcgacgctcggcctgacgctcggcgccgacgtcccggtctttgttcgtggccacgccgcgtttgccgaaggcgtaggcgaaatattaacgccggtgaatccgccggaaaaatggtatctggtcgcgcaccctggcgtaagcattccgacgccagttatctttaaagatcctcaattgccgcgtaatacgccaaaaaggtcaatagatacgttactaaaatgtgaattcagcaatgattgcgaggttatcgcaagaaaacgttttcgcgaggttgatgcggcgctttcctggctgttagaatacgcgccgtcgcgcctgactgggacaggggcctgtgtctttgctgaattcgatacagagtcttgtgctcgccaggtgcttgagcaagccccggaatggctcaatgcttttgtggcgaagggtgttaacctttccccattgcatcgagagttactctaa

SEQ ID NO: 2154 - protein, 283 aa, Salmonella typhi
MMTHWPSPAKLNLFLYITGQRADGYHTLQTLFQFLDYGDTLHIEPRHDGEIHLLTPVTGVENEDNLIVRAARLLMKVASESGRLPAGSGADISIEKRLPMGGGLGGGSSNAATVLVALNHLWQCGLSIDELATLGLTLGADVPVFVRGHAAFAEGVGEILTPVNPPEKWYLVAHPGVSIPTPVIFKDPQLPRNTPKRSIDTLLKCEFSNDCEVIARKRFREVDAALSWLLEYAPSRLTGTGACVFAEFDTESCARQVLEQAPEWLNAFVAKGVNLSPLHRELL

SEQ ID NO: 2155 - DNA, 852 bp, Salmonella typhimurium
  CDS (1)..(852): transl_table=11
atgatgacccattggccttctccggcaaaattaaatctgtttttatatatcaccggacagcgagcagacggctaccacacgctgcagacgctgtttcagtttctggattatggcgacacactccacatcgaaccgcgtcacgatggcgaaatccatttattaacgccggttaacggcgttgaaaatgaagacaatctgatcgtccgtgccgcgcggctgttgatgaaagtcgcctcggagagtgggcgcctgcccgccggaagcggtgcggatatcagcattgagaagcgccttcccatgggcggcggtctgggcggcggctcatctaacgccgcgaccgttctggtggcgctcaatcatctttggcaatgcgggctttccattgatgaactggcgacgctcggcctgacgctcggcgccgacgtcccggtctttgttcgtggccacgccgcgtttgccgaaggcgtaggcgaaatattaacgccggtgaatccgccggaaaaatggtatctggtcgcgcaccctggcgtaagcattcccacaccggttatctttaaagatcctcaattgccgcgtaatacgccaaaaaggtcaatagatacgttactaaaatgtgaattcagcaatgattgcgaggttatcgcaagaaaacgttttcgcgaggttgatgcggcgctttcttggctgttagaatacgcgccgtcgcgcctgactgggacaggggcctgtgtctttgctgaattcgatacagagtcttgtgctcgccaggtgcttgagcaagccccggaatggctcaatgcttttgtggcgaagggtgtcaacctctccccattgcatcgagagttactctaa

SEQ ID NO: 2156 - protein, 283 aa, Salmonella typhimurium
MMTHWPSPAKLNLFLYITGQRADGYHTLQTLFQFLDYGDTLHIEPRHDGEIHLLTPVNGVENEDNLIVRAARLLMKVASESGRLPAGSGADISIEKRLPMGGGLGGGSSNAATVLVALNHLWQCGLSIDELATLGLTLGADVPVFVRGHAAFAEGVGEILTPVNPPEKWYLVAHPGVSIPTPVIFKDPQLPRNTPKRSIDTLLKCEFSNDCEVIARKRFREVDAALSWLLEYAPSRLTGTGACVFAEFDTESCARQVLEQAPEWLNAFVAKGVNLSPLHRELL

SEQ ID NO: 2157 - DNA, 855 bp, Shewanella oneidensis
  CDS (1)..(855): transl_table=11
atgtcccaagagatttcacgtaattggcctgcgcccgccaaactcaatctgtttttgcatattaacggacgccgtagcgatggctatcatgaattgcaaaccctgtttcagtttgttgattgttgcgatcaactcgactttcgcgtaactgatacgcctgaactcattttgcattcgacgatgtcggcggttgtcgcggatagcgataacttaattctgagagccgcaaaatcattacaacaagccactggctttaacggtggcgctgaaatctggctcgataaacgtctgcccatgggcggcggtttgggcggtggctcatcggatgcggccaccacgctcgtggccttaaatcggttatggaacacccaattatcccatgatgaactagcggcgattggattaaaactcggtgccgatatccctgtttttattcatggtttcgccgcatttgcacagggggtgggtgagcgtttacaggcggttaatccggctgaattatggtatttagtcattgcgcctgatgcccatgtttccaccgcagccgtgttccaagatccactgctcccccgtaatacacctaagcttggcctcgatactttactgagccaaccctgggcaaatgattgccaagaactggtggtttctaaataccctcaagttgccaaggccttaggctggctgctagaatatgcgccgtcgagaatgaccggaacgggcgcatgcgtgtttggggagttttcgtcgcagcagcaagctctcgcagccttggcgaaattaccgtctgatatgcaaggatttgttgcaaaagggatgaatatttcgccgctaatagtgcgactcaatcgtccataa

SEQ ID NO: 2158 - protein, 284 aa, Shewanella oneidensis
MSQEISRNWPAPAKLNLFLHINGRRSDGYHELQTLFQFVDCCDQLDFRVTDTPELILHSTMSAVVADSDNLILRAAKSLQQATGFNGGAEIWLDKRLPMGGGLGGGSSDAATTLVALNRLWNTQLSHDELAAIGLKLGADIPVFIHGFAAFAQGVGERLQAVNPAELWYLVIAPDAHVSTAAVFQDPLLPRNTPKLGLDTLLSQPWANDCQELVVSKYPQVAKALGWLLEYAPSRMTGTGACVFGEFSSQQQALAALAKLPSDMQGFVAKGMNISPLIVRLNRP

SEQ ID NO: 2159 - DNA, 840 bp, Silicibacter pomeroyi
  CDS (1)..(840): transl_table=11
atggcgattgaggcctttgcgccggccaagatcaacctgaccctgcatgtgaccggccagcgggatgatggctatcacttgctcgattcgctggttgtcttcgcggatatcggagacaccatccgagtgtctgcgtcagacagggtgtcgttggatatcgacgggccagaggcgggcggacttgccgccgagccggacaatctggtgctgcgcgcggcccgccttctggcgcctgaacgcggcgctgcgatctcgctgacgaaacggctgcccgtggcctcgggtatcggtggggggtcggccgatgccgccgccaccctgcgcgccctggcgcagctttggggcctcgccgcgcccagtgcagaacaggcgctgacacttggcgctgatgttcctgtctgtctgttcccggtgccggcccgcatgcaaggtatcggtgaccggctgggcccgataccgccactgcccgcgatggatatcgttctggtcaatccgcgcgtcgcggtttcgacgcccgccgttttcaagtcgctgatcgtgaaggaaaacgcgcccatgaacccggaactgccgcgctggcgcgacctgcccgagttcacctgctggctcgccgatcagcgcaacgaccttgccgaacctgccatcgcgcagcagccggtgatcgccgatgtgctgaatgccctgcgcgacgcaggggcgcttttcgccggtatgtccggctcgggggccacctgttttggtctcttcccgtccgatgggcattccgccaagtcggttgccaaggccgtgctccgcctagcgcatccagggtggtggtgcgcccacgggcgtgttctctag

SEQ ID NO: 2160 - protein, 279 aa, Silicibacter pomeroyi
MAIEAFAPAKINLTLHVTGQRDDGYHLLDSLVVFADIGDTIRVSASDRVSLDIDGPEAGGLAAEPDNLVLRAARLLAPERGAAISLTKRLPVASGIGGGSADAAATLRALAQLWGLAAPSAEQALTLGADVPVCLFPVPARMQGIGDRLGPIPPLPAMDIVLVNPRVAVSTPAVFKSLIVKENAPMNPELPRWRDLPEFTCWLADQRNDLAEPAIAQQPVIADVLNALRDAGALFAGMSGSGATCFGLFPSDGHSAKSVAKAVLRLAHPGWWCAHGRVL

SEQ ID NO: 2161 - DNA, 849 bp, Staphylococcus aureus
  CDS (1)..(849): transl_table=11
atgatatatgaaacggcaccagccaaaattaattttacgctcgatacactttttaaaagaaatgatggctatcatgagattgaaatgataatgacaacagttgatttaaatgatcgtttaacttttcataaaagaaaagatcgaaagatagttgttgagattgaacataattatgtgccttctaatcataaaaatctcgcatatcgtgcagcgcaactatttattgagcaatatcaactaaagcaaggtgtaacaatttctatcgataaagaaatacctgtttctgctggcttagctggaggttcggctgatgcagcagcaacgttaagaggattgaatcgactttttaatataggggcgagtttggaagaattggctctactaggcagtaaaatcgggacagatattccgttttgtatttataataaaactgcactatgtactggaaaaggagaaaaaatcgagtttttaaataaaccaccttcagcttgggtgattcttgctaaaccaaacttaggcatatcatcaccagatatatttaagttgattaatttagataagcgttacgacgtacatacgaaaatgtgttatgaggccttagaaaatcgagattatcaacaattatgtcaaagtttgtctaatcgattagagccaatttctgtttcaaaacacccacaaatcgataaattaaaaaacaatatgttgaaaagtggtgcagatggtgcgttaatgagtggaagcggaccgactgtgtatgggctagcacaaaaagaaagccaagcaaaaaatatttataatgcagttaacggttgttgtaatgaagtgtacttagttagactattaggatag

SEQ ID NO: 2162 - protein, 282 aa, Staphylococcus aureus
MIYETAPAKINFTLDTLFKRNDGYHEIEMIMTTVDLNDRLTFHKRKDRKIVVEIEHNYVPSNHKNLAYRAAQLFIEQYQLKQGVTISIDKEIPVSAGLAGGSADAAATLRGLNRLFNIGASLEELALLGSKIGTDIPFCIYNKTALCTGKGEKIEFLNKPPSAWVILAKPNLGISSPDIFKLINLDKRYDVHTKMCYEALENRDYQQLCQSLSNRLEPISVSKHPQIDKLKNNMLKSGADGALMSGSGPTVYGLAQKESQAKNIYNAVNGCCNEVYLVRLLG

SEQ ID NO: 2163 - DNA, 849 bp, Staphylococcus epidermidis
  CDS (1)..(849): transl_table=11
atgatatatgaaactgcgccagctaagataaattttacgctcgacaccctttttaaaagagatgatggttatcatgaaattgaaatggtgatgacaacagttgatttaaatgatcgattatcttttgaaaagcgaactgataataaaattgttgtcgatattgagcataattatgttcctaacgataataaaaaccttgcgtataaagcagctgatttaatgtttgagagatttaatattaatgaaggtgtgacaatttcaatcgataaagatataccagtttcagctggacttgcaggtggttctgcggatgctgccgctacaatgagaggattgaatcgattgtttggtttaggtcaatctttagacgctttagctgcattaggcatacaaataggcacagacatacctttttgtatttataaccaaactgctgtgtgtacggggcgtggcgagcaagtaactttcctaaaaagaccaccttctgcatgggttgttttagctaagcctaacatcggaatttcatcacctgatgtatttaaagcactagatttaactgaagaacatatagttcataatgaaaagtgtaagcaagctttagagaacaatgattatcatttattatgcaatagtctttctaaccggttagagcctgtttctatggctatgcatcctgacattaaaaagattaaagataacatgctacaatgtggtgctgatggtgctttgatgagtggaagcggtcctactgtttacgggctagctcaaaaagaaagacaagctaaaaatatttataatgcagtgaatggttgttgtaatgaagtttacttagtaagattattaggatag

SEQ ID NO: 2164 - protein, 282 aa, Staphylococcus epidermidis
MIYETAPAKINFTLDTLFKRDDGYHEIEMVMTTVDLNDRLSFEKRTDNKIVVDIEHNYVPNDNKNLAYKAADLMFERFNINEGVTISIDKDIPVSAGLAGGSADAAATMRGLNRLFGLGQSLDALAALGIQIGTDIPFCIYNQTAVCTGRGEQVTFLKRPPSAWVVLAKPNIGISSPDVFKALDLTEEHIVHNEKCKQALENNDYHLLCNSLSNRLEPVSMAMHPDIKKIKDNMLQCGADGALMSGSGPTVYGLAQKERQAKNIYNAVNGCCNEVYLVRLLG

SEQ ID NO: 2165 - DNA, 852 bp, Streptococcus agalactiae serotype III
  CDS (1)..(852): transl_table=11
atgagaatttttgagaaagctcctgccaaacttaatttaggattagatattaaaggacgatgtgacgatggttatcatgaattagctatgattatggttagtattgatcttaatgactacgttaccatttctgagctaaaggaagattgtattgttatcgattctgatagtagcaaaatgcctttaaataatgataatgatgtgtttaaagctgcagatataatcaaaaatcaatatggtattaataaaggtgttcatattagattagaaaaatccattcctgtctgtgcaggactggggggtggttctactgatgctgctgctacaataagagctcttaatcgattatggaatcttcaaatggactatgacgaaatggttgctattggttttaaaattggtagtgatgttccttattgtcttggtgggggatgttcgttagtattaggtaaaggtgaaattgttaaacccttaccgacattgagaccatgttggatagttctggttaagccggattttggtatttcaactaaatccatttttagagatattgattgtaagtctataagcagagttgatattgatttattaaagtctgctattttgtcatcagattatcagttaatggtcaaatctatgggaaattcactcgaggatattacaattactaaaaatccagttataagtacaataaaagaacgtatgttaaattctggagccgatgttgcattaatgacaggaagtggaccaactgttttttcaatgtgttctacagagaaaaaagctgatcgtgtttttaatagtatgaaaggtttttgcaaagaagtttataaagttaggttgttgagataa

SEQ ID NO: 2166 - protein, 283 aa, Streptococcus agalactiae serotype III
MRIFEKAPAKLNLGLDIKGRCDDGYHELAMIMVSIDLNDYVTISELKEDCIVIDSDSSKMPLNNDNDVFKAADIIKNQYGINKGVHIRLEKSIPVCAGLGGGSTDAAATIRALNRLWNLQMDYDEMVAIGFKIGSDVPYCLGGGCSLVLGKGEIVKPLPTLRPCWIVLVKPDFGISTKSIFRDIDCKSISRVDIDLLKSAILSSDYQLMVKSMGNSLEDITITKNPVISTIKERMLNSGADVALMTGSGPTVFSMCSTEKKADRVFNSMKGFCKEVYKVRLLR

SEQ ID NO: 2167 - DNA, 894 bp, Streptomyces avermitilis
  CDS (1)..(894): transl_table=11
gtgagcgtgaccgtacgcgtccccgccaaggtcaacgtccagctcgcggtcggcggcgcccgccccgacggcttccacgacctggccaacgtcttcctcgccgtcggcctgtacgacgaggtcaccgcgaccccggccgacgagctgcgcatcacgtgcgaggggcccgacgccgcacaggtcccgctcgaccgcacgaacctcgccgcccgcgcggcgatcgcgctcgccgcgcgacacggcctcgcacccgacgtccacctccacatcgccaaggacatccccgtcgccggcggcatggccggcggcagcgcggacgcggccggcgcgctgctcgcctgcgacaccctgtggggtacgaacgcctcacgcggcgaactcctcgacatctgcgccgagttgggcagcgacgtgcccttcagcctggtcggcggcgccgcgctcggcaccgggcggggggagcggctgcgggagctggaggtcggcgggaccttccactgggtgttcgcggtggccgacggcgggctgtcgaccccggccgtgtacggggagttcgaccggctgagcgagggcgtacgcgtacccgagcccgtcgcctcccaggaactgctcgacgcgctggccaagggggacgccgtggccctcgccgccgccgtctccaacgacctccagcccgccgcgctgtccctcttcccgtccctcagcgacacgctggaggcgggccgtgccgccggcgccctcgccgcgctggtctccggctccgggccgaccacggcgttcctcacccgggacgcggacggcgcggacgccgtggcccaggcgctgctcgcgtccggtacatgccggacggcgcgggtcgccccgtctcccgcaccgggcgccaccgtcctgtag

SEQ ID NO: 2168 - protein, 297 aa, Streptomyces avermitilis
MSVTVRVPAKVNVQLAVGGARPDGFHDLANVFLAVGLYDEVTATPADELRITCEGPDAAQVPLDRTNLAARAAIALAARHGLAPDVHLHIAKDIPVAGGMAGGSADAAGALLACDTLWGTNASRGELLDICAELGSDVPFSLVGGAALGTGRGERLRELEVGGTFHWVFAVADGGLSTPAVYGEFDRLSEGVRVPEPVASQELLDALAKGDAVALAAAVSNDLQPAALSLFPSLSDTLEAGRAAGALAALVSGSGPTTAFLTRDADGADAVAQALLASGTCRTARVAPSPAPGATVL

SEQ ID NO: 2169 - DNA, 900 bp, Streptomyces coelicolor
  CDS (1)..(900): transl_table=11
gtgagcgtgacggtccgcgttcccgccaaggtcaacgtccagctcgcggtcggcgccgcccgccccgacggcttccacgacctggccaacgtcttcctcgccgtctccctgtacgacgaggtcaccgcgaccccggccgccgacggactccgcgtcacctgcgaggggcccgacgccggccaggtccccctggaccgcaccaacctcgcggcgcgcgcggccgaggcactggccgcgcggtacggccgcgcacccgacgtccacctccacatcgccaaggacatccccgtcgccggcggcatggcgggcggcagcgccgacggcgcgggagcgctgctcgcctgcgacgccctgtggggcaccggcgcctctcgcgaggagctgctggagatctgcgccgggctgggcagcgacgtgccgttcagcctggtcggcggggccgcgctgggcaccgggcggggggagcggctggcggagctggaggtggggggcgacttccactgggtgttcgcgctggccgcgcggggactgtcgacgccggccgtcttccgcgagttcgaccggctcggtgagggcctggaccttcccgagccggtcgccgaccaggcggtgctcgacgccctggccaagggcgacgccgccgcgctcgccgtcgccgtcaccaacgacctccagcccgccgcgctctccctcttccccgagctgtccgacaccctcgccgcgggacgggcggccggagcgctggcggccctggtctcgggctccgggcccacgacggccttcctcgccaccgacgccaggtccgcctccgacatcgcgggggtgctgcgggcctcggggacctgccgggacgtgcgtacggcggtgggggcggcggcgggggccaccgtcctggactga

SEQ ID NO: 2170 - protein, 299 aa, Streptomyces coelicolor
MSVTVRVPAKVNVQLAVGAARPDGFHDLANVFLAVSLYDEVTATPAADGLRVTCEGPDAGQVPLDRTNLAARAAEALAARYGRAPDVHLHIAKDIPVAGGMAGGSADGAGALLACDALWGTGASREELLEICAGLGSDVPFSLVGGAALGTGRGERLAELEVGGDFHWVFALAARGLSTPAVFREFDRLGEGLDLPEPVADQAVLDALAKGDAAALAVAVTNDLQPAALSLFPELSDTLAAGRAAGALAALVSGSGPTTAFLATDARSASDIAGVLRASGTCRDVRTAVGAAAGATVLD

SEQ ID NO: 2171 - DNA, 849 bp, Streptococcus mutans
  CDS (1)..(849): transl_table=11
atggaaattattgaaaaagctccggctaaaatcaatcttggtcttgatattgctggaaaatatcaagatggttttcacgaattgtcaatgattatggccagtgttgatttaaatgattatttgactattacagaaattgctgaggataagatagttgtagaatcaaataattgcaaattacctttaaaccgaaaaaatgatgtttataaagctgctcatcttctaaagaggagataccatatctcaacggggctcaaaatatctcttcaaaaaaagatacctatatgtgctggtttaggcggcgggtccagtgatgctgctgcaactttacgtgctctcaattgtttgtggaaactcaatttatcaccaaaagaactaattgatgttggttttgaaattggaagtgatgttccttattgcattgaagcaggctgtgctttaatttcaggtaaaggtgaaattgtagaacctttagcgactactttgtcaacttgggtggttttggtcaaacctgattttggaatttcaacgaaaacaatctttaaagaaattgatatggcaacaatttctcgagttgatattcctgctctaaaagaggcacttttagcaaattattatgaggatgccttacaatttatggggaattctcttgaagatattactattgctaaaaaaccttttattcaaaaaataaaaggccgtatgataaaatgtggtgcggatattgctttgatgacgggaagtggaccaaccgtttttgctctctgtcgaacggaaaaacgagcggatcgtgttgttaatagcatgaaaggtttttgtaaggaagtttataaagttagaatgttatag

SEQ ID NO: 2172 - protein, 282 aa, Streptococcus mutans
MEIIEKAPAKINLGLDIAGKYQDGFHELSMIMASVDLNDYLTITEIAEDKIVVESNNCKLPLNRKNDVYKAAHLLKRRYHISTGLKISLQKKIPICAGLGGGSSDAAATLRALNCLWKLNLSPKELIDVGFEIGSDVPYCIEAGCALISGKGEIVEPLATTLSTWVVLVKPDFGISTKTIFKEIDMATISRVDIPALKEALLANYYEDALQFMGNSLEDITIAKKPFIQKIKGRMIKCGADIALMTGSGPTVFALCRTEKRADRVVNSMKGFCKEVYKVRML

SEQ ID NO: 2173 - DNA, 849 bp, Symbiobacterium thermophilum
  CDS (1)..(849): transl_table=11
atggaaatcgaatgccacgcaaaggtgaacctcacgctggacgtgctgggtcggcggccggacggataccacgagatccgctccgtcatggtacccgtttctctccacgaccgcctggtcctcgagccggcggaggaggagatcgtcctggaaagccggccccccgcaaccgaccggttggaggagaacctggcctaccgggccgcggcgctgctccgggaggcgacgggatgcagccggggcgcggtcatccggctgcagaaaaccatcccggtggctgccggcctggccggcggctccaccgacgcggcgggcgtcctgacggggctcaaccgtctgtgggggacggggctctccgacggggagctggcggacctggccatccggctcggttccgacgtgccgttcttcatctggtcccgccccgcccgggtggaggggatcggcgagcgggtcaccccgctccccgtggccgggccgctctggatggtggtggccacgccggacgtccccaagtccaccggccaggtgtaccggtggttcgatgagctggcggacgtggggccgcgccccgacgccggggcgatggaagcggccctggcccggggggacgccgcggcggtgggccgcgccctctgcaacgtgttcgaacaggtcatgctgccgcgccacccggagatcgcccggctcaaggaggcgatgctggccgccggcgcgctgggggcggtcatgtcgggggcgggtccctcggtgctgggcgtggttccggaccgggaggcgggcggtaggctgctggagcgcatccggccgctttcccgggacgcctgggtggtccgtaccctggtctga

SEQ ID NO: 2174 - protein, 282 aa, Symbiobacterium thermophilum
MEIECHAKVNLTLDVLGRRPDGYHEIRSVMVPVSLHDRLVLEPAEEEIVLESRPPATDRLEENLAYRAAALLREATGCSRGAVIRLQKTIPVAAGLAGGSTDAAGVLTGLNRLWGTGLSDGELADLAIRLGSDVPFFIWSRPARVEGIGERVTPLPVAGPLWMVVATPDVPKSTGQVYRWFDELADVGPRPDAGAMEAALARGDAAAVGRALCNVFEQVMLPRHPEIARLKEAMLAAGALGAVMSGAGPSVLGVVPDREAGGRLLERIRPLSRDAWVVRTLV

SEQ ID NO: 2175 - DNA, 840 bp, Syntrophus aciditrophicus
  CDS (1)..(840): transl_table=11
atgttgaaaatattatcgccggcaaaggttaaccttcatcttcgggtcttaagaaaaagggaagacaactatcatgatttagccacactgatgcagaaagtcagtttgtacgatgaactggaattccagccatccaaccggggcatccaactgcgatgtcccggttttttccttcctgaaaacgaggagaacatcgttttcagggccgcaaagaaaattctctcattctccggctgccccaccggcgtcaccatcacgcttcgcaagaacatccctctggccgccggtctgggcggcggcagttccaacgccgcaatgaccctgctggccctcaacaaattattccgcctgaacttcagtactggtgaactgatgaaaatcggcgcaacgctgggagccgacgttccctttttcctgtttcatggtcccgcttgggcctacggcatcggagaccgcctgaaagcggcgctcgatgtccctaaggtgtggtttgtactgattaatcccggttttgaagtctcaaccagagtgatttatgaaaagctgaatttaggattgacaaaagaaataatccattatagcattccgcggtttttaagcatggaggacatggctgcagggctccataacgatcttgaaagcgtcacgttgaagatgcacccatccctgcaggagatcaaggatctgctctgttcgtatggcgctgcgggtgctttgatgtcagggagcgggccgaccgttttcgggatttttgaaaacgaagacaaggcaaaagaggcggaaaccgtactggggaaacccgggacatgggccgttttttgtgtacgctccatcgattga

SEQ ID NO: 2176 - protein, 279 aa, Syntrophus aciditrophicus
MLKILSPAKVNLHLRVLRKREDNYHDLATLMQKVSLYDELEFQPSNRGIQLRCPGFFLPENEENIVFRAAKKILSFSGCPTGVTITLRKNIPLAAGLGGGSSNAAMTLLALNKLFRLNFSTGELMKIGATLGADVPFFLFHGPAWAYGIGDRLKAALDVPKVWFVLINPGFEVSTRVIYEKLNLGLTKEIIHYSIPRFLSMEDMAAGLHNDLESVTLKMHPSLQEIKDLLCSYGAAGALMSGSGPTVFGIFENEDKAKEAETVLGKPGTWAVFCVRSID

SEQ ID NO: 2177 - DNA, 936 bp, Synechococcus elongatus
  CDS (1)..(936): transl_table=11
gtgtatcgtctgctggcgcctgccaaaattaatctctttttacaaattattggcaactgtttggatggcagtggttaccacgagctagtaatggtcatgcaggcggtttccctcatggatcgcctcgaactgattcctcggcgcgatcgcgagattaaggttcattgcacgaaccctgccgttccctgcgatcagcgaaatctggcctacaaagccgcagcactgctccagcagcattttccggatcgcgatggtgttgaaattttcatcgaaaaacggattcctctgggggcgggcttggcgggagggtcaaccaatgccgcagcggtactcgtgggcttagatctcctgtggcagttggggctgacccaaggggaattgcaaaccttggcagcgcaattgggggccgatgttcccttctgtttgcagggagggactgccttggctttagggcgcggcgaacagttgactcccctggcggatctacaggggttaacggtgatcctagggaagtatcgctcccttagtgtggccaccccttgggcctatcaaacctatcgccaggaatttgccgccacctatgcccaaacccccagcgaacaggaaaaagcccgccaagaggggggatccgcaatcctgctacaggccattcagcagcatgatattgccccattggcggccaacctccgtaatgatctagagaaagtggtgttgccccgctatcccttggtggcagagttaaaggagcaattcctggctgcgggagcgatcgccagcatgatgtccggatctgggccaacggtttttgccctagcgccctctgccgatgagggctacaggatcatgcaacgggtacggcgcgccctaccagaccccgatcttgatctatgggtctgtgagtgctgtccccacggcattcagttggagacgtcctag

SEQ ID NO: 2178 - protein, 311 aa, Synechococcus elongatus
MYRLLAPAKINLFLQIIGNCLDGSGYHELVMVMQAVSLMDRLELIPRRDREIKVHCTNPAVPCDQRNLAYKAAALLQQHFPDRDGVEIFIEKRIPLGAGLAGGSTNAAAVLVGLDLLWQLGLTQGELQTLAAQLGADVPFCLQGGTALALGRGEQLTPLADLQGLTVILGKYRSLSVATPWAYQTYRQEFAATYAQTPSEQEKARQEGGSAILLQAIQQHDIAPLAANLRNDLEKVVLPRYPLVAELKEQFLAAGAIASMMSGSGPTVFALAPSADEGYRIMQRVRRALPDPDLDLWVCECCPHGIQLETS

SEQ ID NO: 2179 - DNA, 945 bp, Synechococcus sp
  CDS (1)..(945): transl_table=11
atgaagacgctgacgctcgttgctccagccaaaatcaatttctatctggaaattctgggcgatcgccccgacggtttccacgagctggctatggtgatgcagagcattgccttgggggatcgtcttcacctacggcagcggcagggacaggggtttcagttgggctgcgatcgcgctgatttggaagttgatgagcgcaacttgattctgaaagcagcacagcggttgcagcgatcgttcccccaaattggcggcgttgacttttttctcgagaagcggattcccattggtgcagggctagcgggcggttcaaccgacggagctgccgctctcgtggggctggatattttcagtgggctgggtctgacacaaccagaactggaagcgatcgccgcagaattagggtccgatatgcccttctgtgttgccggtggtacccagctttgcaccagtcgcggtgaacaactgacgccgttaccccccctaccctctttatccttagtccttgctaagttcgaaagcttgtcggtctcgacgccgtgggcttacggtcgctaccgcgagcagtttggcgatcgctatctacaaaccgaaccagcgcggcgcgatcgcctgcaagcgctgcatgccgggccacttctgcaagcgatgagcgctggtgatcccgttgcgatcgcgcaacatcttcgcaacgatctcgaagcggtggtcttacccgagtacccccaggtggcggaactgagatctgtgctcgggaactgctctggcattcttgccgcccaaatgtccggttccgggccaagcgtctttggtattgctgagaatcctactgctgcccaagcggccgttgaacaagtccggcaagcgatcgctgatcccgacctgaagctctgggtgacccaaaccatcagccatgggatccagacggaaactctactgcggtag

SEQ ID NO: 2180 - protein, 314 aa, Synechococcus sp
MKTLTLVAPAKINFYLEILGDRPDGFHELAMVMQSIALGDRLHLRQRQGQGFQLGCDRADLEVDERNLILKAAQRLQRSFPQIGGVDFFLEKRIPIGAGLAGGSTDGAAALVGLDIFSGLGLTQPELEAIAAELGSDMPFCVAGGTQLCTSRGEQLTPLPPLPSLSLVLAKFESLSVSTPWAYGRYREQFGDRYLQTEPARRDRLQALHAGPLLQAMSAGDPVAIAQHLRNDLEAVVLPEYPQVAELRSVLGNCSGILAAQMSGSGPSVFGIAENPTAAQAAVEQVRQAIADPDLKLWVTQTISHGIQTETLLR

SEQ ID NO: 2181 - DNA, 924 bp, Synechococcus sp
  CDS (1)..(924): transl_table=11
atgatcacggtgtcggccccggccaaagtcaacctgcacctagaggtcctggggctgcgctcggacggtttccatgagctggccatggtgatgcagagcatcgacttggcggatcgcctgagctttcagaacaccgccgatgcacaactcagcctcacctgcgatgacgccagcctcagcgtcggcgacgacaacctgatcctccgggccgcccagttgctgcgggaccgttcgggttttagtgaattgggggcgtcaattcatctggagaagcgcatccctatcggtgctggcctggctggtggctccagcgacggcgccgcggcactggtaggtctgaatgctctgtggggcttgggccacagcaccgcggatctggagcgaatggccgctgagctcggttcagacatgcccttctgtgtggccggaggatgtcagctctgcttcgggcgaggcgaacaactggaagccgtgccgccaacgccccaacccttggcggtgctcttggtcaaagaccccacggtgagcgtctcaacgccctgggcctacaagcgttgccgcgagctcaagcaatcccactacctcgctgatgaggcggcttttgaacaacgccggcaagccttgcgcagcgttgattggctccagccattgcgcagcgatttgccacctcctttgcgcaatgacctgcaggacgtggtggcgcccgaaacagctgcggtgcgttcggcgctcgatttgttggacagcgttccccaaagcttggcggtggccatgagcggttctggacccagttgcttcgggctgttctccgatctggcgtcgtgccgccatgcgcaggatcagcttgctacccagctggagcgtgccggcctgaaggcctggtcttgcgccctccgcagcgatggcgtgaggatcgaggcatga

SEQ ID NO: 2182 - protein, 307 aa, Synechococcus sp
MITVSAPAKVNLHLEVLGLRSDGFHELAMVMQSIDLADRLSFQNTADAQLSLTCDDASLSVGDDNLILRAAQLLRDRSGFSELGASIHLEKRIPIGAGLAGGSSDGAAALVGLNALWGLGHSTADLERMAAELGSDMPFCVAGGCQLCFGRGEQLEAVPPTPQPLAVLLVKDPTVSVSTPWAYKRCRELKQSHYLADEAAFEQRRQALRSVDWLQPLRSDLPPPLRNDLQDVVAPETAAVRSALDLLDSVPQSLAVAMSGSGPSCFGLFSDLASCRHAQDQLATQLERAGLKAWSCALRSDGVRIEA

SEQ ID NO: 2183 - DNA, 948 bp, Synechocystis sp
  CDS (1)..(948): transl_table=11
atgcattcctacaccctccatgccccggccaaaattaatcttttcctcgaaattcttggcgatcgccccgacggtttccacgaattggtaatggtgttgcagagcattgccctgggggataaaattaccgtgcgggccaacggcaccgatgacatccggctcagttgtggggatagtcccttggccaacgatgccaccaatttggcctaccgagcggcccagttgatgattaacaattttccccaagcccatgataattacggcggcgtagatatcaccttgaccaagcatattcccatggcggcgggcttagcggggggctcggccgatgcagcggcggtgttagtcggtttagacctgctctggaatttaggcttaaccaggccggaattagaacagttagcggcccaactgggttccgacattcccttttgcattggcggtggcacggcgatcgccacgggacggggggaaatcctcgaccccttaccggacggcaattgcttctgggtggtattggccaaacatcgttccatagaagtttctaccccctgggcttaccaaacctatcgtcaaaagtttggcaagaattacctaaacgatgaccagtcccagcgagcccggcggaaaaccatccatgcagggcccctactccagggcattcagcaccgcaacccagggcaaatcgccagccatatccacaacgatttagaaaaagttgtgctcccggctcatcagcctgtagcccagttacgtcaggtcctacagtcagcggggggattgggcaccatgatgtccggctccggccccagcgtgtttaccctttgccgggagcaagcagaagcggaacaggtcctggcgatcgccaaagaaaaattaaacgaccccgacgtggatttttggctaacccacaccatcggccacggcatccaaattatgaataattga

SEQ ID NO: 2184 - protein, 315 aa, Synechocystis sp
MHSYTLHAPAKINLFLEILGDRPDGFHELVMVLQSIALGDKITVRANGTDDIRLSCGDSPLANDATNLAYRAAQLMINNFPQAHDNYGGVDITLTKHIPMAAGLAGGSADAAAVLVGLDLLWNLGLTRPELEQLAAQLGSDIPFCIGGGTAIATGRGEILDPLPDGNCFWVVLAKHRSIEVSTPWAYQTYRQKFGKNYLNDDQSQRARRKTIHAGPLLQGIQHRNPGQIASHIHNDLEKVVLPAHQPVAQLRQVLQSAGGLGTMMSGSGPSVFTLCREQAEAEQVLAIAKEKLNDPDVDFWLTHTIGHGIQIMNN

SEQ ID NO: 2185 - DNA, 924 bp, Thermobifida fusca
  CDS (1)..(924): transl_table=11
gtgaacgccccgacttccgtcaccgtgcgggtccccgcgaaggtgaacttgcggcttgccgtggggccggtccgcggcgatggataccacggcttggtcaacgtcttccacgcggtctcgctctacgacgaggttaccgtttctccccgctccgaccttgcgcccggacaggcggtgctcagtgtggacggggagcgaccggaccacgtggcccgcgtgcccctcgacgacagcaacctcgcggcgcgcgccgccgccctgctggcccgccacgtgccccacgccaccggggtgcacatccacgtgcacaaggccattcctgtggccggtggcatggctgggggaagcgctgatgcggctgccgcgctcgtggcgtgcgatgcgctctgggaaggcggcaccccccgcgagcggctgctggagctggccgcagagctcggcagcgacgtcgccttcccgttgatcggctgcaccgcggtgggcaccgggcgcggcgagcagctctccccgctccccgtccaggggacgttccactgggtgttcgccctcgtcgacgggggcctgtccacgacgaaagtattcgcggaatacgaccggctgcgaccggacgcccccgagcccacgctcgacgacgcgctagtcgccgcgctcgccgccggggacgcccgtcggctgggtgcggcactcaccaacgacctccagccagccgccttggcgctccgccccgaactgggggacctccttgaggcgggccgtgccgcgggagcgctgggcgccctcgtgtccggctccggacccacgtgtgcgttcctcgccgagtcggcggaccacgcccgcgagcttgccgctgccttgcgcgcgagcggcacgtgtgcggacacggtgaccgcccacggcccggtccccggcgccaccgtggtgtag

SEQ ID NO: 2186 - protein, 307 aa, Thermobifida fusca
MNAPTSVTVRVPAKVNLRLAVGPVRGDGYHGLVNVFHAVSLYDEVTVSPRSDLAPGQAVLSVDGERPDHVARVPLDDSNLAARAAALLARHVPHATGVHIHVHKAIPVAGGMAGGSADAAAALVACDALWEGGTPRERLLELAAELGSDVAFPLIGCTAVGTGRGEQLSPLPVQGTFHWVFALVDGGLSTTKVFAEYDRLRPDAPEPTLDDALVAALAAGDARRLGAALTNDLQPAALALRPELGDLLEAGRAAGALGALVSGSGPTCAFLAESADHARELAAALRASGTCADTVTAHGPVPGATVV

SEQ ID NO: 2187 - DNA, 816 bp, Thermotoga maritima
  CDS (1)..(816): transl_table=11
ttggtcgaaaatatcggcagcggttctgctgaacttgtttcttacgcaaaactgaatctctacctggatgtgcttggaaaaagatccgacggatatcacgaaatagtgggattgtttcagacgatttctcttcacgacacactaactgtggaaatctgtgatagaggtttctatctggaaagcagcgtagctctgccctcggacaacacgatcaaaagagcctgggagatgttcaggaaaaacacaggaaaagaattcggtctcaaagtcacgttgaaaaaggagatcccagtaggctctggcctcggtgggggaagctctaacgctgcagcggttctcagatatcttggtgaagttttcaaaatacctcttgaagaccttctgaatatagcagctcaggtgggaagcgatgtacccttttttctttacggaggaaccgctcttgtgagaggaagaggagaaatcgtggagaaactcgaggatatcgaaggatactctgttgatttgttcttcccgggcattcactcttcaacgaaagaaatgtatctgtctctcacaccagagatgtacaggaaaggacccggcagggtagaggaactgcacagggcttaccttgaaagaaattacgaaaagataaaggaactctcttacaacgtgtttgagaaggtgttcttagagaaacacccggaggtaatggatggactgagaaactttggcgatggttccatagtgaaaatgatgacgggaagcggaagtgtctttttcgctctatatcctctggacaagggaaattactcgtttgtgggaggtgtttaa

SEQ ID NO: 2188 - protein, 271 aa, Thermotoga maritima
MVENIGSGSAELVSYAKLNLYLDVLGKRSDGYHEIVGLFQTISLHDTLTVEICDRGFYLESSVALPSDNTIKRAWEMFRKNTGKEFGLKVTLKKEIPVGSGLGGGSSNAAAVLRYLGEVFKIPLEDLLNIAAQVGSDVPFFLYGGTALVRGRGEIVEKLEDIEGYSVDLFFPGIHSSTKEMYLSLTPEMYRKGPGRVEELHRAYLERNYEKIKELSYNVFEKVFLEKHPEVMDGLRNFGDGSIVKMMTGSGSVFFALYPLDKGNYSFVGGV

SEQ ID NO: 2189 - DNA, 828 bp, Thermus thermophilus
  CDS (1)..(828): transl_table=11
atggagcgcctagcccctgcgaaggtcaacctcgggctttccgtccgcttccgtcgggaggacgggtaccacgagctccacaccctcttcgcccccttctccctggcggaccggctggtggtggagcccgtttcgtcgggcctccacttccaggggccttacgggcgcgagaacctggcctaccgggcggcctccctctacctcgaggcggcgggccaacccgggggcgtgcgcatccttttggagaagcggatccccgagggggccgggctcgggggcgggagttccgacgcggcccaggtccttctcgccctccaggccctctacccggcggaggtggacctcttcgccctggcccggaccctcggggcggacgtccccttctttctcctcgggcggggggcggaggcccggggggtgggggagaggcttaagcccctcgccttgcccccggtccccgcggtggtcttttttcccgggctccgggtgcccacgcccttggtctaccgcgccgtgcggccggaggacttcggcccggacctccccgtggaggccatcctcgaggccttggcccggggggaggagcccccgtactggaatagcctggaaggccccgccttccgcctcttccccgagctcaaggaggtgcggggccggatgcgggctttggggcttaggggggtgctcatgtcgggctcggggagcgccttcttcgggcttgcggaaggcccagaccacgcgaggcgggcggcggaggcgcttagggcctgggggcgcgcctgggccggcacgctgggaggtggggatgctgggtctggacctgcttaa

SEQ ID NO: 2190 - protein, 275 aa, Thermus thermophilus
MERLAPAKVNLGLSVRFRREDGYHELHTLFAPFSLADRLVVEPVSSGLHFQGPYGRENLAYRAASLYLEAAGQPGGVRILLEKRIPEGAGLGGGSSDAAQVLLALQALYPAEVDLFALARTLGADVPFFLLGRGAEARGVGERLKPLALPPVPAVVFFPGLRVPTPLVYRAVRPEDFGPDLPVEAILEALARGEEPPYWNSLEGPAFRLFPELKEVRGRMRALGLRGVLMSGSGSAFFGLAEGPDHARRAAEALRAWGRAWAGTLGGGDAGSGPA

SEQ ID NO: 2191 - DNA, 864 bp, Thermoanaerobacter tengcongensis
  CDS (1)..(864): transl_table=11
atgaagcttagaataaaggcctatgcaaaagtaaatctcacgcttgacgttttgtcaaagagggaagatggatatcatgaaattttaagtgtgatgcagtcaattgacctggctgatgtgattgaatttgagaaagcaaaggaaattttgtttgaatgcgaccatgagagagttcccaaaggagaagaaaacctcataatgaaggcttttaatgcgataagagataggtattttttaaatgaaggtataaaaataaagctttttaaaaatattcctttggctgccggccttgctggaggaagtgcagatgctgctgctacaattgtagcattagataagctctggaatttaaaccttacagaaaaagagatggaagaaatagcgtcagaagtagggtctgacgtgcctttctgccttaagggaggaacaaagcttgctagtggaagaggagaaaagcttcaagatttagagggaattcctttgaatttgcttcttgtcaagcctgatttagaaatttctacaaaagaagtttacactgaatgggataattccgggtttaaaagcttaaactctacttttttatttgttgaggctttgaagaagggggatttattagaaattgctaggaatataagcaatgaccttgaaagagtgacctctcaaaagtatagagtgattgaagatataaagaaaagtttgatagagaaaggagctctatctgcttctatgacaggaagcggtcctacggtatacggtgtttttaatgatgttgaaaagcttgtaagggcttatcatgaccttaagggagtttatccttttgttgccatttctaaaactatagacaaggggttagaaatattatga

SEQ ID NO: 2192 - protein, 287 aa, Thermoanaerobacter tengcongensis
MKLRIKAYAKVNLTLDVLSKREDGYHEILSVMQSIDLADVIEFEKAKEILFECDHERVPKGEENLIMKAFNAIRDRYFLNEGIKIKLFKNIPLAAGLAGGSADAAATIVALDKLWNLNLTEKEMEEIASEVGSDVPFCLKGGTKLASGRGEKLQDLEGIPLNLLLVKPDLEISTKEVYTEWDNSGFKSLNSTFLFVEALKKGDLLEIARNISNDLERVTSQKYRVIEDIKKSLIEKGALSASMTGSGPTVYGVFNDVEKLVRAYHDLKGVYPFVAISKTIDKGLEIL

SEQ ID NO: 2193 - DNA, 837 bp, Thiobacillus denitrificans
  CDS (1)..(837): transl_table=11
atgagccaggcgtttcccgcgccggcgaagctcaatcttttcctccacgtcgtcggtcgccgcgacgacggataccatctgctgcagagcgtgtttcgtctgatcgaccgcgccgacaccgtgcacctggaattgcgcgatgacggccgaatcgtgcgcgaaggcgctttgccgggcgtgagcgaagatcaggatctgaccgtccgcgcggcccgactcctgcagccctacgcgcgcccgggcgccggggtcggcatccgtctcgacaagcggctgccgatgggcgggggcctcggcggcggcagttccgatgcggcgaccgtgctgctcgcgctcaaccgcctgtgggaggtcgatctgccgcgccagcgcttgcaggcgctcgccctgcgactcggcgccgacgtgccggtcttcgttttcggtcagacggcgttcgcggagggggtcggcgaactgttgcagccgatcggcgcgccggtcgcgtggtacgtcgtgctgacgccgccggtgcacgtgccgaccgcggcaatttttgccgcgccggaattgacacgcaacacgcctgccctcaaaatagcgcccttttccgcgggcatgggtcataacgacctcgagcccgtggtcgtcggccggtacccggaagtcggtcgccacctgcagtggctcggtcagttcggggaggcgcggatgaccggttcgggcgcctgcgttttcgcatcgttcgcaaccgaggatgccgcgcgcagcgtgctgcaggcgctgcccgatacgatgcagggttttgtggcgcgaggtctggacaagcaccccttgtacgactttgtgcctgagtag

SEQ ID NO: 2194 - protein, 278 aa, Thiobacillus denitrificans
MSQAFPAPAKLNLFLHVVGRRDDGYHLLQSVFRLIDRADTVHLELRDDGRIVREGALPGVSEDQDLTVRAARLLQPYARPGAGVGIRLDKRLPMGGGLGGGSSDAATVLLALNRLWEVDLPRQRLQALALRLGADVPVFVFGQTAFAEGVGELLQPIGAPVAWYVVLTPPVHVPTAAIFAAPELTRNTPALKIAPFSAGMGHNDLEPVVVGRYPEVGRHLQWLGQFGEARMTGSGACVFASFATEDAARSVLQALPDTMQGFVARGLDKHPLYDFVPE

SEQ ID NO: 2195 - DNA, 855 bp, Treponema denticola
  CDS (1)..(855): transl_table=11
atgattaaaagtgcgattagccttaaagctcatgcaaaaattaatctgcatttggaagttttaggaaagagaagcgacggatttcatgacatcgtaagtgtttttgctccgatttctcttgccgatgagcttttgatgcaaagaaaaccggataaaaaagaatgtaaggtattgtctcctttggctgaattgccggcagaaaatacaattacaagagcttatgaagagtttaaaaactttgccggtatttctgaaggcatttccgttaggattttaaaaagaatccctgaaggtgccggattgggaggcgggtcttccgatgccgcttcggttttgcgggggcttaacgatatgttttctaccggtttagcggaagaagacttaagggctatagctttgaaaataggaagcgatgttcccttttttttgggaaatgaggctgcggttgtaagaggccgcggagaaacgataaaaagggtttcagttttttcagattattttgggattttgatttatcccgaaataaaaagcgctacacccagggcttacagccttttaggccgtaaagaatcggagatactgaatcctgcttttaatcctgagcttttttgcggtaaagattgccgtgaatggcctttttttaacagttttgaagacgttctttttacggaatatcctgcaataaaaaaggcaaaacaagaccttttaactaacggggctgattttgctcttatgagcggtgccggttcttcagttttcgggctttttaaaaatgaaaaaaccgtcaaaaatgcttattctaagcttttagccgaatatggacgatgttttttctttttgttacttgcgttctga

SEQ ID NO: 2196 - protein, 284 aa, Treponema denticola
MIKSAISLKAHAKINLHLEVLGKRSDGFHDIVSVFAPISLADELLMQRKPDKKECKVLSPLAELPAENTITRAYEEFKNFAGISEGISVRILKRIPEGAGLGGGSSDAASVLRGLNDMFSTGLAEEDLRAIALKIGSDVPFFLGNEAAVVRGRGETIKRVSVFSDYFGILIYPEIKSATPRAYSLLGRKESEILNPAFNPELFCGKDCREWPFFNSFEDVLFTEYPAIKKAKQDLLTNGADFALMSGAGSSVFGLFKNEKTVKNAYSKLLAEYGRCFFFLLLAF

SEQ ID NO: 2197 - DNA, 876 bp, Treponema pallidum
  CDS (1)..(876): transl_table=11
  misc_feature (775)..(775): s is g or c
gtgcagtcgctgagtttgcgcgctcacgcaaaggtgaacatgcatctgtgggttggtgcacgtcgggccgatggtcttcactcgattgagagtgtaatgcagcgcattacgcttgcggattctttgtctctttcgcgcctggatatccctggccggtgtgaggtgtgttcgccttatatggctctgcctcgagaaaacacgctgacccgtgcgtatgcgcggttttgtcaggtaactggcgttcacgatggtgtgcgcgtgcgcgtagtgaagcgtatccctgcagggtctggacttggtggggggtctgctgatgctgccgcgcttttgtgtggccttgatacgttgtttgggacgaccctttctgctcgggttctacgagaagtggcgtatagtgtcggcagtgatgtcccttttttcctggcttcccaggctgcgtgcgtgctaggtggtggtgagcagctcgttccccttgttccaaagactggctatctggggcttttggtctggccgggattgcacagcggttctgcacaggcctatgaggatttggacaggttgcgtgcgtgcggcgtacatgctgccgacggcgagcagtactctctgcgtggggctaccgcgctttctgcgcactatgcacaggattgtgcgcggtggcggttttttaatagcttagatgcccctgtacagcgtcggtaccctgtagtcgcccttgcgcgttgggatctggcccgtgcgggtgcgtgctttacagcgatgagtggaagcgggagcscggtttttggtctgtatcgggatgaggaggagcttcggcgcgcgcataagctgcttgcaaagcggtggtgttggtgtgtgcgtgtccggttatgtgggtag

SEQ ID NO: 2198 - protein, 291 aa, Treponema pallidum
  misc_feature (259)..(259): The Xaa at location 259 stands for Ala, or Pro.
MQSLSLRAHAKVNMHLWVGARRADGLHSIESVMQRITLADSLSLSRLDIPGRCEVCSPYMALPRENTLTRAYARFCQVTGVHDGVRVRVVKRIPAGSGLGGGSADAAALLCGLDTLFGTTLSARVLREVAYSVGSDVPFFLASQAACVLGGGEQLVPLVPKTGYLGLLVWPGLHSGSAQAYEDLDRLRACGVHAADGEQYSLRGATALSAHYAQDCARWRFFNSLDAPVQRRYPVVALARWDLARAGACFTAMSGSGSXVFGLYRDEEELRRAHKLLAKRWCWCVRVRLCG

SEQ ID NO: 2199 - DNA, 888 bp, Vibrio cholerae
  CDS (1)..(888): transl_table=11
atggacgctgctcccatgatccacggcacaaccgtgtggccttcaccggccaaactcaacctgttcctttacatcacaggtcgtcgagctaacggctatcacgatctgcagaccttgtttcagtttctcgatcacggtgatgagttaaccattaccgccaacaacagcggcaacatcaccctctctcctgctctggccgatgtcgcgttagaagataacctgatttacaaagccgcgatggcactcaaaaatgcggcgcaatcaccactcggcgcagacattcaactgcacaaggtgttgcctatgggcggcggaattggtggcggatcatccaatgcggccactaccttagtcgcactcaattacttgtggcaaactgggcttagcgatgatcaattggctgaaattgggctggcactcggagcggatgtccctgtctttactcgtggttttgcggcttttgctgaaggagttggcgaagaattatccgcagtagagccagaggaaaaatggtatctcgtggttcgccctgcggtcagcatcgcgacaaaagatattttcactcatccacagctgatgagaaacacgccaaagcgtgatctggcaagccttcttaccaccccgtacgaaaacgattgcgaaaaaattgtccgatcactgtaccccgaggttgataagcaactttcatggctgctacaatacgcgccgtcaagattgaccgggacgggatcttgcgtttttgctgagttttcgagcaggaaagatgcacaggccgtctttgctcaattatctgacaacgtcttagcgtttgtcgcccaagggcgcaatgtttcaccgctcagaaagacgttggctgactaccaatcagctaaaatccgaccttactaa

SEQ ID NO: 2200 - protein, 295 aa, Vibrio cholerae
MDAAPMIHGTTVWPSPAKLNLFLYITGRRANGYHDLQTLFQFLDHGDELTITANNSGNITLSPALADVALEDNLIYKAAMALKNAAQSPLGADIQLHKVLPMGGGIGGGSSNAATTLVALNYLWQTGLSDDQLAEIGLALGADVPVFTRGFAAFAEGVGEELSAVEPEEKWYLVVRPAVSIATKDIFTHPQLMRNTPKRDLASLLTTPYENDCEKIVRSLYPEVDKQLSWLLQYAPSRLTGTGSCVFAEFSSRKDAQAVFAQLSDNVLAFVAQGRNVSPLRKTLADYQSAKIRPY

SEQ ID NO: 2201 - DNA, 888 bp, Vibrio parahaemolyticus
  CDS (1)..(888): transl_table=11
atggaacatcacccaatgatcgaaacttcaacccgctggccgtctccggcgaaattgaatctctttctatacatcaatggccgcacagaaaacggctatcacgagttacaaaccttattccaattcgtcgatcacggagatgagctcaccattcaagcaaaccattctggtgatgttacgatttctccagagatagaaggtgtgcctcttcaagacaatttaatttggaaagctgcaactgcgctgcaaaattacgctcactgctcttttggtgcacatatcgaactgcacaaagttttaccaatgggtggtggaattggcggcggctcttcaaatgccgctacgacacttgtggcactcaactacttgtggcagctcaatttaactgatgatgaattagccgaaattggcctaaaactgggcgctgacgtgcctgtttttgtgcgcggtttttccgcttttgctgaaggtgtgggtgagaagctttctccagccaacccggaagaaaagtggtatctcgtcgtgagaccaaatgtttctattgcgacagcggatatattccgtcatccagatctgacacgaaacacaccaaaacgagatctagaaacacttttgaacgcgccgagcgtaaacgattgcgaaaaaattgtacgaatgctctacccagaggttgataagcaactttcatggctgctacaatacgcgccgtcaagattgacggggacaggatcttgcgtttttgctgaattttcgagcaaatcggaagcagaaactatccttgcacaactctctgataaagtctcggcatttgtcgctcaagggcgcaatatttcgccactaaaagagactttggctgaataccaatcagcctcacaccgacctatttaa

SEQ ID NO: 2202 - protein, 295 aa, Vibrio parahaemolyticus
MEHHPMIETSTRWPSPAKLNLFLYINGRTENGYHELQTLFQFVDHGDELTIQANHSGDVTISPEIEGVPLQDNLIWKAATALQNYAHCSFGAHIELHKVLPMGGGIGGGSSNAATTLVALNYLWQLNLTDDELAEIGLKLGADVPVFVRGFSAFAEGVGEKLSPANPEEKWYLVVRPNVSIATADIFRHPDLTRNTPKRDLETLLNAPSVNDCEKIVRMLYPEVDKQLSWLLQYAPSRLTGTGSCVFAEFSSKSEAETILAQLSDKVSAFVAQGRNISPLKETLAEYQSASHRPI

SEQ ID NO: 2203 - DNA, 873 bp, Vibrio vulnificus
  CDS (1)..(873): transl_table=11
atgatcaccagcccaactacttggccctcaccggccaaactcaatcttttcttgtacatcaatggtcgtactgacaatggttatcacgaactgcaaacgttatttcagtttctcgaccatggcgatcaactcacgattacagccaatgacagcggtcatatcacactgacgccagacattgtcgatctccccgtagaacaaaatctcatttggaaagcggccaatgcactccagaaaaagacgggatgtaccttgggcgccaacattcatctgaacaaaatattgccgatgggcggcggtatcggtggtggttcttccaatgcagcaacggcattggttgcactgaattttctttggcaacttggtctttctgatgatgaattagccgacattggcttaaaactgggcgcggatgtgcccgtttttgtgcgcggccatgcggcatttgctgaaggtgttggcgaaaaactgactccagcacaaccagaagagaagtggtatttggtggtgagacccgatgtgcacatcgccaccgtcgatattttcacgcatccacaattgacgagaaatacgccaaagcgttctctggaaacgcttcttgacagcgaatacggaaacgattgcgaaaaaattgtccgaatgatccacccaaaggttgataagcaactttcatggctgctacaatacgcgccgtcaagattgacggggaccggatcttgcgttttcgctgaatttaacagcagatctgaagcggaatcaatccttgcccaactctctgacaatgtctcggcatttgtcgctcaagggcgcaatatttcgccgctaaaagagacgttggctgattatctttcagcccaaaaccgacctatttaa

SEQ ID NO: 2204 - protein, 290 aa, Vibrio vulnificus
MITSPTTWPSPAKLNLFLYINGRTDNGYHELQTLFQFLDHGDQLTITANDSGHITLTPDIVDLPVEQNLIWKAANALQKKTGCTLGANIHLNKILPMGGGIGGGSSNAATALVALNFLWQLGLSDDELADIGLKLGADVPVFVRGHAAFAEGVGEKLTPAQPEEKWYLVVRPDVHIATVDIFTHPQLTRNTPKRSLETLLDSEYGNDCEKIVRMIHPKVDKQLSWLLQYAPSRLTGTGSCVFAEFNSRSEAESILAQLSDNVSAFVAQGRNISPLKETLADYLSAQNRPI

SEQ ID NO: 2205 - DNA, 888 bp, Vibrio vulnificus
  CDS (1)..(888): transl_table=11
gtggacgctaaaataatgatcaccagcccaactacttggccctcaccggccaaactcaatcttttcttgtacatcaatggccgtactgacaatggttatcacgaactgcaaacgttatttcagtttctcgaccatggcgatcaactcacgattacagtcaatgacagcggtcatatcacactgacgccagacattgtcgatctccccgtagaacaaaatctcatttggaaagcggccaatgcactcaaaaaaaagacgggatgtaccttgggcgccaacattcatctgaacaaaatattgccgatgggcggcggtattggcggtggttcttccaatgcagcaacggcattggttgcactgaattttctttggcaacttggtctttctgatgatgaattagccgacattggcttaaaactgggcgcggatgtgcccgtttttgtgcgcggccatgcggcatttgctgaaggtgttggtgaaaaactgactccagcacaaccagaagagaagtggtatttggtggtgagacccgatgtgcacatcgccaccgtcgatattttcacgcatccagatttgacgagaaatacgccaaagcgttctctggaaacgcttcttgacagcgaatacggaaacgattgcgaaaaaattgtccgaatgatccacccaaaggttgataagcaactttcatggctgctacaatacgcgccgtcaagattgacggggaccggatcttgcgttttcgctgaatttaacagcagatctgaagcggaatcaatccttgcccaactctctgacaatgtctcggcatttgtcgctcaagggcgcaatatttcgccgctaaaagagacgttggctgattatctttcagcccaaaaccgacctatttaa

SEQ ID NO: 2206 - protein, 295 aa, Vibrio vulnificus
MDAKIMITSPTTWPSPAKLNLFLYINGRTDNGYHELQTLFQFLDHGDQLTITVNDSGHITLTPDIVDLPVEQNLIWKAANALKKKTGCTLGANIHLNKILPMGGGIGGGSSNAATALVALNFLWQLGLSDDELADIGLKLGADVPVFVRGHAAFAEGVGEKLTPAQPEEKWYLVVRPDVHIATVDIFTHPDLTRNTPKRSLETLLDSEYGNDCEKIVRMIHPKVDKQLSWLLQYAPSRLTGTGSCVFAEFNSRSEAESILAQLSDNVSAFVAQGRNISPLKETLADYLSAQNRPI

SEQ ID NO: 2207 - DNA, 915 bp, Wigglesworthia glossinidia brevipalpis
  CDS (1)..(915): transl_table=11
atgcattttaataataaaaataaatcgttggattgtttaaatacaaaaatatggccatctccagcaaaaataaatttatttttatcagtcactggaattagaaaagacggatatcattttatacaaactttatttcaatttttgaattatggagattatttaatttttaatactacttcggataaaaaaataaaattaataaataaaatacatggaattagaaatgaaaataatctaattattagagcagctaaatctttaaaagattttatgtggaaaaataaaaatcatgatactcctggagtaaaaattttcattaaaaaatatatacctataggaggaggattaggaggaggatcttctaatgcagcaacaactttaatagctttaaacgaacattggaaatgtaaattaagtttaaatactttagcggatttaggattacaaatcggaatagatattccagtttttatatatggaaaatcagcatttgcagaaggtataggagaaaaattatcattgtttcaacctaaagaaaaattttatttaatagtaataccacctataaaaatttctactaaattaatatttaataaatttattttaaataaaaaaagttatttaaaatcttgtaatcaatatttgaaaaaaccattaaaaaatgattttgaaccaatgataagaaaaaattttattattattgataatttaattaattatttgtctaaattttcaaattttagattaactggaacaggtagctgcattttttctgaatttgattcagaatgtaaagctaaagaaatattgtataaattaccaaataaaatcaaaggatttgttagcaaaggaaccaatatatcttatctaaaagaaattttaaaaataagatctaattttaatgttttatcttaa

SEQ ID NO: 2208 - protein, 304 aa, Wigglesworthia glossinidia brevipalpis
MHFNNKNKSLDCLNTKIWPSPAKINLFLSVTGIRKDGYHFIQTLFQFLNYGDYLIFNTTSDKKIKLINKIHGIRNENNLIIRAAKSLKDFMWKNKNHDTPGVKIFIKKYIPIGGGLGGGSSNAATTLIALNEHWKCKLSLNTLADLGLQIGIDIPVFIYGKSAFAEGIGEKLSLFQPKEKFYLIVIPPIKISTKLIFNKFILNKKSYLKSCNQYLKKPLKNDFEPMIRKNFIIIDNLINYLSKFSNFRLTGTGSCIFSEFDSECKAKEILYKLPNKIKGFVSKGTNISYLKEILKIRSNFNVLS

SEQ ID NO: 2209 - DNA, 867 bp, Wolbachia pipientis wMel
  CDS (1)..(867): transl_table=11
atgaaaagtttttgtgtaaaggcgcctgcaaaaatcaatctttttttgcatgttgtagacaaaaaagaaacagggtatcacttgattgaaggtttatttgtctttgctaatctctctaattttttggaaataaaagtaggtgagaaggattctagatacgataactctacagttgaatttataaactccgagtctaaaataaataaccaatataacactgtaatgaaagcggttaatctgctgcttaggcatgctcctgtacgcactaaagtcactgtaaaggttgtaaaaaatataccaattgctgcaggacttggtagcggatcctcagatgctggagctgtggtacgtacgctagggaagctgtgggagattgataggacgattttaaatgaaatagccttaaacgttggtgctgatgttcccgcaagcgtagatagcaagccagtttttgttagaggtattggcgaagaattatgccacattaaaaaattctctttacctacaaatgtggtgcttgtgaaaccgaaaaaaaggtttttgagtacaccagaggtattttccaaacatgaaggaaaattttctgagccaattaaatggagcgatgacgctgaaaaggatttgttgaagtttcttaaagagacgagaaacgatcttcaagaaatagcaataagctttgtacctgaaattaaggatgtgatatcaacacttaagtcacaagaaggctctatactttctcgcatgtcaggcagtggtgtatcatgctttggaatattcgatagtgaggaaaatgcaaaagctgctgcagttaatatcggaaaaaagcaaccagaatggtgggtatgcaacactcaattaatagtttga

SEQ ID NO: 2210 - protein, 288 aa, Wolbachia pipientis wMel
MKSFCVKAPAKINLFLHVVDKKETGYHLIEGLFVFANLSNFLEIKVGEKDSRYDNSTVEFINSESKINNQYNTVMKAVNLLLRHAPVRTKVTVKVVKNIPIAAGLGSGSSDAGAVVRTLGKLWEIDRTILNEIALNVGADVPASVDSKPVFVRGIGEELCHIKKFSLPTNVVLVKPKKRFLSTPEVFSKHEGKFSEPIKWSDDAEKDLLKFLKETRNDLQEIAISFVPEIKDVISTLKSQEGSILSRMSGSGVSCFGIFDSEENAKAAAVNIGKKQPEWWVCNTQLIV

SEQ ID NO: 2211 - DNA, 888 bp, Xanthomonas axonopodis pv
  CDS (1)..(888): transl_table=11
atggaccgtatcgccctgatggacgcgccggacacggactggtcggcctggcctgcgccggccaagctgaatttgtttctgcaaatcaccgggcgccgggccgacggctaccacctgctgcagaccgtgttccggctgctggactggggggacaccgttcatcttcgcgtgcgcagcggcggccagatccgccgcgtgggcgagagtttgcccggcgtggccgaagacgatgatctggtgatccgcgccgcgcgcctgctgcagtcggcaaccggcgcccaggcgggcgcggagattcgggtcgacaaacgcatcccggcagggggaggtttcggcggcggttcctcggacgcggccaccgtgctggtggcgctcaatgccttgtggggcctgggtctggcggccgatgcgctggccgagctgggcttgcagctgggcgcagacgtgccggtcttcgtgcgcggccacaatgcctgggccgaaggcgtgggcgaacaactgaccccgatttccctgccggaagcggcctatctgctggtcgatcccggcgttcacgtgccgacaccagcgttatttcgatcacaggaattgacgcgggatgctgcgcccgcgaaaatagcggacttcgcttccggttccctgctcgacaatgcgttcgagccggtcctgcggcgccgcgaacccgccgtcgaggccgtgttccaggcgctttccagggtcggtacaccgcgcttgaccgggtcgggaagtggctgtttcgtcgaattcgccacgcgcgctgctgcagagcaggcgctggcgcagttgccgggcggcctgcgggcgtgggtggcggagggtgcatcgcactcgccgttgctcgacgcacgggacgcgagacaagtttga

SEQ ID NO: 2212 - protein, 295 aa, Xanthomonas axonopodis pv
MDRIALMDAPDTDWSAWPAPAKLNLFLQITGRRADGYHLLQTVFRLLDWGDTVHLRVRSGGQIRRVGESLPGVAEDDDLVIRAARLLQSATGAQAGAEIRVDKRIPAGGGFGGGSSDAATVLVALNALWGLGLAADALAELGLQLGADVPVFVRGHNAWAEGVGEQLTPISLPEAAYLLVDPGVHVPTPALFRSQELTRDAAPAKIADFASGSLLDNAFEPVLRRREPAVEAVFQALSRVGTPRLTGSGSGCFVEFATRAAAEQALAQLPGGLRAWVAEGASHSPLLDARDARQV

SEQ ID NO: 2213 - DNA, 897 bp, Xylella fastidiosa
  CDS (1)..(897): transl_table=11
atgggacgagttgatcccgtgagtgtcgtcattgatgacggtgtgggctggtcggcgtggccggcacctgccaagttgaatttatttttgcaaattaccgggcgacgtgttgatggttaccatgaattgcagactgtttttcgtctgcttgattggggtgatacgatccatctgcgggtgcgtgaagatggtcagattcatcgcattggtgagtcagtgactggggttgttgaggctgacgacttggtggtgcgtgcggcttatttgctaaaacatgcgactaatgtctatttaggggcagatatctttgttgaaaagcgaatcccagttggtggcggctttggcggtgggtcctctgatgcggcgactgtgcttcttgtgttgaatgcattgtggcacaccaggcttgacgttgcggttttggcggctttggggttacgtttgggggccgatgtgccggtatttgtacatgggtgtaatgcgtgggctgagggtgtcggtgagtgcttaacaccgatgattctgcctggagcggcctacctgctattggatccaggggtgtgtgtgccgacacgggagctgttccttgatccggatttgacgcgcgatgcgtcccccgcgacaataggcgacttcattgctggtactgcgtttggtaatgcattcgagccggttctgagacgccgcgagtctgcggttgcgggtgctcttgatgtgctctcagaggttggttttgcaagggtgactggctctggcagcggttgctttgtggaattcagtacgcgcgatgaggctgagtgtgctttggagcggctgccgtacgggttgtgtgcttgggttgctgatggcgcttcccgttctccgctgcttgatgtactgaaaacaatggaattttga

SEQ ID NO: 2214 - protein, 298 aa, Xylella fastidiosa
MGRVDPVSVVIDDGVGWSAWPAPAKLNLFLQITGRRVDGYHELQTVFRLLDWGDTIHLRVREDGQIHRIGESVTGVVEADDLVVRAAYLLKHATNVYLGADIFVEKRIPVGGGFGGGSSDAATVLLVLNALWHTRLDVAVLAALGLRLGADVPVFVHGCNAWAEGVGECLTPMILPGAAYLLLDPGVCVPTRELFLDPDLTRDASPATIGDFIAGTAFGNAFEPVLRRRESAVAGALDVLSEVGFARVTGSGSGCFVEFSTRDEAECALERLPYGLCAWVADGASRSPLLDVLKTMEF

SEQ ID NO: 2215 - DNA, 900 bp, Yersinia pestis
  CDS (1)..(900): transl_table=11
atgactaccgcgaatcaacctatatgtccgtcaccagcaaaatggccgtcaccggcaaaattgaatttgtttctttatatcaccgggcaacgcgccgacggctatcatcagttacaaacgctgtttcaatttcttgattatggtgatcaactgacgattgaaccgcgcgatgacaaccaaattcgcttattaacccccatagcaggggtggaaaatgagcaaaacctgatcgtccgcgcggcaaaaatgctgcaaaaacaccctggcaatacccccgtgccacgcggtgctgatatcagcattgataaatgtttaccgatgggcggtggattggggggcggttcgtctaatgcagccacagtcttggtggcactcaacctactgtggcaatgtggtttaactgatgaacaattagccgatctcggactaacattaggggctgatgtcccggtatttgttcggggccatgccgccttcgcagagggtattggtgaaaaattacagccagcagagcctgtagagaagtggtatttggtcatacaccccggtgtaaacatcccaacaccgattattttttctgatcctgaattaaaaagaaatacgccaatccgcccactggcggcgcttttaagcactccatacgcaaatgattgcgaaccgatcgcaagaaaacgttttcgcgaggttgaacaggctctttcatggctgttagaatacgccccgtcacgccttaccggtaccggcgcttgtgtgtttgcagaattcgacacggagtcatcggcccggcaggtgttaagtattgcccctgagtggttacatggttttgtcgcccgtggtgtaaatgtttcaccattgcatcgtgtacgctcagggaaaattgaaagcagtgagcgcagataa

SEQ ID NO: 2216 - protein, 299 aa, Yersinia pestis
MTTANQPICPSPAKWPSPAKLNLFLYITGQRADGYHQLQTLFQFLDYGDQLTIEPRDDNQIRLLTPIAGVENEQNLIVRAAKMLQKHPGNTPVPRGADISIDKCLPMGGGLGGGSSNAATVLVALNLLWQCGLTDEQLADLGLTLGADVPVFVRGHAAFAEGIGEKLQPAEPVEKWYLVIHPGVNIPTPIIFSDPELKRNTPIRPLAALLSTPYANDCEPIARKRFREVEQALSWLLEYAPSRLTGTGACVFAEFDTESSARQVLSIAPEWLHGFVARGVNVSPLHRVRSGKIESSERR

SEQ ID NO: 2217 - DNA, 1206 bp, Oryza sativa
  CDS (1)..(1206)
atggcttgctccacccacctcctgtcccagagcctctacccgctcaaccgcgctaacccggcagccgcgcgcgggcacctccggttccaggcttctcccagtgtgaggctcggctccggcaccagtcgccgccgggcgctgggcctgagagtcgccgcgtcggcggagcaagggaggaggcaagtggaggttgagtatgatctacaagcaaagttcaacaagctagcggaccaaattgaccagaatgctgggattacacggctgaacctattctcaccttgcaaaattaatgtgttcttgaggataacgggtaagagaccagatgggttccatgacctggcttctctgtttcatgtgataagtttgggtgatactatcaaattctcattgtcaccaagtaagagcaaagatcgcttgtcaaccaatgtagcaggtgtcccagttgatgaaagcaatttgatcatcaaggcactcaatctttaccgcaagaaaactggaactgacaactttttttggattcatcttgataagaaggtccctactggtgctggtcttggtggtggaagcagtaatgctgcaactgcgctgtgggccgccaaccagtttagtggctgcattgcttcagaaaaggagcttcaggagtggtctggagagataggatcggatattcccttcttcttttcacaaggagcagcgtattgtaccggtagaggagagattgttgaagatattcggaatccattgccagcaaatttgccgatggtactagtaaagccacctgaagcatgctcaacagctgaagtttacaagcggctcaggttagagcacacaagtcaaactgatcccttggtattgctcaaggaaattactgaaaatgggatatcacaggatgcctgtgttaatgatctagaacctccagcatttgaggtgttgccatcactaaagaggttgaagaaacgtataattgctgctaaccggggagattatgatgctgtttttatgtcaggaagtggaagcacaattgttgggattggttcaccagatccgcctgcatttgtgtatgatgatgatgactacaaggatacttttgtgtcagaggcctgcttcctcactcgtaatgagaacgagtggtacagagaaccaatctcatcgaaaatcactagcgaggaagatttacctccggaggtagcatcagtttctgactga

SEQ ID NO: 2218 - protein, 401 aa, Oryza sativa
MACSTHLLSQSLYPLNRANPAAARGHLRFQASPSVRLGSGTSRRRALGLRVAASAEQGRRQVEVEYDLQAKFNKLADQIDQNAGITRLNLFSPCKINVFLRITGKRPDGFHDLASLFHVISLGDTIKFSLSPSKSKDRLSTNVAGVPVDESNLIIKALNLYRKKTGTDNFFWIHLDKKVPTGAGLGGGSSNAATALWAANQFSGCIASEKELQEWSGEIGSDIPFFFSQGAAYCTGRGEIVEDIRNPLPANLPMVLVKPPEACSTAEVYKRLRLEHTSQTDPLVLLKEITENGISQDACVNDLEPPAFEVLPSLKRLKKRIIAANRGDYDAVFMSGSGSTIVGIGSPDPPAFVYDDDDYKDTFVSEACFLTRNENEWYREPISSKITSEEDLPPEVASVSD

SEQ ID NO: 2219 - DNA, 852 bp, Artificial sequence
  Unidentified
  CDS (1)..(852): transl_table=11
atgcggacacagtggccctctccggcaaaacttaatctgtttttatacattaccggtcagcgtgcggatggttaccacacgctgcaaacgctgtttcagtttcttgattacggcgacaccatcagcattgagcttcgtgacgatggggatattcgtctgttaacgcccgttgaaggcgtggaacatgaagataacctgatcgttcgcgcagcgcgattgttgatgaaaactgcggcagacagcgggcgtcttccgacgggaagcggtgcgaatatcagcattgacaagcgtttgccgatgggcggcggtctcggcggtggttcatccaatgccgcgacggtcctggtggcattaaatcatctctggcaatgcgggctaagcatggatgagctggcggaaatggggctgacgctgggcgcagatgttcctgtctttgttcgggggcatgccgcgtttgccgatggcgttggtgaaatactaacgccggtggatccgccagagaagtggtatctggtggcgcaccctggtgtaagtattccgactccggtgatttttaaagatcctgaactcccgcgcaatacgccaaaaaggtcaatagaaacgttgctaaaatgtgaattcagcaatgattgcgaggttatcgcaagaaaacgttttcgcgaggttgatgcggtgctttcctggctgttagaatacgccccgtcgcgcctgactgggacaggggcctgtgtctttgctgaatttgatacagagtctgaagcccgccaggtgctagagcaagccccggaatggctcaatggctttgtggcgaaaggcgctaatctttccccattgcacagagccatgctttaa

SEQ ID NO: 2220 - protein, 283 aa, Artificial sequence
  Unidentified
MRTQWPSPAKLNLFLYITGQRADGYHTLQTLFQFLDYGDTISIELRDDGDIRLLTPVEGVEHEDNLIVRAARLLMKTAADSGRLPTGSGANISIDKRLPMGGGLGGGSSNAATVLVALNHLWQCGLSMDELAEMGLTLGADVPVFVRGHAAFADGVGEILTPVDPPEKWYLVAHPGVSIPTPVIFKDPELPRNTPKRSIETLLKCEFSNDCEVIARKRFREVDAVLSWLLEYAPSRLTGTGACVFAEFDTESEARQVLEQAPEWLNGFVAKGANLSPLHRAML

SEQ ID NO: 2221 - DNA, 21 bp, Artificial sequence
  primer
atgcggacacagtggccctct

SEQ ID NO: 2222 - DNA, 24 bp, Artificial sequence
  primer
ttaaagcatggctctgtgcaatgg

SEQ ID NO: 2223 - protein, 365 aa, Artificial sequence
  consensus sequence
  Variant (4)..(4): Xaa in position 4 is any amino acid
  Variant (7)..(7): Xaa in position 7 is any amino acid
  Variant (9)..(13): Xaa in position 9 to 13 is any amino acid
  Variant (15)..(15): Xaa in position 15 is any amino acid
  Variant (17)..(18): Xaa in position 17 to 18 is any amino acid
  Variant (19)..(20): Xaa in position 19 to 20 is any or no amino acid
  Variant (22)..(33): Xaa in position 22 to 33 is any amino acid
  Variant (34)..(35): Xaa in position 34 to 35 is any or no amino acid
  Variant (37)..(54): Xaa in position 37 to 54 is any amino acid
  Variant (55)..(103): Xaa in position 55 to 103 is any or no amino acid
  Variant (105)..(117): Xaa in position 105 to 117 is any amino acid
  Variant (118)..(135): Xaa in position 118 to 135 is any or no amino acid
  Variant (137)..(138): Xaa in position 137 to 138 is any amino acid
  Variant (140)..(142): Xaa in position 140 to 142 is any amino acid
  Variant (144)..(145): Xaa in position 144 to 145 is any amino acid
  Variant (149)..(150): Xaa in position 149 to 150 is any amino acid
  Variant (153)..(154): Xaa in position 153 to 154 is any amino acid
  Variant (156)..(167): Xaa in position 156 to 167 is any amino acid
  Variant (168)..(177): Xaa in position 168 to 177 is any or no amino acid
  Variant (179)..(182): Xaa in position 179 to 182 is any amino acid
  Variant (183)..(185): Xaa in position 183 to 185 is any or no amino acid
  Variant (187)..(187): Xaa in position 187 is any amino acid
  Variant (189)..(189): Xaa in position 189 is any amino acid
  Variant (191)..(201): Xaa in position 191 to 201 is any amino acid
  Variant (202)..(208): Xaa in position 202 to 208 is any or no amino acid
  Variant (210)..(210): Xaa in position 210 is any amino acid
  Variant (213)..(233): Xaa in position 213 to 233 is any amino acid
  Variant (234)..(248): Xaa in position 234 to 248 is any or no amino acid
  Variant (250)..(266): Xaa in position 250 to 266 is any amino acid
  Variant (267)..(327): Xaa in position 267 to 327 is any or no amino acid
  Variant (329)..(347): Xaa in position 329 to 347 is any amino acid
  Variant (348)..(362): Xaa in position 348 to 362 is any or no amino acid
  Variant (364)..(364): Xaa in position 364 is any amino acid
PAKXNLXLXXXXXRXDXXXXHXXXXXXXXXXXXXXDXXXXXXXXXXXXXXXXXXXXXXXXXXXXXXXXXXXXXXXXXXXXXXXXXXXXXXXXXXXXXXXXXXXAXXXXXXXXXXXXXXXXXXXXXXXXXXXXXXXKXXPXXXGXXGGSXXAAXXLXXXXXXXXXXXXXXXXXXXXXXLXXXXXXXGXDXPXXXXXXXXXXXXXXXXXXGXGEXXXXXXXXXXXXXXXXXXXXXXXXXXXXXXXXXXXXTXXXXXXXXXXXXXXXXXXXXXXXXXXXXXXXXXXXXXXXXXXXXXXXXXXXXXXXXXXXXXXXXXXXXXXXXXXXXXXNXXXXXXXXXXXXXXXXXXXXXXXXXXXXXXXXXXGXG

SEQ ID NO: 2224 - protein, 17 aa, Artificial sequence
  protein pattern
  Variant (2)..(2): Xaa in position 2 is any amino acid
  Variant (3)..(3): Xaa in position 3 is Ile, Leu or Val
  Variant (5)..(5): Xaa in position 5 is any amino acid
  Variant (6)..(6): Xaa in position 6 is Ala, Gly, Gln or Ser
  Variant (7)..(7): Xaa in position 7 is Ala, Gly or Ser
  Variant (9)..(9): Xaa in position 9 is Phe, Ile, Leu, Met or Val
  Variant (10)..(10): Xaa in position 10 is Ala or Gly
  Variant (14)..(14): Xaa in position 14 is Ala, Gly, Ser or Thr
  Variant (15)..(15): Xaa in position 15 is Asp or Asn
KXXPXXXGXXGGSXXAA

SEQ ID NO: 2225 - protein, 17 aa, Artificial sequence
  protein pattern
  Variant (2)..(3): Xaa in position 2 to 3 is any or no amino acid
  Variant (5)..(5): Xaa in position 5 is Ile, Leu or Val
  Variant (8)..(8): Xaa in position 8 is any amino acid
  Variant (10)..(10): Xaa in position 10 is any amino acid
  Variant (11)..(11): Xaa in position 11 is Ile, Leu or Val
  Variant (12)..(16): Xaa in position 12 to 16 is any amino acid
  Variant (17)..(17): Xaa in position 17 is Cys, Asp, Asn, Ser or Thr
AXXKXNLXLXXXXXXXX

SEQ ID NO: 2226 - DNA, 741 bp, Escherichia coli
  CDS (1)..(741): transl_table=11
atgttagatcaagtatgccagcttgcacggaatgcaggcgatgccattatgcaggtctacgacgggacgaaaccgatggacgtcgtcagcaaagcggacaattctccggtaacggcagcggatattgccgctcacaccgttatcatggacggtttacgtacgctgacaccggatgttccggtcctttctgaagaagatcctcccggttgggaagtccgtcagcactggcagcgttactggctggtagacccgctggatggtactaaagagtttattaaacgtaatggcgaattcaccgttaacattgcgctcattgaccatggcaaaccgattttaggcgtggtgtatgcgccggtaatgaacgtaatgtacagcgcggcagaaggcaaagcgtggaaagaagagtgcggtgtgcgcaagcagattcaggtccgcgatgcgcgcccgccgctggtggtgatcagccgttcccatgcggatgcggagctgaaagagtatctgcaacagcttggcgaacatcagaccacgtccatcggctcttcgctgaaattctgcctggtggcggaaggacaggcgcagctgtacccgcgcttcggaccaacgaatatttgggacaccgccgctggacatgctgtagctgcagctgccggagcgcacgttcacgactggcagggtaaaccgctggattacactccgcgtgagtcgttcctgaatccggggttcagagtgtctatttactaa

SEQ ID NO: 2227 - protein, 246 aa, Escherichia coli
MLDQVCQLARNAGDAIMQVYDGTKPMDVVSKADNSPVTAADIAAHTVIMDGLRTLTPDVPVLSEEDPPGWEVRQHWQRYWLVDPLDGTKEFIKRNGEFTVNIALIDHGKPILGVVYAPVMNVMYSAAEGKAWKEECGVRKQIQVRDARPPLVVISRSHADAELKEYLQQLGEHQTTSIGSSLKFCLVAEGQAQLYPRFGPTNIWDTAAGHAVAAAAGAHVHDWQGKPLDYTPRESFLNPGFRVSIY

SEQ ID NO: 2228 - DNA, 786 bp, Xanthomonas campestris pv. campestris
  CDS (1)..(786): transl_table=11
atggaattgcgcgagaccgtgatcgcgatcgcgcgccaggccggcgacgccatcatggaggtgtacgcgcaggatttcgctgtcgagatcaaggccgacgccagcccgttgacccaggccgacctggccgccaaccgcgtcatcgtggaaggcttgcgccgggtcacgccggatgtgccggtgttgtcggaagagtctgtccacgtggcctgggaagaacgccagtactggaccagctattggctggtcgacccgctggatggcacgcgcgagttcgtcaagcgcaatggcgagttcagcgtcaacatcgccctgatccacatgggcgcgccggtgctcggcgtggtgcaggcgccggtcgatggacgggtctggtatgcggcgcgcggtgagaacgcctaccgccgcgatggcgaccgcgacgaaatgctgcattcgcgcacgcccgctgctgccccgttacgggtcgccgccagccgctcgcatcgcgatgcacgcacggccgccgcgctggaacgcatgggccagatcgacgtggtggcgcagggctcctcattgaagttctgccgcatcgccgaaggcgagctggatgtgtacccgcgcttcggtcccacctccgagtgggacaccgccgctggccagtgcgtgctgcatgccgccggtggcgcgttgctcgcggccggcaccggcaagccgttccgctacaaccgccgcgacaccttgctcaatggcgacttcatcgccctgggcgaccccggcttgccgtggcgcgactggctggtgtaa

SEQ ID NO: 2229 - protein, 261 aa, Xanthomonas campestris pv. campestris
MELRETVIAIARQAGDAIMEVYAQDFAVEIKADASPLTQADLAANRVIVEGLRRVTPDVPVLSEESVHVAWEERQYWTSYWLVDPLDGTREFVKRNGEFSVNIALIHMGAPVLGVVQAPVDGRVWYAARGENAYRRDGDRDEMLHSRTPAAAPLRVAASRSHRDARTAAALERMGQIDVVAQGSSLKFCRIAEGELDVYPRFGPTSEWDTAAGQCVLHAAGGALLAAGTGKPFRYNRRDTLLNGDFIALGDPGLPWRDWLV

SEQ ID NO: 2230 - DNA, 852 bp, Mesorhizobium loti MAFF303099
  CDS (1)..(852): transl_table=11
atgagcgcgacattgccgaagaccaatatgaaagcggcggcggcatctgacgacaggtcgatgctcgacatcttggagcggctggccctggcggccggacgcgaggtgatgcgcgttttccacgccggctgcgccgtcgaccggaaatcagacgcctcgccggtgaccgaggcggaccgtgagagcgagaagatcattctctccggcctgcgcgccgcatttcccgagattccctgcgtggccgaagaggaagcggcggctggaatcatgccgaccgatctcggcgaggccttcttcctcatcgacccgctcgacggcaccaaggaattcgtcaatcgccgtaccgacttcaccgtcaacatcgcgcttgtccgccatggcgtgccagaagtcggcgtcgtcttcgcgccgtgcaccggccgcttcttttcgggacggccgggcagcgcggaagccctggaaatcgatgacgactatcagatcgtcggccgccggccgatttcggtgagagcggccgcatcaccgctggccgtggttgccagccgctcccacaacacaccggaaaccgaagcctatattcgcgacctaggcgccgccgagatcgtttccgttggctcgtccttgaaattctgtcttctcgccagcgccgaggcggatgtctatccgcggttcggccgcaccatggaatgggacaccgcggcgggcgacgcggtgctgcgcgcggcgggcggcacgacacgtacgctggacggcaagcccttggcctacggcaaacgcgaccaggccgacgacgaggatttcgccaacccgcatttcatcgccagcggcagggcaggggcaatccccgcctga

SEQ ID NO: 2231 - protein, 283 aa, Mesorhizobium loti MAFF303099
MSATLPKTNMKAAAASDDRSMLDILERLALAAGREVMRVFHAGCAVDRKSDASPVTEADRESEKIILSGLRAAFPEIPCVAEEEAAAGIMPTDLGEAFFLIDPLDGTKEFVNRRTDFTVNIALVRHGVPEVGVVFAPCTGRFFSGRPGSAEALEIDDDYQIVGRRPISVRAAASPLAVVASRSHNTPETEAYIRDLGAAEIVSVGSSLKFCLLASAEADVYPRFGRTMEWDTAAGDAVLRAAGGTTRTLDGKPLAYGKRDQADDEDFANPHFIASGRAGAIPA

SEQ ID NO: 2232 - DNA, 807 bp, Aquifex aeolicus VF5
  CDS (1)..(807): transl_table=11
atgttagaaaaggtgattaaagcctgcaaaaaagcaggtgaggaaattttagaagtttactcaaaggagttcacagttgaagaaaaggaagacaggactcccgttacggaagcggacagaagggctcacagaataataacggaagagttaaaggaaactagaatacctgtactctcggaagagggaaaggaaattccttttaaagagagaagaaaatggaaaaggttctggctcgttgatccactggacgggacgaaggagtttataaagaagaacggagagtttaccgtaaacgtagccctcgtagaggaaggagaacctgttctcggagtagtttacgcacctgccttagaagtgctttactttgccgagaaagggaacggagcttacagagaggtaaagggaaaaatggaaaaacttcccattggaaattggagtagggaaaacctcagggtcgtggcttcccgttcccacatgaacgaagaaaccaagaaattcctcgaaaatttagaaaagaaatttggtaaactccagttcctttcaaagggcagttcactaaagatatgtatggttgcggaaggaagtgcggatatatatccgagaattgccccaactatggagtgggacacgggagcggggcatgccgtagcaaaagaggcgggctgtgaactcttcgtttacgaagagggaaaactcagagaacctttgaggtacaacaaggaagacttgagaaatcccagttttgtttgtttatctttagaaatcaaggaattggtggaggcgacgggcggattcgaaccgccgtaa

SEQ ID NO: 2233 - protein, 268 aa, Aquifex aeolicus VF5
MLEKVIKACKKAGEEILEVYSKEFTVEEKEDRTPVTEADRRAHRIITEELKETRIPVLSEEGKEIPFKERRKWKRFWLVDPLDGTKEFIKKNGEFTVNVALVEEGEPVLGVVYAPALEVLYFAEKGNGAYREVKGKMEKLPIGNWSRENLRVVASRSHMNEETKKFLENLEKKFGKLQFLSKGSSLKICMVAEGSADIYPRIAPTMEWDTGAGHAVAKEAGCELFVYEEGKLREPLRYNKEDLRNPSFVCLSLEIKELVEATGGFEPP

SEQ ID NO: 2234 - DNA, 906 bp, Vibrio cholerae O1 biovar eltor str. N16961
  CDS (1)..(906): transl_table=11
gtgaagcgcgcagcatcacagccttgctgttggctctgcgttttcttcaggcgtgaatcgcacgccttcggagtcactatgtctacaccacaggatctctcgcacttactgcccgatgtcattaacatcgcgcgagcggcagggcaactcatcctcgatatctatcaaaataaatcttatgaagccttcaccaaaagtgattcaacgcctgtcaccagcgccgatttagccgcacataagtttctgtgtgagcagttgcgcgagctgacccctgatattccgatcctctcggaggaagaagccaatatcgaccttgccactcgcgaaacatggcagcgctattggctggtggatccgctggatggcactcaagagttcatcgcacgtagcggcgacttcgcgaccatcattgcgctcgtggaaaataaccatccggtgatgggggtggtgtatggccccgtttctggtgtgacttactacgcttacgcaggcaaaggggcgtggaagatccccgacatggcgcagagcctcaaaattcagactcacaaacatgagctgccgagcagctcgatcgcgattgccatcagccgtcgccaagacatcaacaaaatcacgcgccgtttaagcagtgcttggaattatgacttggtgccactgggctctgcagcactgaaagcctgcttagtggcagaaggtgcggtagattgctatctgcgccttggtccaactggcgaatgggataccgccgcaacccagtgcattgtcgaagaagcgggtgggcgcattctgagcactcaattatcgcccctctcgtacaatgagcgggaaaccttggaaaacccgaacttcatcgtgcttggtgatgcggatttaccttggaatgagatcttaaaaatcaaagactag

SEQ ID NO: 2235 - protein, 301 aa, Vibrio cholerae O1 biovar eltor str. N16961
MKRAASQPCCWLCVFFRRESHAFGVTMSTPQDLSHLLPDVINIARAAGQLILDIYQNKSYEAFTKSDSTPVTSADLAAHKFLCEQLRELTPDIPILSEEEANIDLATRETWQRYWLVDPLDGTQEFIARSGDFATIIALVENNHPVMGVVYGPVSGVTYYAYAGKGAWKIPDMAQSLKIQTHKHELPSSSIAIAISRRQDINKITRRLSSAWNYDLVPLGSAALKACLVAEGAVDCYLRLGPTGEWDTAATQCIVEEAGGRILSTQLSPLSYNERETLENPNFIVLGDADLPWNEILKIKD

SEQ ID NO: 2236 - DNA, 828 bp, Pasteurella multocida subsp. multocida str. Pm70
  CDS (1)..(828): transl_table=11
atgttagcactttcaccatcattacttgaaaaaacacttgaaatcgcggatcaagcaggggattttttaacgcgattttataccgactcagggcaaaatgcgttagcaattcaaaccaaacaagataacacgccagtgactgccgtggatttatttttgagtcaatttttaattgaaaaattgacctcactgacacctgaggtcccgattctttccgaagagagttgtaaaatccccttacaagatcgtgcacattgggcagaatattggttaattgacccactcgatggaacccaacaatttattaatcgcaccgatcaattttccattttgattacacttgtccaacacaatcaacccgtcttaagcattacccatgcccctattttacaaacgacctattatgctatgcagggctttggtgcttacagaagacagggcaatcaacaagaaaagctaaacaaccaagcgcgacctgagcagcgaaaaatcaaaattgctgtgggagtcgggggcgttgaacggaaaattcagcccttgttaaatccagcttatcaatatgaatttttggtttatggttcaagtggcttaaaaggcggcttagtagccgatggcacttgtgattgctatattcgagtaggaaaaacgggtgaatgggatacgggggcggctgaaatcctcttacgtgaaatgggaggtgctgtgtttgactttgcttttcaaccgcttagctataatcagagagaaagttttattaatcccaattttgtgatggtggcgaatacagaatttgattggcagaaaatttttcaatttcattcgcactag

SEQ ID NO: 2237 - protein, 275 aa, Pasteurella multocida subsp. multocida str. Pm70
MLALSPSLLEKTLEIADQAGDFLTRFYTDSGQNALAIQTKQDNTPVTAVDLFLSQFLIEKLTSLTPEVPILSEESCKIPLQDRAHWAEYWLIDPLDGTQQFINRTDQFSILITLVQHNQPVLSITHAPILQTTYYAMQGFGAYRRQGNQQEKLNNQARPEQRKIKIAVGVGGVERKIQPLLNPAYQYEFLVYGSSGLKGGLVADGTCDCYIRVGKTGEWDTGAAEILLREMGGAVFDFAFQPLSYNQRESFINPNFVMVANTEFDWQKIFQFHSH

SEQ ID NO: 2238 - DNA, 822 bp, Pseudomonas aeruginosa PAO1
  CDS (1)..(822): transl_table=11
atgaggccggtgccttggggcgaattggtggcgctggtgcggcgcgccggcgaggcgatcctgccgcactggcgcgccgacgtggtggtgcgctcgaaggccgacgaatcgccggtgactgccgccgacctggccgcgcaccatatattggaggcgggattgcgggcgctggcgccggacattccggtgctttccgaagaggattgcgagataccgctgagcgagcgcggccactggcggcgctggtggctggtggacccgctggacggcaccaaggagttcatctccggtagcgaggagttcaccgtcaacgtggccctggtcgaggatggccgggtgctgttcggcctggtcggcgtgccggtgagcggccgctgctactacggtggcgccggtctcggtgcctggcgcgaggaggccgatggccgcgcgcaaccgatcagtgtgcgcctggagcccgaggaggccttcaccgtggtggccagcaagcgccatggcagcccggcccaggagcgcctgctggatggcttgagcgagcgcttcggcgacctgcggcgagccagcatcggcagttcgctgaagttctgcctgctggccgagggcgctgccgactgctatccgcgcctgacgccaacctcgcaatgggacacggccgccgcccagggtgtgctggaaggcgccggcggcgaggtgctcgacctgcatggtgcgccattcacctacgagccgcgcgaggattacctcaacggctccttcctggccctgccgcgcgccgccgagtggcgcagcgagctgatccaactggcgcgcgcgctgcactga

SEQ ID NO: 2239 - protein, 273 aa, Pseudomonas aeruginosa PAO1
MRPVPWGELVALVRRAGEAILPHWRADVVVRSKADESPVTAADLAAHHILEAGLRALAPDIPVLSEEDCEIPLSERGHWRRWWLVDPLDGTKEFISGSEEFTVNVALVEDGRVLFGLVGVPVSGRCYYGGAGLGAWREEADGRAQPISVRLEPEEAFTVVASKRHGSPAQERLLDGLSERFGDLRRASIGSSLKFCLLAEGAADCYPRLTPTSQWDTAAAQGVLEGAGGEVLDLHGAPFTYEPREDYLNGSFLALPRAAEWRSELIQLARALH

SEQ ID NO: 2240 - DNA, 765 bp, Campylobacter jejuni subsp. jejuni NCTC 11168
  CDS (1)..(765): transl_table=11
atgcttaatcttgataaatttttagaaattgctataaatgctagcaatcaagcttctaaagctattttagaagagagaaaaaatttcaaaacttgggaaaaagaagataaaagcccgcttacatcagcagatcttgcttctaataaaattctaaatgatattttgggttctacggatattaaaattctatcagaagaaaaattactcagtaaagaagagtgtgaagaattaaaaactttttggcttatcgatcctcttgatggaacaagtggttttttaaaaggcagtgatgaattttgcgttatgataagtttggttcatgacaatcgccctgttttatcactcatacaaaatccatcaaaaggtgatatattctatgctcatgcaaaaaccaaggtttataaaaacgataaacctttgcaaattgaccagcaagaatacgagaaaaataaatataaagccttattgagtgttaatcatcttagcaaagaagatgaagactttgcaaaagagcatcaattagaagctattaatataggctctggattgaaattttgtgctattttagaggctagggcaggagtttataaaagatttgaaaagcttaatatttgggatattgtagcaggagattttttgattaatcaaaatggaggatttatgggcgatttttctaaaaaatacattttatataaccctttaagttataaatccaatccttttatttgtgtttcatctaggaattttttacaagattttttataa

SEQ ID NO: 2241 - protein, 254 aa, Campylobacter jejuni subsp. jejuni NCTC 11168
MLNLDKFLEIAINASNQASKAILEERKNFKTWEKEDKSPLTSADLASNKILNDILGSTDIKILSEEKLLSKEECEELKTFWLIDPLDGTSGFLKGSDEFCVMISLVHDNRPVLSLIQNPSKGDIFYAHAKTKVYKNDKPLQIDQQEYEKNKYKALLSVNHLSKEDEDFAKEHQLEAINIGSGLKFCAILEARAGVYKRFEKLNIWDIVAGDFLINQNGGFMGDFSKKYILYNPLSYKSNPFICVSSRNFLQDFL

SEQ ID NO: 2242 - DNA, 843 bp, Agrobacterium tumefaciens str. C58
  CDS (1)..(843): transl_table=11
atggcaaaaccccgttacgggatgcccccgttgccggatggctgtggcaaagagatgatcgacatattgacgaaagcggcgcttgacgccggacaggcgatcatggtggttcaccgcgccggcccgcatgtgtcctataaggacgactgctcgccggtaaccgaagccgatcagcgcgccgagacgattattctcgaggcgctggctgcccatttccctgaaattcccgtggttgccgaagaggccgtgtcgaacggcatcctgccggaaaccggggcggagttctttctggtcgatccgcttgacggcacgaaggaattcatttccggcaaggacgatttcaccgtcaatatagcgctcatccgcaatggcgtgccggtggcaggcgttgtctacgccccctgtcgcggccaggcatggacgggcaaggacaacgccgccgaaaagctcgcaatatcaggcgacggcgcgatcctgtcgcgccaccccatccgggcccgccgacgcggcgcttcgcctgtggcgctgatcagccgctcgcattgcacggcaaagacggaagccttcgtggccgaacacgggctgaaagactgtatctcggtcggttcatcactgaaattctgcatgctggcggagggtgccgccgatatctacccccgcttcagccgcaccatgatgtgggacaccgccgccggcgacgccgtactgcgtgccgcaggcggccggacactcgattgcgacgggcagcttcttgcctatgaagttaggggcgacggcgaggatgcgctggccaatccggattttattgccgagggagcgatggcggtggagcaggccgggtaa

SEQ ID NO: 2243 - protein, 280 aa, Agrobacterium tumefaciens str. C58
MAKPRYGMPPLPDGCGKEMIDILTKAALDAGQAIMVVHRAGPHVSYKDDCSPVTEADQRAETIILEALAAHFPEIPVVAEEAVSNGILPETGAEFFLVDPLDGTKEFISGKDDFTVNIALIRNGVPVAGVVYAPCRGQAWTGKDNAAEKLAISGDGAILSRHPIRARRRGASPVALISRSHCTAKTEAFVAEHGLKDCISVGSSLKFCMLAEGAADIYPRFSRTMMWDTAAGDAVLRAAGGRTLDCDGQLLAYEVRGDGEDALANPDFIAEGAMAVEQAG

SEQ ID NO: 2244 - DNA, 777 bp, Rickettsia conorii str. Malish 7
  CDS (1)..(777): transl_table=11
atgaatgacaatttaattaatgctttaaaagatttaattattaataccggcaagattgcactagatataaaaaaggcaggaatgttgactgatattaaatcagatgggtcagtagtcactaatgccgataaagaaattagtaaaataatttatcaaactctacaaaccttaacctctcaaatagctatagtatgtgaagagcagccgctacctatattcagcagtgatactttttggttaatcgatcctattgatgggacatggagctatgtaaacggtaaaagtacatatacggtcaatatagggcttattgaaaacggttttccaaccatcggcttgatatatcaccctgaaacagcaaagctatattatactgatgtaaacggtcggttaaaaatcgaacagaattctaaagaaatatttgttaatcatgaaccgaaacatgaagagcttaatgcggtaataggtttttataattcaaataaagctactaaagaatttttaagtaagtattcattcggtcaaataaatgcaataggcagttcaatgaaactatgcttaattgctgaaggagcagctgatatatatccaaaattcggtcaaactatggaatgggacatagcggcaggtcatgctttaattaaagccggcggtggtaatattttagatacgcatggacaagaaattacttacggtaaagaaagttttgctaatcctaattttttcgcctgtagtaaatattggttggaaagggaggcaaggttgcatagatactag

SEQ ID NO: 2245 - protein, 258 aa, Rickettsia conorii str. Malish 7
MNDNLINALKDLIINTGKIALDIKKAGMLTDIKSDGSVVTNADKEISKIIYQTLQTLTSQIAIVCEEQPLPIFSSDTFWLIDPIDGTWSYVNGKSTYTVNIGLIENGFPTIGLIYHPETAKLYYTDVNGRLKIEQNSKEIFVNHEPKHEELNAVIGFYNSNKATKEFLSKYSFGQINAIGSSMKLCLIAEGAADIYPKFGQTMEWDIAAGHALIKAGGGNILDTHGQEITYGKESFANPNFFACSKYWLEREARLHRY

SEQ ID NO: 2246 - DNA, 777 bp, Sinorhizobium meliloti 1021
  CDS (1)..(777): transl_table=11
atgctggacatactggaaacatcggcactcgccgccggacaagccatcctggaaatttaccgtgccggtccggctgtcacctacaaggctgacgcctcgcccgtgaccgatgcggaccatcgtgccgagcggatcatccttgccgatctggcggccgcctttccggatattccgatcgtcgcggaggaggaggtcgccgcaggtcgcgttcccgatatcgccggaaagcggttcttcctcgtcgacccgctggacggcacgaaggaattcgtcgaacgcaacagccatttcaccgtgaatatcgggctcgtagaaaacggtgcacccgtcgtcggtgtcgtctatgcaccggctctcggcctcatctattcggcggccgccggcatggcgaagaaggcggtggtcgaggatggacaggtcacgggcgaatggaccaccatcggctgccgccgttgcggcgaccggccgatggcgcttaccagccgctggcacaacagccccgagacgatctccttcctcaccgatcagggcatcagcgatcatgaggccgtcggctcatcgctgaagttttgcctgctggccgaaggcattgcggacatctatccgcgcttcagccggacgatggagtgggacaccgcggcgggcgacgcgatcctaaggtcggcaggcggtgaaacactgacgatggcgggcaatccgcttggctacggcaagcgcaatcaatcggatgacagcgacttcgccaatccctggttcatctcgcgcggcaaggcgtga

SEQ ID NO: 2247 - protein, 258 aa, Sinorhizobium meliloti 1021
MLDILETSALAAGQAILEIYRAGPAVTYKADASPVTDADHRAERIILADLAAAFPDIPIVAEEEVAAGRVPDIAGKRFFLVDPLDGTKEFVERNSHFTVNIGLVENGAPVVGVVYAPALGLIYSAAAGMAKKAVVEDGQVTGEWTTIGCRRCGDRPMALTSRWHNSPETISFLTDQGISDHEAVGSSLKFCLLAEGIADIYPRFSRTMEWDTAAGDAILRSAGGETLTMAGNPLGYGKRNQSDDSDFANPWFISRGKA

SEQ ID NO: 2248 - DNA, 840 bp, Sinorhizobium meliloti 1021
  CDS (1)..(840): transl_table=11
atgacgcccctttgcgaaatgctggagcgcatagcgctcgatgcgggtgcggcaattctcgaggtctacgacgccggtccccaagtctgctacaaggacgatcactcgcccgtcaccgaagccgacgagcgggccgaagcgatcattctcgagagacttgcggcggcgtttccgcagattcccgtggttgccgaggagtctgtttcctcgggccgcgttccggatatcagcggcggcacgttctttctcgtcgatccgctcgacggcacgaaggagttcatcaatcgtcgaaacgacttcaccgtcaacattgccctcatcgagggcaatgtgccggttgccggcatcgtctatgcgcccgcgcagccgtgcgcctatgtcgccgacggcggcagggcggaaaagcttctgctcgatccggcatgggcactcgaacaccggcaggcgatccgcgtgcgggtgcggggtgcggaactgaccgcggttgccagccgctcgcacaacagttccgagaccgaggccttcctcaccggccacggcgtcatgaactacgcttccgtgggctcgtcgctgaaattctgcctgctggcggaagggaaggcggacgtctatccgcggttcggccgcaccatggaatgggatacggccgccggcgacgcggtgctgaaagctgccggcggatcggtcgtccgcttggacggctcgcgcctcctctacggcaagacggtgcaggaggaggacagccccttcgcaaacccgcacttcatcgcctgggcggacatgtccttgctccacctgtccggtgccgagggtcttcagccggcttacgcgctgtcgtga

SEQ ID NO: 2249 - protein, 279 aa, Sinorhizobium meliloti 1021
MTPLCEMLERIALDAGAAILEVYDAGPQVCYKDDHSPVTEADERAEAIILERLAAAFPQIPVVAEESVSSGRVPDISGGTFFLVDPLDGTKEFINRRNDFTVNIALIEGNVPVAGIVYAPAQPCAYVADGGRAEKLLLDPAWALEHRQAIRVRVRGAELTAVASRSHNSSETEAFLTGHGVMNYASVGSSLKFCLLAEGKADVYPRFGRTMEWDTAAGDAVLKAAGGSVVRLDGSRLLYGKTVQEEDSPFANPHFIAWADMSLLHLSGAEGLQPAYALS

SEQ ID NO: 2250 - DNA, 801 bp, Xanthomonas axonopodis pv. citri str. 306
  CDS (1)..(801): transl_table=11
atgatccgcatcccgatggagctgcgcgaaaccgtgatcgccatcgcgcgcgacgccggcgacgcaatcatggaggtctacgcccaggacttttcggtggagatcaaggacgacgccagcccgctgacccaggccgacctggcggccaaccgcgtcatcgtcgaaggcctgcgccgtgtcaccccggatgtgccggtgctgtcggaagagtctgcgcacgtggcctgggagcaacgccagtactggaccagttactggctggtcgatccgctcgatggcacccgcgaattcgtcaagcgcaatggcgagttcagcgtcaacatcgcactcatccatatgggcgcgccggtgctgggggtggtgcaggcgccggtcgacggacgggtctggtatgccgcgcgtggcgagaacgccttccgccgcgatggcgaccgcgatgagatgctgcacacgcgcaccccggccgccatgccgttgcgggtggcagccagccgttcgcatcgcgacgcgcggactgccgccgcgctggagcggatgggcgagatcgacgtggtcgcgcaaggctcgtcgttgaagttctgccgcatcgccgaaggcgatctggacgtgtatccgcgcttcggccccacctccgagtgggacaccgccgccggccagtgcgtgctgcatgcggccggtggcgtgttgctggccggcgccagcggcaaaccgttccgctacaaccgccgcgacaccttgctcaacggcgacttcatcgcactgggcgaccccaatctgccctggcgcgattggctggcctga

SEQ ID NO: 2251 - protein, 266 aa, Xanthomonas axonopodis pv. citri str. 306
MIRIPMELRETVIAIARDAGDAIMEVYAQDFSVEIKDDASPLTQADLAANRVIVEGLRRVTPDVPVLSEESAHVAWEQRQYWTSYWLVDPLDGTREFVKRNGEFSVNIALIHMGAPVLGVVQAPVDGRVWYAARGENAFRRDGDRDEMLHTRTPAAMPLRVAASRSHRDARTAAALERMGEIDVVAQGSSLKFCRIAEGDLDVYPRFGPTSEWDTAAGQCVLHAAGGVLLAGASGKPFRYNRRDTLLNGDFIALGDPNLPWRDWLA

SEQ ID NO: 2252 - DNA, 861 bp, Thermosynechococcus elongatus BP-1
  CDS (1)..(861): transl_table=11
atgttctcctcccttgatcttaagaagacccttgccaccctgcgccccattctttggcaggcccttgagcaactgcgccagttttaccgccaggtgaaggatctaacggtgcaggataaaggcggtgatcccgtcaccctagcggatcagcaaattgatgcctttttgcgccatgccctccaagagcattttccggcctcggagtttggctatctcacagaagaaacctacacagccggtcagtccctatcgcagccctatgtgtggatcattgatcctttggacggcacctccgactttctgcaacagacgggggagtacgcaattcacgttgcccttgtccgtgaacaccgcccctgtttagctgctgtggtctggcccgaacaggaggtgatctacaccgccattgccggtggtggcacctatcgagaaacccgccaccgttcaacacgcctgcaagttcagccccccacccctgaccagcccctgcgggtggtgatgagccgtagccatgggggcgatcgcctcgaggcctttttaagcagcttaggatcagtacagctaatgccgatggggagtatgggctgtaaaacggctagcatttgccaaggggatgcccatctgtacgttagccttgcagggcgcactgccccaaaagactgggacttggcagcaccggatttgatcatgcaggaggcagggggcgcctttacctatgccaatggcaagttaccccactacaatcgcactgatgtgcagcactgggaaccgttggtggtgtgtcatcctgccttgagtcgcagggtgggcgatcgcctgcaagcctttttacaggaaaatcaaggctattctggaaaatag

SEQ ID NO: 2253 - protein, 286 aa, Thermosynechococcus elongatus BP-1
MFSSLDLKKTLATLRPILWQALEQLRQFYRQVKDLTVQDKGGDPVTLADQQIDAFLRHALQEHFPASEFGYLTEETYTAGQSLSQPYVWIIDPLDGTSDFLQQTGEYAIHVALVREHRPCLAAVVWPEQEVIYTAIAGGGTYRETRHRSTRLQVQPPTPDQPLRVVMSRSHGGDRLEAFLSSLGSVQLMPMGSMGCKTASICQGDAHLYVSLAGRTAPKDWDLAAPDLIMQEAGGAFTYANGKLPHYNRTDVQHWEPLVVCHPALSRRVGDRLQAFLQENQGYSGK

SEQ ID NO: 2254 - DNA, 762 bp, Shewanella oneidensis MR-1
  CDS (1)..(762): transl_table=11
ttgttgcggctagtgaatatagcccatgcggcaggtgatgccattatggcgatttacgcgcaagagcatattgctgttacacaaaagagtgatgagagtcctgtaaccgctgccgatcttgcggcccatagggtgattgtcagtcaattagctgagcaatttgcgggcattgctgtgatgtcagaagaagccgccgatattgcttgggatgagcgtgagcaatggcaaacttactggcttatcgatcctttagacggcactaaggaatttattaagcgaaatggtgagtttaccgtcaatatagcgctcattcatcaaggcgaagctatcgcgggtgtggtttatgctcctgtgttgaacacgacttattatggggcgagacacttaggtgcgtggcgacaggatggacagcaagaacagctgctgcagggctgcaagataccaagacaggtgccgatagtggtgggcagtcgttcgcacttaagcccagatgtggctgattatttgaacaatattggccaacatgaaatgttaagcgtgggaagctcgctgaagttttgtatgttggcagaaggtaaggccgatctctatccaagattggggcctaccagcgaatgggacacggcggcggcgcaggcggtacttgaaagcgcaggcggaaaagttgtgtgttatgactcaggtttacccttaacctacaatcaaaaacctgacatattaaacccttattttattgccacagcgcctggctgggcaaaataa

SEQ ID NO: 2255 - protein, 253 aa, Shewanella oneidensis MR-1
MLRLVNIAHAAGDAIMAIYAQEHIAVTQKSDESPVTAADLAAHRVIVSQLAEQFAGIAVMSEEAADIAWDEREQWQTYWLIDPLDGTKEFIKRNGEFTVNIALIHQGEAIAGVVYAPVLNTTYYGARHLGAWRQDGQQEQLLQGCKIPRQVPIVVGSRSHLSPDVADYLNNIGQHEMLSVGSSLKFCMLAEGKADLYPRLGPTSEWDTAAAQAVLESAGGKVVCYDSGLPLTYNQKPDILNPYFIATAPGWAK

SEQ ID NO: 2256 - DNA, 801 bp, Pseudomonas putida KT2440
  CDS (1)..(801): transl_table=11
atgcatgaagtggtcaagctggcgctgacggcaggcgaggcgatcctgccattctggcgcgccgatgtcgcggtaaccaacaaggccgacgattcgccggttaccgccgccgacctagccgcgcaccgggtaatcgccgatggtctgctggcgctggcgccgcagattccggtgctgtccgaagaggactgcaatattgcgctggccgagcggcaaaactggagccgctggtggctggtcgatccgctggatggcaccaaggaattcattgccggcagtgaagagttcacggtcaacatcgccctgatcgagaacggcgaggtggtgtttggcgtggtgtcgatgcccaccaatgggcgctgctattttggtggacgcggcatgggggcctggcgtgcagatgccggtgaggcagcccagctgatccaagtacgcaacgcacccgcgcagggcgagcgttttaccgtggtggccagccgtcggcattccagcccggagcaggaagcgctgttggccggccttggggctgcggtgggcgagctggagctggccaatatcggcagctcgttgaagttctgcctgttggccgagggcagcgccgattgttatccgcgcctggcgccgacttcgcagtgggatactgctgcggcgcagggtgtggtggagggggccggtggcgaagtgatcgggctggatggcttgccgttccggtatccgccgcgcgagtcgctgcttaacccgtacttcctggcgttgccggtaaatgctgaatggcgccaggccttcctgaacctcatctaa

SEQ ID NO: 2257 - protein, 266 aa, Pseudomonas putida KT2440
MHEVVKLALTAGEAILPFWRADVAVTNKADDSPVTAADLAAHRVIADGLLALAPQIPVLSEEDCNIALAERQNWSRWWLVDPLDGTKEFIAGSEEFTVNIALIENGEVVFGVVSMPTNGRCYFGGRGMGAWRADAGEAAQLIQVRNAPAQGERFTVVASRRHSSPEQEALLAGLGAAVGELELANIGSSLKFCLLAEGSADCYPRLAPTSQWDTAAAQGVVEGAGGEVIGLDGLPFRYPPRESLLNPYFLALPVNAEWRQAFLNLI

SEQ ID NO: 2258 - DNA, 828 bp, Vibrio vulnificus CMCP6
  CDS (1)..(828): transl_table=11
atgcctacctcacaggatttatcggcactgttgccgcaagttatcgatattgctcgcaccgcggggcaattgattctggatatctaccaaagtaagcagtaccaagaatacaccaaaagcgatgagacgccggtcaccagcgccgatctcgccgcgcacaaattgatcaaccaacgactgagtgagttaaccccagacattccagtgctgtctgaagaagcggcggatatcagcttggaacaacgcgcgcaatggaaccgttactggttggtggatcctcttgatggaacgcaggagtttatcgcccgcagtggggattttgccaccatcatcgccttagtggagaacaacaagccggtaatgggcgtggtgtatggtccggtttcaggcgtgacctactatgcgtatcaaggtaaaggcgcatggaagatccctgagatgaacgaaagcttgaaaattcaaacccacaaacatgaactgcccggacaaaacatcgcgattgccatcagccgccgtcaggacatcaatcgcatcaccaaccgcatgagcagcagttggaattacgatttggtgccgttaggctctgcggcgttgaaagcgtgcttggtcgcggaaggagccgtggattgctatttgcgccttggtccgactggggaatgggacaccgcggcgacacaatgtatcgtggaagaagctggcggacgcatcctcagcacctacttggaaccgctttcttataacgaacgagacaccttggaaaatccgaacttcatcgtattaggcgatgccgatttgccgtggaacgacattttgcaggtcaaaggctag

SEQ ID NO: 2259 - protein, 275 aa, Vibrio vulnificus CMCP6
MPTSQDLSALLPQVIDIARTAGQLILDIYQSKQYQEYTKSDETPVTSADLAAHKLINQRLSELTPDIPVLSEEAADISLEQRAQWNRYWLVDPLDGTQEFIARSGDFATIIALVENNKPVMGVVYGPVSGVTYYAYQGKGAWKIPEMNESLKIQTHKHELPGQNIAIAISRRQDINRITNRMSSSWNYDLVPLGSAALKACLVAEGAVDCYLRLGPTGEWDTAATQCIVEEAGGRILSTYLEPLSYNERDTLENPNFIVLGDADLPWNDILQVKG

SEQ ID NO: 2260 - DNA, 831 bp, Bradyrhizobium japonicum USDA 110
  CDS (1)..(831): transl_table=11
atgcaggtgaagcggatcatcgacggcgcggccgcatccggcctgatggagccgctcaccgcgctggtggtgaaggcgggcgaagcgatcctcgcggtcaaccgcgcggcgatgcgggtcgacggcaagcaggacggctcgccggtgaccgaggccgaccttgccgccgaccgcgtcattgcggacggcctggcgcagctcgcgggcgacatcccgacgctgtcggaggaacggacccagctcgccgctccgccgttccgcgacagcttcttcctgatcgatccgctcgacggcaccaaggagttcgtggccggccgtgacgagttcaccgtcaacctcgccctcgtcactcacggggtgccgctgctcggcatcgtcagcgcacccgcactcgggctgctctggcgcggcatcgtcggccgcggcgccgagtgtgtcagatttgacggcgctaccatcggtgccgccgagccggtccatacccgcaagctgccggcgccgggcgagccctgggtcgcggcggtgagccgctcgcacggcgatcccaaaagcgaagcgttcatcgacaacaggcccaatgccgtcagaaggacggtcggctcggccgtgaaattcggccggatcgcggaaggcagcgccgacatctatccccgcttcgggcccacttcggagtgggatgtcggggccggctgcgcggtcgtgaccgcggccggcggcaaggtcaccgacggcaagggcggcgagatcctgttcggccagcggcaggacaccggcttcatcatcccggagttcatcgcctggggcgacccgcaggcggtagaccgctactga

SEQ ID NO: 2261 - protein, 276 aa, Bradyrhizobium japonicum USDA 110
MQVKRIIDGAAASGLMEPLTALVVKAGEAILAVNRAAMRVDGKQDGSPVTEADLAADRVIADGLAQLAGDIPTLSEERTQLAAPPFRDSFFLIDPLDGTKEFVAGRDEFTVNLALVTHGVPLLGIVSAPALGLLWRGIVGRGAECVRFDGATIGAAEPVHTRKLPAPGEPWVAAVSRSHGDPKSEAFIDNRPNAVRRTVGSAVKFGRIAEGSADIYPRFGPTSEWDVGAGCAVVTAAGGKVTDGKGGEILFGQRQDTGFIIPEFIAWGDPQAVDRY

SEQ ID NO: 2262 - DNA, 810 bp, Pseudomonas syringae pv. tomato str. DC3000
  CDS (1)..(810): transl_table=11
ttgctcgccccggtaatagagctggcacgactggccggggaagtgatcctgccgttctggcgcgccaacgtcacggtgaccaccaagacggatgactcgccagtgaccgccgccgatctggctgcgcaccaggtgctggtcgaaggcttgcaggcacttgatccaggtattcatgtgctctccgaagaagacgccgacatcccgctcagcgagcgtgcgagctgggaacgctggtggctggtcgacccgctggacggcaccaaggagttcatttcagggagtgaagagttcaccgtcaacgtcgcgctgatcgagcatggtcgggtggtgttcggtgtggtgtcgatgccgaccaataaccgctgctacttcggcggtgcaggcctgggcgcgtggcgcagcgatgatatcgatcacgtcgagccgattgccgtgcgtaatcagccgggtgacgggcagacctttaccgtggtcgccagccgccgccacaccagcccgcagcaggaacacctgctggccggtctggcgaacgggctagggcctttgcaactgaccaatatcggcagttcgctgaaattctgcctgctggccgaaggcgctgccgattgctacccaaggcttgccccgacttcgcaatgggacaccgctgcggcgcaaggcgtgcttgagggcgcgggtggcgcagtcctgcaactggacggccaaccgttcagctacccggcacgcgaatcgctgctcaaccccttcttcctcgcgctgcccgccaacgccgcatggcgcgacaaactgctggtgctggcgcagtcctga

SEQ ID NO: 2263 - protein, 269 aa, Pseudomonas syringae pv. tomato str. DC3000
MLAPVIELARLAGEVILPFWRANVTVTTKTDDSPVTAADLAAHQVLVEGLQALDPGIHVLSEEDADIPLSERASWERWWLVDPLDGTKEFISGSEEFTVNVALIEHGRVVFGVVSMPTNNRCYFGGAGLGAWRSDDIDHVEPIAVRNQPGDGQTFTVVASRRHTSPQQEHLLAGLANGLGPLQLTNIGSSLKFCLLAEGAADCYPRLAPTSQWDTAAAQGVLEGAGGAVLQLDGQPFSYPARESLLNPFFLALPANAAWRDKLLVLAQS

SEQ ID NO: 2264 - DNA, 828 bp, Vibrio parahaemolyticus RIMD 2210633
  CDS (1)..(828): transl_table=11
atgccaatgacaaaagatctatctcacctgcttcctcaagttatcgaaattgcccgcagtgcgggacaaatgattctcgatatctacgagaaaaagcaatatgaagcgtacaccaaaagtgatgaaacaccggtcacaagcgccgatattgccgcgcacaaactcatcactgaacgtttaagtgaactgacgccagacatccccgtgttatctgaagaagctgccgacatcagcttagagcagcgcgcacaatggcagcgttattggttggtcgacccactagatggcacacaagaattcatcgcacgcagtggcgactttgcgaccatcattgcattaattgacaacaacaagccagcgatgggcgtggtgtatgggcctgtttctggcgtcacgtattacgcatacagcggcaaaggtgcgtggaaaatcccagacatgtctgaaagcgtgaaaatccacacgcacaaacatgaacaagcaggacaaaacattgccattgctatcagccgtcgccaagacattaatcgcatcaccagccgcatgagtagcgcttggaattacgacttaattcctctcggttctgcagcgttaaaagcgtgtttggtggcggaaggagcggtcgattgctatttacgtttgggccctactggcgaatgggatacagcagcaacgcaatgcatcgtggaagaagcgggcggacgcattctcagcactcacctcgaacctttgtcttacaacgaacgggaaacgctagagaacccgaactttatcgtgctgggcgatacgaatttgccttgggatgacatcctgcaacgcaaagattaa

SEQ ID NO: 2265 - protein, 275 aa, Vibrio parahaemolyticus RIMD 2210633
MPMTKDLSHLLPQVIEIARSAGQMILDIYEKKQYEAYTKSDETPVTSADIAAHKLITERLSELTPDIPVLSEEAADISLEQRAQWQRYWLVDPLDGTQEFIARSGDFATIIALIDNNKPAMGVVYGPVSGVTYYAYSGKGAWKIPDMSESVKIHTHKHEQAGQNIAIAISRRQDINRITSRMSSAWNYDLIPLGSAALKACLVAEGAVDCYLRLGPTGEWDTAATQCIVEEAGGRILSTHLEPLSYNERETLENPNFIVLGDTNLPWDDILQRKD

SEQ ID NO: 2266 - DNA, 807 bp, Bacteroides thetaiotaomicron VPI-5482
  CDS (1)..(807): transl_table=11
atggctgctatcgatgcagcgttgaaagcgggtgaaaaaatcctttctatctatgaagatccgaagtcggattttgaaatagagaggaaggcggataactctcccttaacgatagcagacaggaaagcccacgaggcgattgtggccattttgaatgaaactccttttccggttcttagtgaagaaggaaagcatatggactatgcagtgcggcgaggctgggatactttatggattgtagacccgctggacggaacgaaggagttcatcaagcgtaacggagaatttacggtaaatatagctttggtgcagaacgctgtacctgtaatgggtgttatttacgtgcctgtaaaaaaagaactttattttgcagtggaggggacaggtgcctataagtgttccggcattgtcggtctggaagacgagggagtgaccttacagcagatgattgagaaatcggaacggatgccattggcggatgcgcgcgaccattttattgctgtcgcttcccgttcacacctgacgcctgaaactgaaacatatattgcagacttaaaaaagaaacacggcaatgtggaactgatatcaagcggaagttccattaaaatctgtctggttgccgaaggaaaggcggatgtctatccgcgttttgctccgacgatggaatgggatacggctgccggacatgcgatagcccgtgccgcagggatggaagtatatcaggcagggaaggaggaacctttgcgatataacaaagaggatctgctgaatccgtggtttatcgttgaagcaaaaagagaacgctaa

SEQ ID NO: 2267 - protein, 268 aa, Bacteroides thetaiotaomicron VPI-5482
MAAIDAALKAGEKILSIYEDPKSDFEIERKADNSPLTIADRKAHEAIVAILNETPFPVLSEEGKHMDYAVRRGWDTLWIVDPLDGTKEFIKRNGEFTVNIALVQNAVPVMGVIYVPVKKELYFAVEGTGAYKCSGIVGLEDEGVTLQQMIEKSERMPLADARDHFIAVASRSHLTPETETYIADLKKKHGNVELISSGSSIKICLVAEGKADVYPRFAPTMEWDTAAGHAIARAAGMEVYQAGKEEPLRYNKEDLLNPWFIVEAKRER

SEQ ID NO: 2268 - DNA, 915 bp, Prochlorococcus marinus subsp. marinus str. CCMP1375
  CDS (1)..(915): transl_table=11
atgaaaaaagaggttgaacttcctaatggagttaatttgaataatttgttggagaaacttagagagttgagttggggcgctgcagatattctgaaggcatatgcaagaggagaaaagcctccttatgatttccctgaagttttgagtgttcaagaaggaggagatggacctgtatctgctgcagaccttgcagttaatagctggctaattgaaggcttgaaggcaagtttcgcatctgtaaaatgggcgttaattagtgaggaaacggctaaggaacagcttgtgataggggagcctttgaacaatcaatgggtgtggatattagatcctttagatggaaccaaagatttcctacaaggcaccggagaatatgcagtgcatttggctttagttaatggtaataatcctgttttaggagtggttttgatacctgaattagaagaactttggattggattggtaggctcaggatcatggtgcgaggaccgttttgggaataaaaaacctgctgtttttagtagtcgaaaagaaattagtgaaatgactcttgtagcaagcagaagtcacagagacgaaaagctagagaagttgattaactcacttccttttgctcagaagcaaatagtaggaagtgtcggttgtaaagttgccaaaattcttaaaggggaagcggatttctatatatctttatcagctaaaacagctcctaaagattgggatatggctgctcctgaagctgttttaaaagctgctggaggtagtttcacccacgcaaataacaaacctttgaaatacaacactggagaaataaatcaatgggggtgtttgatagcaagccatggtagaaatcatgacttgttatgtagtgttattcaaaatgaattgttatctattgacccttctttttcagtatga

SEQ ID NO: 2269 - protein, 304 aa, Prochlorococcus marinus subsp. marinus str. CCMP1375
MKKEVELPNGVNLNNLLEKLRELSWGAADILKAYARGEKPPYDFPEVLSVQEGGDGPVSAADLAVNSWLIEGLKASFASVKWALISEETAKEQLVIGEPLNNQWVWILDPLDGTKDFLQGTGEYAVHLALVNGNNPVLGVVLIPELEELWIGLVGSGSWCEDRFGNKKPAVFSSRKEISEMTLVASRSHRDEKLEKLINSLPFAQKQIVGSVGCKVAKILKGEADFYISLSAKTAPKDWDMAAPEAVLKAAGGSFTHANNKPLKYNTGEINQWGCLIASHGRNHDLLCSVIQNELLSIDPSFSV

SEQ ID NO: 2270 - DNA, 789 bp, Candidatus Blochmannia floridanus
  CDS (1)..(789): transl_table=11
atgatagtagatcaaataatttatattgctcgtatagctggaatggaaataatgagaatttatacagggtttggacatcgtaaaatatatgtacaacaaaaaatggatcagtctcctgtaaccaatgctgatttaattgcgcatcaagttatcgtatatttattacggaatttaactcctaatattcctattatatcagaagagtgtattccagagtggagagactgtaggcattggaataatttttggttaattgatcctctagatggaactaaagaatttttatctcgtaatggtgaatttactgtaaatattgcttttatacaaaatggagaacctaccataggagtagtatatgttccagtgtatgatgtgttgtatgttgctaattatggtcaagcttggaaaattaattccattgggaaacaagaattattaaatattactgattatacttatatgtctagatataaaaatccccttgtcgtaatgagtagaacgtgtatatctgagtatgatcaaaagttattaaatgattatttaatgcagattaaaaattataaaattgttaatattggttcatcgtttaaattttgtttagtagcagaagggatagcacatttttatccgcggttttcctcgactaaaatttgggataccgctgctggacatgctattgctaaagcagctggagctttagttaatgattggaatggatatcctttaaattatagtagtattaataaatattttttaaatcctggatttcaagtatcactgtgtagttaa

SEQ ID NO: 2271 - protein, 262 aa, Candidatus Blochmannia floridanus
MIVDQIIYIARIAGMEIMRIYTGFGHRKIYVQQKMDQSPVTNADLIAHQVIVYLLRNLTPNIPIISEECIPEWRDCRHWNNFWLIDPLDGTKEFLSRNGEFTVNIAFIQNGEPTIGVVYVPVYDVLYVANYGQAWKINSIGKQELLNITDYTYMSRYKNPLVVMSRTCISEYDQKLLNDYLMQIKNYKIVNIGSSFKFCLVAEGIAHFYPRFSSTKIWDTAAGHAIAKAAGALVNDWNGYPLNYSSINKYFLNPGFQVSLCS

SEQ ID NO: 2272 - DNA, 918 bp, Prochlorococcus marinus str. MIT 9313
  CDS (1)..(918): transl_table=11
atgatgccgaacgcacctgttctgcctgatggtgtgaacctggagattttgttgcagcacttgaggcgattgagctggggtgctgcagacatcctgctggcctatgcccggggagaacagccaccgcatggattttctaaggctctgagtgttgaggatggtggtgaggggcctgtttctgccgctgaccttgcggtgaatcgctggcttctggatggcttagaagcgaatttccccttggcagattggactctattgagtgaggagacagcaaaggagcaactcactgcaggcgaacccttagcggcggaatggttgtggatccttgatcccttggatggcacaaaggatttcttgcagggcacaggtgaatacgccgtgcatctcgctttggtgcgtggtcaacgcccagtgcttggagtggtactcctgccagaagccgaggagctttggttcggtgtgatcggttctggggcttggtgcgaagaccggcggggaaaacgttcgccggtgcgttttagtcagcgccaggctgtttgtgagttgatgctggtagcgagtcgcaaccaccgcgacaacaggcttgaacagctgctagagagtcttgctcttggtggtagcaaggctgtgggcagtgtgggttgcaaggtgaccacgattttgcgcggagaaacagatttgtatgtctctctttcaggccgtagtgctccaaaagattgggatatggcggctccagaggcggtgctgatggcggcagggggatgtttcactcatgctgatggacgccagcttgcttataacagcggtgatgtacgtcaggctggatgtttaatcgccagccatgggctcgcccacgcccagctttgtgaagcagcggcgcgggctatgaaagagatcgacccaggctttcaggtttga

SEQ ID NO: 2273 - protein, 305 aa, Prochlorococcus marinus str. MIT 9313
MMPNAPVLPDGVNLEILLQHLRRLSWGAADILLAYARGEQPPHGFSKALSVEDGGEGPVSAADLAVNRWLLDGLEANFPLADWTLLSEETAKEQLTAGEPLAAEWLWILDPLDGTKDFLQGTGEYAVHLALVRGQRPVLGVVLLPEAEELWFGVIGSGAWCEDRRGKRSPVRFSQRQAVCELMLVASRNHRDNRLEQLLESLALGGSKAVGSVGCKVTTILRGETDLYVSLSGRSAPKDWDMAAPEAVLMAAGGCFTHADGRQLAYNSGDVRQAGCLIASHGLAHAQLCEAAARAMKEIDPGFQV

SEQ ID NO: 2274 - DNA, 918 bp, Synechococcus sp. WH 8102
  CDS (1)..(918): transl_table=11
atgatgccaagccctgccgtcctgcctgccggcgtcaaccaggacgttctgttgtcagaactccgtcgcctcagctggggggctgccgacatcctcagggcctatgcccgcggcgagcaaccgccccatggcttccccaaggctctcagcgtcgacgatggcggtgaaggccctgtttctgctgctgatctggccgtgaaccaatggctgctggatggcttgtcagctgcgtttcccaaggctgactggaccctgctcagtgaagaaacggccaaggagcagctcacggaaggccaaccgctgcaggcggagtggctctggatcctggatcccttggacggcaccaaggatttcctccagggcactggcgaatacgccgttcatctggcactggtgcgggggcaacgtcccgtgctaggggtggtgctgctgccggaagccgacgaactctggatcggcatcgtcggcgagggcgcctggtgcgaggaccgtcagggtgagcgctcgcccgttcgcttcagcgatagaaccgctgtttcggatctgatcctggtggccagtcgcagccaccgcgacgaccgtctggtgaagctgattgacgctctcgcgcttggaggttccaaggcggtgggcagcgttggctacaaggtcgccaccatcctgcggggcgaaactgatctctacgtctccctgtccggacgcagtgcccccaaggattgggacatggcggcccctgaggccgtgttgctggcggccggtggacgcttcacgcatgctgatcagacggacctcgcttacaacactggcgatgtgcgtcaggccggttgcctgatcgccagccatggaaaagcccacgccgagctcggagagcgtgcgacgcgggcgatggccgagatcgatcccggctttcaggtttga

SEQ ID NO: 2275 - protein, 305 aa, Synechococcus sp. WH 8102
MMPSPAVLPAGVNQDVLLSELRRLSWGAADILRAYARGEQPPHGFPKALSVDDGGEGPVSAADLAVNQWLLDGLSAAFPKADWTLLSEETAKEQLTEGQPLQAEWLWILDPLDGTKDFLQGTGEYAVHLALVRGQRPVLGVVLLPEADELWIGIVGEGAWCEDRQGERSPVRFSDRTAVSDLILVASRSHRDDRLVKLIDALALGGSKAVGSVGYKVATILRGETDLYVSLSGRSAPKDWDMAAPEAVLLAAGGRFTHADQTDLAYNTGDVRQAGCLIASHGKAHAELGERATRAMAEIDPGFQV

SEQ ID NO: 2276 - DNA, 825 bp, Gloeobacter violaceus PCC 7421
  CDS (1)..(825): transl_table=11
atgcaaagcttgacactatctacccaactgattcagcaggtcgtcgatctcgccaggcgggcgggagcagcgattatggaaatttataaccaggcggatgtcggtacagtctacaaggaggacaactcgcccctgacccaggcggacctggtgtcccaccggctgattgtcggcgagctgaccaaactgaccccggatctgcccgtgctctccgaggaatcccgctcgaagccctatgaggagcgccggacctggtcgcgcttctggctggtcgatccgatcgacggcaccaaagaatttatcaagcgcaacggcgaattcaccgtcaacatcgccttgatcgaggacggcgagccggtggcgggggtggtgcacgcgccggccgtccagacgacctactggtcggcccgcggcctgggcgccttcaagcaaaccgccgcggccgcggcccagcccatccgggcggccgtacccgcgagcgccccgatgctggtggtcgccagccgttcccacagtggtgctgagaccgaggcatttcttgccaaactgcgcgaactgggcgatatcgatgtcatctccatcggcagttccctgaaactgtgcctggtggccgaaggggccgcgcacctctatccgcgctacggcccgactatggaatgggacaccgccgccgcccacagcgtcgtggtcgaggccggcggcaccgtcaccaacctcaaaggtgaaacgctccagtacaacaaagccgacctgctcaatccgtattttgccgtgctgggcgatctgccccctgaactgagagcccagatcgtcgaacggctctga

SEQ ID NO: 2277 - protein, 274 aa, Gloeobacter violaceus PCC 7421
MQSLTLSTQLIQQVVDLARRAGAAIMEIYNQADVGTVYKEDNSPLTQADLVSHRLIVGELTKLTPDLPVLSEESRSKPYEERRTWSRFWLVDPIDGTKEFIKRNGEFTVNIALIEDGEPVAGVVHAPAVQTTYWSARGLGAFKQTAAAAAQPIRAAVPASAPMLVVASRSHSGAETEAFLAKLRELGDIDVISIGSSLKLCLVAEGAAHLYPRYGPTMEWDTAAAHSVVVEAGGTVTNLKGETLQYNKADLLNPYFAVLGDLPPELRAQIVERL

SEQ ID NO: 2278 - DNA, 744 bp, Photorhabdus luminescens subsp. laumondii TTO1
  CDS (1)..(744): transl_table=11
atgctagaacaaatctgccaactggctcaggaagctggtgcggctattatgacaatttatcaggatgaacatcccctgaaagttgatcataagcaagatgattcaccggttactatggctgatattgtggctcataaaataattaaagccggattatcccgtatcgccccagaaattccactgttgtcggaagaagagcttcctacttgggaagagaggcgtgattggaagcgctattggttagttgatcctctggatggtaccaaggaatttattaatcgtaacggtgaatttacggttaatatcgccttgattgatgagggcgttcctgtgatgggcgttatatatgctcctgtgcaggatacgctttattccgggcaagggcggcaggcatggaaaaaagcctgtggaggtcaatgtttgccgattaagattcgtgatgctaatccaccaatggtcgttgttagccgctctcatatggatacagaattagaagattatctcaatcaattaggtgaacatcagacggtttctgtagggtcttcactaaagttctgtttggtggcggaaggaaaagcgcaactttatcctcgctttgggcccactcatatctgggatactgcggcgggtcacgctatagccattgctgctggtgctcacgtgacgaactggaaaggtcagacgctagattatacgcctcgtgaatcattcctgaatccgggatttagagtaacgattttttaa

SEQ ID NO: 2279 - protein, 247 aa, Photorhabdus luminescens subsp. laumondii TTO1
MLEQICQLAQEAGAAIMTIYQDEHPLKVDHKQDDSPVTMADIVAHKIIKAGLSRIAPEIPLLSEEELPTWEERRDWKRYWLVDPLDGTKEFINRNGEFTVNIALIDEGVPVMGVIYAPVQDTLYSGQGRQAWKKACGGQCLPIKIRDANPPMVVVSRSHMDTELEDYLNQLGEHQTVSVGSSLKFCLVAEGKAQLYPRFGPTHIWDTAAGHAIAIAAGAHVTNWKGQTLDYTPRESFLNPGFRVTIF

SEQ ID NO: 2280 - DNA, 828 bp, Vibrio vulnificus YJ016
  CDS (1)..(828): transl_table=11
atgcctacctcacaggatttatcggcactgttgccgcaagttatcgatattgctcgcaccgcggggcaattgattctggatatctaccaaagtaagcagtaccaagaatacaccaaaagcgatgagacgccggtcaccagcgccgatctcgccgcgcacaaattgatcacccaacgactgagtgagttaaccccagacattccagtgttgtctgaagaagcagcggatatcagcttggaacaacgcgcgcaatggaaccgttactggttggtggaccctcttgatgggacgcaggaatttatcgcccgcagtggcgattttgccaccatcatcgccttagtggagaacaacaagccggtaatgggcgtggtgtatggtccggtttcaggcgtgacttactatgcgtatcaaggtaaaggcgcatggaagatccctgagatgaacgaaagcttgaaaattcaaacccacaaacatgaactgcccggacaaaacatcgcgattgccatcagccgccgtcaagacatcaatcgcatcaccagccgtatgagcagcagttggaattacgatttggtgccgttaggctctgcggcattgaaagcgtgcttggtcgcggaaggggcggtggattgctatttgcgccttggcccgactggggaatgggataccgcggcgacacaatgcatcgtggaagaggccggtgggcgtatcctaagcacctacttggaaccgctttcttataacgaacgagacaccttggaaaatccgaacttcatcgtattaggcgatgccgatttgccgtggaacgacattttgcaggtcaaaggctag

SEQ ID NO: 2281 - protein, 275 aa, Vibrio vulnificus YJ016
MPTSQDLSALLPQVIDIARTAGQLILDIYQSKQYQEYTKSDETPVTSADLAAHKLITQRLSELTPDIPVLSEEAADISLEQRAQWNRYWLVDPLDGTQEFIARSGDFATIIALVENNKPVMGVVYGPVSGVTYYAYQGKGAWKIPEMNESLKIQTHKHELPGQNIAIAISRRQDINRITSRMSSSWNYDLVPLGSAALKACLVAEGAVDCYLRLGPTGEWDTAATQCIVEEAGGRILSTYLEPLSYNERDTLENPNFIVLGDADLPWNDILQVKG

SEQ ID NO: 2282 - DNA, 828 bp, Rhodopseudomonas palustris CGA009
  CDS (1)..(828): transl_table=11
atgactgccgcgttcgaacagcccgccgtcgtttcggccgagcacgccgccgctttgctcgaaccgctcaccaagctggtgctgcgcgccggggcggcgatcatggtgatcccgcgcgacgccaaggtcactcagaagccggacggctcgccggtgacgcccgccgatctcgccgctgaccaggtgatcgccgaggggctggctcagatcgctccgcacgtcccggtgctgtccgaagaatgttgcggcaatggacgaccgacgtcgggcagcttcttcgtggtcgatccgctcgacggcaccaaggagtacatcgccggccgcgacgaattcaccgtcaacctggcgctggtgtgcgacggggtgccggtgctcggcatcatcggcgcgccggctctagggctggcgtggcgcggcgtggtcggccatggcgctgagcaactgactgtcgccgcggacggggtcagctttgcagccaccgccatccgcacgcggccgctgccgcagccgggcgagccgtggactgcaacggtcagccggtcgcatctcgatgccgccaccgtcgccttcatcgacgcccgcccgggcgccgtacatgcgacgctggggtcgtcgctgaaattctgccggatcgccgaaggcaaggccgacatctacccgcggctggcgccgatctgcgagtgggatatcgcggcaggcgctgcgctggtcatcgccgcgggcggcaaggtgaccgacgcggccggcgcgccgttgcggttcgacgcaccgcggccgaacttcatcgtgccggaattcatcgcctggggcgaccctgacggtcgctag

SEQ ID NO: 2283 - protein, 275 aa, Rhodopseudomonas palustris CGA009
MTAAFEQPAVVSAEHAAALLEPLTKLVLRAGAAIMVIPRDAKVTQKPDGSPVTPADLAADQVIAEGLAQIAPHVPVLSEECCGNGRPTSGSFFVVDPLDGTKEYIAGRDEFTVNLALVCDGVPVLGIIGAPALGLAWRGVVGHGAEQLTVAADGVSFAATAIRTRPLPQPGEPWTATVSRSHLDAATVAFIDARPGAVHATLGSSLKFCRIAEGKADIYPRLAPICEWDIAAGAALVIAAGGKVTDAAGAPLRFDAPRPNFIVPEFIAWGDPDGR

SEQ ID NO: 2284 - DNA, 744 bp, Yersinia pestis biovar Microtus str. 91001
  CDS (1)..(744): transl_table=11
atgatgttagagcaaattggccagttggcccgtgaggcaggcgtggcgattatggcggtctatcagggcgacaaaccccttgatattgcgcataaaaaggatgattcaccggtgacggcggctgatttggcggctcaccagattatcaaagctgggttggcgcgattaaccccggatattccgctactctctgaagaggatccacccgcttgggatgtgcgccagcactggcaacgctactggctggttgacccgctggacggtactaaagagttcctcaatcgtaacggtgaattcaccgtcaacatcgctttgattgaccaaggtgaaccggtactgggcgtcgtctatgtaccggtaaccgaagtgatgtacagcgcggcaaacggacaggcttggaaagaagagtgtggcagacgtatgcagattcaggtgcgtgatgcccagcctccgttggtcgtggtgagccgctctcacagcgatgctgaattggaagactatttatcacaactgggggagcatcaaactatttcggtgggctcatcacttaaattctgcttggtggcggaagggaaagcgcaactgtacccgcgttttgggccaactaacgtctgggatacggcggctggtcatgccgtcgccatcgctgccggggcgcaagtacacgattggcagggaaagacactgtcttataccccacgtgaatctttcttgaaccccggtttcagagtttcgttattttag

SEQ ID NO: 2285 - protein, 247 aa, Yersinia pestis biovar Microtus str. 91001
MMLEQIGQLAREAGVAIMAVYQGDKPLDIAHKKDDSPVTAADLAAHQIIKAGLARLTPDIPLLSEEDPPAWDVRQHWQRYWLVDPLDGTKEFLNRNGEFTVNIALIDQGEPVLGVVYVPVTEVMYSAANGQAWKEECGRRMQIQVRDAQPPLVVVSRSHSDAELEDYLSQLGEHQTISVGSSLKFCLVAEGKAQLYPRFGPTNVWDTAAGHAVAIAAGAQVHDWQGKTLSYTPRESFLNPGFRVSLF

SEQ ID NO: 2286 - DNA, 867 bp, Chlamydomonas reinhardtii
  CDS (1)..(867)
atgggtggcggactttcggttctgcggggcgaggagacccccgactactctatggagattcagttgaaggtggaactgcaagtggaggacattatcgccacggcgcaggccgctggccgtgctattctgcagatctataacagcgaggcgtcgacatgggaggtccaaatgaagagcgatgcatcgcctctcactcgggcggaccgggaggcgaatgccatcatttgccaggcgctgcagaacatctccccgcacattccgatcatttcggaggagaacaagctgacgccgcacgctgtgcgccagaagttccagtactactggctggtggatccgctggacggcaccaaggagttcctcaagcgcaacggccagttcacggtcaacatcgcgctcatgtgcggcaccgcgcccgtcatgggcgtggtggacgtgccctgccagggcaagacctactgggccgtcaaggggaaaggcgcgtggctgcgctccgcggagggccagcgccgcatccaggccgccgactttgcgttcgaggacaaggggctcaagatcgtggccagcagcagccacctcaacaaggagaccgaggagttcattgcgctgttccagtctcccgagctggtgcaggtgggctccagcctcaagctgctcatggtggcggagggcgccgcgcacatctaccccaggctggcgcccacgtgcgagtgggacatcgccgccgccgacatcatcgtgcgcgaggcgggcggcgcggaggagctggtgaaggaggcggcggtggtgtacaacaaggaggacgtgctcaacccctacttcgtggtgttcgggaaacgcaaggcgcccatctccaccggctccagctaa

SEQ ID NO: 2287 - protein, 288 aa, Chlamydomonas reinhardtii
MGGGLSVLRGEETPDYSMEIQLKVELQVEDIIATAQAAGRAILQIYNSEASTWEVQMKSDASPLTRADREANAIICQALQNISPHIPIISEENKLTPHAVRQKFQYYWLVDPLDGTKEFLKRNGQFTVNIALMCGTAPVMGVVDVPCQGKTYWAVKGKGAWLRSAEGQRRIQAADFAFEDKGLKIVASSSHLNKETEEFIALFQSPELVQVGSSLKLLMVAEGAAHIYPRLAPTCEWDIAAADIIVREAGGAEELVKEAAVVYNKEDVLNPYFVVFGKRKAPISTGSS

SEQ ID NO: 2288 - DNA, 891 bp, Gibberella zeae PH-1
  CDS (1)..(891)
atggatagccaacagttgagcgagatttatgcttttgccgtccaattgggcaaggatgcgggagatatgctcatggctgcagcccagcgccgcatcgatggtcatggcacttcctccactaccgtatcatatgtcgagaaggagaactcggtagacctggtaaccaagactgacaacgatgtcgaaaacttcattcgtacaactgtcgccagtaaataccccgaacacggattcctgggagaggagtcatactctactggcgcatcacgaacttacctcgtcgacgacaagccaacatgggtagtcgatccccttgacggtaccgtcaactttacacatctctttcctatgttttgtgtatccatcgctttcgtcgttaaaggtgtcccggttattggtgtcatcaatgcgcctttccttcgccaattcttctcgtcatgcacaggccaaggcgcatggttgaatgagactcaaaggctgccattgattcgaaacccaatccctcccatgcccgcaaatgctcctagcgcttgcacattctcatgtgaatggggcaaagaccgtcgagacatcccagacggtaacttgtcgcgaaagatcgagtcttttgtcaacttagcttcagagaggaatggacgaggaggcaagggtgggatggttcatggtgtgcgaagcttgggaagcgcaaccttggatcttgcatatgtcgcaatgggctctttagatatctggtgggaaggtggctgctgggaatgggacgtcgctgctggtttcgccattctcgaagaagctggtggtcttgttacaactgccaatcctcccaacgatccagaaactgccgaaatagcaagagcgcatctcggcggtcgattatacctggcaatacggtaa

SEQ ID NO: 2289 - protein, 296 aa, Gibberella zeae PH-1
MDSQQLSEIYAFAVQLGKDAGDMLMAAAQRRIDGHGTSSTTVSYVEKENSVDLVTKTDNDVENFIRTTVASKYPEHGFLGEESYSTGASRTYLVDDKPTWVVDPLDGTVNFTHLFPMFCVSIAFVVKGVPVIGVINAPFLRQFFSSCTGQGAWLNETQRLPLIRNPIPPMPANAPSACTFSCEWGKDRRDIPDGNLSRKIESFVNLASERNGRGGKGGMVHGVRSLGSATLDLAYVAMGSLDIWWEGGCWEWDVAAGFAILEEAGGLVTTANPPNDPETAEIARAHLGGRLYLAIR

SEQ ID NO: 2290 - DNA, 837 bp, Bradyrhizobium sp. ORS278
  CDS (1)..(837): transl_table=11
atggcgacggggccgaccccgggaaccatcggcgtcgaggccgcggccgcgctgatgacgccgttgaccgagctcgtcgtcgaggctgcgcacgcgatcctcgcggtgaaccggcgcgcgatggccgtcaccgacaagtccgacggctcgccggtcaccgaagccgatctcgccgccgatcgcgtcattgccgatggattggcgcggctggcgccggacattccggccttatccgaggaacgggtgagcgcctgcgcggcgccgttcaagggcagcttcttcctgatcgacccgctcgacggcaccaaggagttcttggccggccgcggcgagttcacggtcaatctggcgctggtccgcgacgcgagccctctgctcggcatcgtctgcgcgcccgcgatcgggctgatctggcgcggcctggtcggccgcggcgccgagcggctgtcattctccgaagccggcttgagcgcgcctgccccgatccgcacccggccgatgcccaagccgggcgagccatgggtcgccgcggtcagccgctcacatggcgatgcccgcagcgaagccttcatcgcggcccgccccggcgcggatcggctggcgctcggctcggcggtgaagttcggccggctggcagaggggctggcggacatctatccgcggctcggcccgacctcggaatgggacgtggcggccggccatgccgtggtggtcgcagccggcggcaccgtgaccagcgaggccggtgttgccttgcgctatggcgagcgcagcgacagcttcattgtgccgagcttcatcgcctggggcgatccccgcgcggtgactgctgtttga

SEQ ID NO: 2291 - protein, 278 aa, Bradyrhizobium sp. ORS278
MATGPTPGTIGVEAAAALMTPLTELVVEAAHAILAVNRRAMAVTDKSDGSPVTEADLAADRVIADGLARLAPDIPALSEERVSACAAPFKGSFFLIDPLDGTKEFLAGRGEFTVNLALVRDASPLLGIVCAPAIGLIWRGLVGRGAERLSFSEAGLSAPAPIRTRPMPKPGEPWVAAVSRSHGDARSEAFIAARPGADRLALGSAVKFGRLAEGLADIYPRLGPTSEWDVAAGHAVVVAAGGTVTSEAGVALRYGERSDSFIVPSFIAWGDPRAVTAV

SEQ ID NO: 2292 - DNA, 813 bp, Dichelobacter nodosus VCS1703A
  CDS (1)..(813): transl_table=11
atgcaggattacattttaccgatcgccgctttgtgtcgcacgacatctgcggcgattttgcgtttttacggtcaaaaagaacatttacacgttcaagaaaaatccaatcatacgctgttgacgaatgctgatttaaccgcgcaccgccttttaagcgagggtttgccgaacattctgcctttgcccgtggtcagtgaagaatcgagtcatacattaaaaacggcttcactacgcgattattggctcattgatcccatcgacggcaccaaagaattcatcgcccaaacgggggaattttgcatttgcatcgcgcgcatttaccagcatcacccgatttttggactgatttatgcgccaaccacgcatcaatattggtatgcaatcgccggcgaaggcgcatataccacgaataatcaaggcattacgaaacggctttactgccgccgcccgaataatcaattcaccgtgattaccgcaaaaccgcaaatacaccaaaatatccgccaatatttacatgccatttttcccgatgatgattatcagcacattgcttgcggcagcgctttaaaattttgtttcatcgctgaaggtaaagcagatttatatcccaaactcgcggcaaaaacctgcgaatgggatacggctgccggcgatattttgctacacgaagcgcaaggcggtttgcgttatttgggtaatacttcattgcgttacggcattgctgatgatcctttaaatccgccctttcttgcttttgctcactgttcggaagaacgcattcaagcgtggtttgaacaaatttctgtgcgatag

SEQ ID NO: 2293 - protein, 270 aa, Dichelobacter nodosus VCS1703A
MQDYILPIAALCRTTSAAILRFYGQKEHLHVQEKSNHTLLTNADLTAHRLLSEGLPNILPLPVVSEESSHTLKTASLRDYWLIDPIDGTKEFIAQTGEFCICIARIYQHHPIFGLIYAPTTHQYWYAIAGEGAYTTNNQGITKRLYCRRPNNQFTVITAKPQIHQNIRQYLHAIFPDDDYQHIACGSALKFCFIAEGKADLYPKLAAKTCEWDTAAGDILLHEAQGGLRYLGNTSLRYGIADDPLNPPFLAFAHCSEERIQAWFEQISVR

SEQ ID NO: 2294 - DNA, 912 bp, Synechococcus sp. WH 7803
  CDS (1)..(912): transl_table=11
atgatgccgattgctccgacccttcccgccggcatcgatcaagcccaactgcttgaggccctgcgaccgctgtgttggggtgcggccgatattctccgtgcctacgcccgcggcgagcagccccctcacggtttttcccgggcgctcagcgttgaggatggcggtgaaggccctgtttcggctgcggatctggccgtgaatcagtggcttctcgatggtttgcgggcggccttcccggatgccgggtggaccttgctgagcgaggagaccgccaaggagcagctcaccgcaggccagccccttgctgctgagtggctctggattctcgaccccctcgatggcaccaaggattttctccagggcacgggggaatacgccgtgcacctggctcttgtgcagggggagcgtcccgtgctgggggtggtgctgctgccagaggccgatgagctctggttcggcgtggtgggccagggcagctggtgcgagaaccgtgctgccgagcgcagccccgtgcgcttcagtgatcgcagcgaggatctggtgctcgtggccagccgcagccatcgcgatgagcggctggaacgcctgatcgatgccttgcccttgggcagctccaaggcggtgggcagcgttggttgcaaagtggccacgatcctgcgtggagaggccgatgtgtacatctccctgtctgggaagagtgctccgaaggactgggatatggcggccccagaagcggtgttgctcgcggcaggaggggcctttacccatgccgatggccgtcttctcacctacaacaccggcgacatccgtcaggctggatgcctgatcgccagccatggaaaaacccatgccgccctggaagatcaggcggcacgggcgatggcagagattgatccggggttcccggtttga

SEQ ID NO: 2295 - protein, 303 aa, Synechococcus sp. WH 7803
MMPIAPTLPAGIDQAQLLEALRPLCWGAADILRAYARGEQPPHGFSRALSVEDGGEGPVSAADLAVNQWLLDGLRAAFPDAGWTLLSEETAKEQLTAGQPLAAEWLWILDPLDGTKDFLQGTGEYAVHLALVQGERPVLGVVLLPEADELWFGVVGQGSWCENRAAERSPVRFSDRSEDLVLVASRSHRDERLERLIDALPLGSSKAVGSVGCKVATILRGEADVYISLSGKSAPKDWDMAAPEAVLLAAGGAFTHADGRLLTYNTGDIRQAGCLIASHGKTHAALEDQAARAMAEIDPGFPV

SEQ ID NO: 2296 - DNA, 744 bp, Klebsiella pneumoniae subsp. pneumoniae MGH 78578
  CDS (1)..(744): transl_table=11
atgttagaacaagtatgtcagcttgcacggaatgcgggcgatgccatcatggaagtctacgatggaaaccagccgatcaacgtcgccagcaagaaagatgattctccggtcacggcggcggatatcgcagcgcataaagtcattgtcagcggcctgcaggcgctggatccggataccccgatcctctccgaggaggacccgccggcgtgggaagtgcgccagcactggcagcgctactggctggtcgacccgctggacggcaccaaagagtttattaagcgtaacggcgaattcaccgtcaatatcgcgctgattgaaaacggcaagccgacgctgggcgttgtctatgcgccggtgatgaaggtgatgtacagcgcgcaaaatggcaaagcctggaaagaagagtgcggcgtacgcaagcagatccaggtccgcgatgcccgtccgccgctggtggtgattagccgctcccacagcaacgatccggagctgcaggagtaccttgagcaacttggcgaacaccagaccacctcaatcggttcgtcgctgaaattctgcctggtggcggaaggtcaggcccagctctatccgcgcttcgggccgaccagcacctgggacactgccgccggccatgcggtcgcggtggccgccggggcgcatgttcacgactggcaggggaaaaccctcgactacacgccgcgtgaatccttcctcaaccccggcttccgggtctctatttattaa

SEQ ID NO: 2297 - protein, 247 aa, Klebsiella pneumoniae subsp. pneumoniae MGH 78578
MLEQVCQLARNAGDAIMEVYDGNQPINVASKKDDSPVTAADIAAHKVIVSGLQALDPDTPILSEEDPPAWEVRQHWQRYWLVDPLDGTKEFIKRNGEFTVNIALIENGKPTLGVVYAPVMKVMYSAQNGKAWKEECGVRKQIQVRDARPPLVVISRSHSNDPELQEYLEQLGEHQTTSIGSSLKFCLVAEGQAQLYPRFGPTSTWDTAAGHAVAVAAGAHVHDWQGKTLDYTPRESFLNPGFRVSIY

SEQ ID NO: 2298 - DNA, 843 bp, Xanthobacter autotrophicus Py2
  CDS (1)..(843): transl_table=11
atgacctttcccgtgccccgcgcgcccgcccccaccgatgccgccctgctggcgggccttgcggaggcggcgctggcggccggtgtcgtcatccgccgcatcgaggcggaaggcatcacccaccggcagaaatccgaccgcagcccggtcacggaggcggaccatgccgccgaagccaccatcttcgctgccctgtcccagctgatgcccggtgtgccggtggtggcggaggaggcgacggcggcgggcaccgaggtcatctgcggcaaccgcttcgtgctggtcgatcccctcgacggcacccgcgagttcatctccggcaatggcgagtacaccgtgaacatcgcggtggtggaggatggcgttccggtgctcggcgtggtctatgcgccggcccgcgctctgctgttcgccgggcggcccggctccgccttccgagccatccgcgcacccggcgcccgcgtcgacgcgcaggactggacccccatcgcctgccgcaaggtgcaggatggcgccctcgtggtggccgaaagccgctcccacggcgaccccgccaccgacgcgctcatcgcccgttaccaggtggccgagcgcatcccggcagggtcggcgctgaagttcggcctcatcgccgagggtaaggcggatttctatccccgtctcgggccggtgatggaatgggacagcgcggcgggccatgccctggtggtggcggccggcggcagtgtcacccggccggacggcagcccccttacctatgggcactccgaggtcggctacatggtccacggcttcgtggcctggggctccggcggaccgccggagatagggtccgtgggttaa

SEQ ID NO: 2299 - protein, 280 aa, Xanthobacter autotrophicus Py2
MTFPVPRAPAPTDAALLAGLAEAALAAGVVIRRIEAEGITHRQKSDRSPVTEADHAAEATIFAALSQLMPGVPVVAEEATAAGTEVICGNRFVLVDPLDGTREFISGNGEYTVNIAVVEDGVPVLGVVYAPARALLFAGRPGSAFRAIRAPGARVDAQDWTPIACRKVQDGALVVAESRSHGDPATDALIARYQVAERIPAGSALKFGLIAEGKADFYPRLGPVMEWDSAAGHALVVAAGGSVTRPDGSPLTYGHSEVGYMVHGFVAWGSGGPPEIGSVG

SEQ ID NO: 2300 - DNA, 852 bp, Desulfococcus oleovorans Hxd3
  CDS (1)..(852): transl_table=11
atgataaacgaatcctggatttccatagtactgggcgcctgcgtggatgccggccgggccatcctgaaggtctacgactcagactttgccgtgacgcacaaggccgatgattcgcccctgaccctggcggaccaggaggcccaccgtatcatcgccgatcgtctgcgaaaaacccgtgtgccggtgttaagcgaggaaggccggagcatcccttttgccgagcgttcgtgttgggaacagatgtggctggtggatccgctggacggcaccaaggagtttgtcaaacgcaacggcgaattcacggtgaacatcgcgctggtggaagcgggccgcccggtgttcggcgccatcttcgtccctgtccggcaggtgctgtacgtgggagggcagggtgccggttccttccggctggacgatgccggtgccattgcagccgccggttccggcgagctggagcagtggcaggacctggcggattgcggcaaaaagcttccctttcatgccgggcccgcctctcctttgaccgtggtgggcagccggtcccatctgacgccggaggttgagtcctttgtggaaaagttgaagacttcccacggtgaggtgctctttgtgccggcgggcagctcattgaagctgtgcctggtggctgaaggccgggcccatctctatccccgcctcggtcccaccatggagtgggacatcgccgccggtcatgcgattgccgaaaatgcgggggcccgtgtttattgccacgacaccggcggccccatggtatacaacaaggaaaacctgttaaacccatggtttatagtggaaggcgccgggttccggtccggcgaaaaaggcaaatga

SEQ ID NO: 2301 - protein, 283 aa, Desulfococcus oleovorans Hxd3
MINESWISIVLGACVDAGRAILKVYDSDFAVTHKADDSPLTLADQEAHRIIADRLRKTRVPVLSEEGRSIPFAERSCWEQMWLVDPLDGTKEFVKRNGEFTVNIALVEAGRPVFGAIFVPVRQVLYVGGQGAGSFRLDDAGAIAAAGSGELEQWQDLADCGKKLPFHAGPASPLTVVGSRSHLTPEVESFVEKLKTSHGEVLFVPAGSSLKLCLVAEGRAHLYPRLGPTMEWDIAAGHAIAENAGARVYCHDTGGPMVYNKENLLNPWFIVEGAGFRSGEKGK

SEQ ID NO: 2302 - DNA, 741 bp, Salmonella enterica subsp. arizonae serovar 62:z4,z23:--
  CDS (1)..(741): transl_table=11
atgttagaacaagtatgccagcttgcacggaacgcgggcgatgccattatgcaggtttatgatggagccaaaccgatggagtacttccgcaagcaggacgattctccagtcactgcggcggatatcgccgcacataccgtgattctcgaagggttacgtacgctcacgccggatattccggtgctttcagaggaagacccgcccgcctgggaagtgcgccagcactggcagcgttattggctggtcgatccactcgatggcaccaaagaatttattaagcgtaatggagaatttacggtcaatattgcgttgattgagcagggaaagccagtgctgggcgtagtctatgcgccagtgctgaaagtgatgtactgcgcagcggatggtaaggcctggaaagaagagtgcggggtgcgtaagcagattcaggttcgggatgcccgcccgccgctggtggtgattagccgttcgcataccgatgatgaactcaccgaatatctccaacagctcggcgaacatcagacgacctctattggctcctcgctgaagttttgtctggtggcggaaggtcaggcacagctttatcccagatttgggccgaccaacgtttgggacactgccgctggtcatgccattgccgttgctgccggggcgcacgttcacgactggcagggaaaaacgctggattatacccctcgtgaatcgttccttaaccccggcttccgggtgactatttactga

SEQ ID NO: 2303 - protein, 246 aa, Salmonella enterica subsp. arizonae serovar 62:z4,z23:--
MLEQVCQLARNAGDAIMQVYDGAKPMEYFRKQDDSPVTAADIAAHTVILEGLRTLTPDIPVLSEEDPPAWEVRQHWQRYWLVDPLDGTKEFIKRNGEFTVNIALIEQGKPVLGVVYAPVLKVMYCAADGKAWKEECGVRKQIQVRDARPPLVVISRSHTDDELTEYLQQLGEHQTTSIGSSLKFCLVAEGQAQLYPRFGPTNVWDTAAGHAIAVAAGAHVHDWQGKTLDYTPRESFLNPGFRVTIY

SEQ ID NO: 2304 - DNA, 819 bp, Pseudomonas putida GB-1
  CDS (1)..(819): transl_table=11
atgaacgacctgcaactgatgcacgaagtggtcaagctggcactgacggcaggcgaggcgatcctgccgttctggcgcgccgatgtggcggtgaccaacaaggccgacgattcgccggttaccgttgccgacctggcggcgcaccgggtgattgccgatggcctgttggcgctggcgccgcacataccggtgctgtccgaagaggattgcaatattcccctggccgagcgtcagggctggggccgctggtggctggtcgacccgctggatggcaccaaggaattcatcgccggcagcgaagagttcacggtcaacatcgccctgatcgaaaacggccaggtggtgttcggcgtggtgtcgatgccgaccaacgggcgctgctatttcggtggtcgcggcctgggtgcctggcgggccgacgcgggtgaggctgccaaggcgattcaggtgcgtaacgcgcctcctgcaggtgagtgtttcaccgtggttgccagccgccggcactccagcccggagcaggaagcgctgctggccgggctgggtgctgcggtgggggagctggaactggccaacgttggcagctcgttgaagttctgcctgttggctgagggtagcgccgattgctatccgcgcctggcgccgacttcgcagtgggacactgcggcggcgcagggtgtggtggaaggggccgggggcgaggtcatcgggctggatgggttgccgttccggtatccaccgcgcgagtcgttgcttaacccgtatttcctggcgttgccggcaaatgctgcctggcgccaggcgttccttaacctgatctga

SEQ ID NO: 2305 - protein, 272 aa, Pseudomonas putida GB-1
MNDLQLMHEVVKLALTAGEAILPFWRADVAVTNKADDSPVTVADLAAHRVIADGLLALAPHIPVLSEEDCNIPLAERQGWGRWWLVDPLDGTKEFIAGSEEFTVNIALIENGQVVFGVVSMPTNGRCYFGGRGLGAWRADAGEAAKAIQVRNAPPAGECFTVVASRRHSSPEQEALLAGLGAAVGELELANVGSSLKFCLLAEGSADCYPRLAPTSQWDTAAAQGVVEGAGGEVIGLDGLPFRYPPRESLLNPYFLALPANAAWRQAFLNLI

SEQ ID NO: 2306 - DNA, 819 bp, Haemophilus somnus 2336
  CDS (1)..(819): transl_table=11
atgaatgaattaaaaagtcaggtactgctggaaaaggttttacaaatcgctcatcaagctggagactatcttaatcttttttacaatggagaatttgattttcagatcaacataaaatcggataatacgcctatcacaaacgcagatttatttgtaaaccagtttcttatcgaaaaactgaccgcacttacgccacatatccctgttttatcagaagaaagctgtcaaatttctttttcagatcgacggcggtggcgtacttattggttgattgatccgctggatggtacacaacaatttattaatcgaacagatcaattcgctgtgctaattgcactgattcatcaaaatcggatcatgttaggtattattcatgctcccgtgttaaaacaaacttattatgccctgaaagggcatggtgcttataaacaaacggaacattctctgcaaactttatcagccagaaaatttgacttaaaccatacagtaaaaattgcagtaggttcaaaaaatgcggagcaaaaagtgcggtcaattttgagatcaaattatcaatacgaatttattacttatggttctagcggtttaaaaaccgcactggttgcagaaggaagtgcagattgctatattcgactgggacaaaccggtgaatgggacacagctgcggcggaagccattttatccgaaataggcggaggaatccgtgatacccaattcaacgccctaacttataacaaacgaccgagtttaataaaccctgattttattatggtatcggacatatctgccgattggaaaaaaatctttcaatttaattaa

SEQ ID NO: 2307 - protein, 272 aa, Haemophilus somnus 2336
MNELKSQVLLEKVLQIAHQAGDYLNLFYNGEFDFQINIKSDNTPITNADLFVNQFLIEKLTALTPHIPVLSEESCQISFSDRRRWRTYWLIDPLDGTQQFINRTDQFAVLIALIHQNRIMLGIIHAPVLKQTYYALKGHGAYKQTEHSLQTLSARKFDLNHTVKIAVGSKNAEQKVRSILRSNYQYEFITYGSSGLKTALVAEGSADCYIRLGQTGEWDTAAAEAILSEIGGGIRDTQFNALTYNKRPSLINPDFIMVSDISADWKKIFQFN

SEQ ID NO: 2308 - DNA, 801 bp, Mycobacterium marinum M
  CDS (1)..(801): transl_table=11
atgggaggcatagtgtacgaagcagtcagtacgacgttggccgataaacatcttgagcgggtcaccgccatcgcggtagaggccggaaagctgactctcaagtatcgccagaatccggaggtgaccgagaaaggcgatcacggtgacgacacctcaccggtcaccgaagccgacttggcagcgaactcgtacatcaccaaccatctcgcggcgctcgacccggacataccgataatctccgaggaaaccaagtcggcggactatgaaacccgacaacattggcaacgcttttggctggtggatccgctggacggcaccaaggaattcatcaagggcagcgatgagttcaccgtcaacatcgccctgatcgagaaccaggaacccattctcggggcaatctacgttccagcgaagcaacttctgtactacgcggccaaaggccacggcagctggagagtgaaggataacgggaccccggtacagatattctcgtcggtgcccgacctcagcaacgggctgaccatcgtggagagtaggtcacacccatcggcggcgctggaaaactacctcaaggattttcccatcagaaagcggatatccgcaggtagttcactcaaattctgcgttgtcgccgaaggcattgccgacatatatccacggctgaatcccacgatggagtgggacgtagcggcgggcgactgcatataccgtaattccacgcattcgggccaacgtacatcctcgttgacgtacaacaagcccacgttgaaaaatgacagcttcgtcatcggcctcaagtga

SEQ ID NO: 2309 - protein, 266 aa, Mycobacterium marinum M
MGGIVYEAVSTTLADKHLERVTAIAVEAGKLTLKYRQNPEVTEKGDHGDDTSPVTEADLAANSYITNHLAALDPDIPIISEETKSADYETRQHWQRFWLVDPLDGTKEFIKGSDEFTVNIALIENQEPILGAIYVPAKQLLYYAAKGHGSWRVKDNGTPVQIFSSVPDLSNGLTIVESRSHPSAALENYLKDFPIRKRISAGSSLKFCVVAEGIADIYPRLNPTMEWDVAAGDCIYRNSTHSGQRTSSLTYNKPTLKNDSFVIGLK

SEQ ID NO: 2310 - DNA, 861 bp, Acinetobacter sp. ADP1
  CDS (1)..(861): transl_table=11
atgtttattcagactgatcaatcaataacaggtaatttaattaatcaattattgccgattttagagcaagcttctaatttgttaaataacgagtatgaaaattatatttcaggaaatcagttagatatccaaaaaaaaacagatgaatctcctgtaacgcaagctgatcttaaaataaatcattttctagtaacagagttggccagaataacacctgattaccctgtattatctgaggaaggtgacaatactcagcgatgttcatggaatatttgctggatgttggatcctttagatgggacaaaagagtttattcagcaaagagatgagttcactatcaatctgagtttaatcgaagattcatatacttcattttctgtgattgttgttccgcgtgagcaacagatgtatataggatatacacatgaattgccgtataaatatcagtttaattctaaacaatggtggcgatatcatcattcaattgagagcctgaataatacgattcaagttggactaagccatcgaagtaagagtagtaaatatcaaaaatttatagagtacttagagagtgactataagattgtttgtcgtgaggctgggagtgcttataaattttgtatgatgctagaaggtaaaattgatttctatccgagatttcatccaacatctgaatgggatacaagtgctggacaggcattgctggaaagtattgggggaggcttagtctctttaaacggtattccatttaaatataatgtacgtaccaccgttttaaaccaaggcttcattgcgtattcaaaatctgagtataggcatttggtattggagctattacaacaaatagatttttcaaattga

SEQ ID NO: 2311 - protein, 286 aa, Acinetobacter sp. ADP1
MFIQTDQSITGNLINQLLPILEQASNLLNNEYENYISGNQLDIQKKTDESPVTQADLKINHFLVTELARITPDYPVLSEEGDNTQRCSWNICWMLDPLDGTKEFIQQRDEFTINLSLIEDSYTSFSVIVVPREQQMYIGYTHELPYKYQFNSKQWWRYHHSIESLNNTIQVGLSHRSKSSKYQKFIEYLESDYKIVCREAGSAYKFCMMLEGKIDFYPRFHPTSEWDTSAGQALLESIGGGLVSLNGIPFKYNVRTTVLNQGFIAYSKSEYRHLVLELLQQIDFSN

SEQ ID NO: 2312 - DNA, 741 bp, Pectobacterium atrosepticum SCRI1043
  CDS (1)..(741): transl_table=11
atgctagaacctatttgccaactggcccgtgatgccggtgctgccattatgcaggtttacgacgggcagcatcccgtagatgtcgcgcacaagaaagatgattcgccagtgaccgcagccgatctcgcggctcatcgggtcattaaggaaggactggcggcggcgtttcctgatattcctttgctgtcagaagaagatccgccggagtgggaagtccgtcggcactggcagcgctattggctggtcgatccgctggatggcacgaaagagttcctcaaccgcaacggcgagtttacggtcaatattgcgctgatcgaaaacggccaagccgtgatgggtgtggtttatgtaccggtcacgggcgtgatgtattccgcggcggatggtaaagcctggaaagaagataacggccagcgccagcaaatttcggtgaagcaggcgtatccgccgctggtggtagtcagccgctctcatgccgatcgtgaactgaaagattatcttagccagttgggtgagcaccagacggtggcgattgggtcatcgctaaaattttgtttggtggcagaaggtgaagcgcagctttacccacgcttcgggccgactaacatttgggatacagcggcgggccatgcggtggcggtggcagctggggcgcagattcacgattggcaggggcagcctctgtcttacacgccgcgtgaatctttcctcaaccccggttttcgcgtctctttattttag

SEQ ID NO: 2313 - protein, 246 aa, Pectobacterium atrosepticum SCRI1043
MLEPICQLARDAGAAIMQVYDGQHPVDVAHKKDDSPVTAADLAAHRVIKEGLAAAFPDIPLLSEEDPPEWEVRRHWQRYWLVDPLDGTKEFLNRNGEFTVNIALIENGQAVMGVVYVPVTGVMYSAADGKAWKEDNGQRQQISVKQAYPPLVVVSRSHADRELKDYLSQLGEHQTVAIGSSLKFCLVAEGEAQLYPRFGPTNIWDTAAGHAVAVAAGAQIHDWQGQPLSYTPRESFLNPGFRVSLF

SEQ ID NO: 2314 - DNA, 744 bp, Yersinia pseudotuberculosis IP 32953
  CDS (1)..(744): transl_table=11
atgatgttagagcaaattggccagttggcccgtgaggcaggcgtggcgattatggcggtctatcagggcgacaaaccccttgatattgcgcataaaaaggatgattcaccggtgacggcggctgatttggcggctcaccagattatcaaagctgggttggcgcgattaaccccggatattccgctactctctgaagaggatccacccgcttgggatgtgcgccaacactggcaacgctactggctggttgacccgctggacggtactaaagagttcctcaatcgtaacggtgaattcaccgtcaacatcgctttgattgaccaaggtgaaccggtactgggagtcgtctatgtaccggtaaccgaagtgatgtacagcgcggcaaacggacaggcttggaaagaagagtgtggcagacgtatgcagattcaggtgcgtgatgccctgcctccgttggtcgtggtgagccgctctcatagcgatgctgaattggaagactatttatcacaactgggggagcatcaaactatttcggtgggctcatcacttaaattctgcttggtggcggaagggaaagcgcaactgtacccgcgttttgggccaactaacgtctgggatacggcggctggtcatgccgtcgccatcgctgccggggcgcaagtacacgattggcagggaaagacactgtcttataccccacgtgaatctttcttgaaccccggtttcagagtttcgttattttag

SEQ ID NO: 2315 - protein, 247 aa, Yersinia pseudotuberculosis IP 32953
MMLEQIGQLAREAGVAIMAVYQGDKPLDIAHKKDDSPVTAADLAAHQIIKAGLARLTPDIPLLSEEDPPAWDVRQHWQRYWLVDPLDGTKEFLNRNGEFTVNIALIDQGEPVLGVVYVPVTEVMYSAANGQAWKEECGRRMQIQVRDALPPLVVVSRSHSDAELEDYLSQLGEHQTISVGSSLKFCLVAEGKAQLYPRFGPTNVWDTAAGHAVAIAAGAQVHDWQGKTLSYTPRESFLNPGFRVSLF

SEQ ID NO: 2316 - DNA, 804 bp, Mannheimia succiniciproducens MBEL55E
  CDS (1)..(804): transl_table=11
atgcaaataactcaacaacttctcgatgacgtattgaaaatcgcctcattagcgggcgaacatctaaaaacattctatgcaaaatccgtgaacgtagaaataaagacggacaatacacccgttacggaagccgatttatttttgagccaatttctaatcgaaaaattaaccgtactaacgccggatattcccgtgctctcggaggaaaactgcaacattccgctggccgaacgtcaaaaatggcagtcttactggttaattgatccggtggacggtacacaacaatttatcaatcataccgggcaattttccattatgatttgcctggttcaggataatcaaccgcaactcggcattatccatgccccaatcataggaaaaacctattatgcccgtcggggactaggcgcttttctgattgaaaacggctgttgccgaaaacttccgccgcttcaaccacacaatcatcagcacatcaaaattaccatcggttcgtctaatccggaaaaaatccgccaatccgtacaaccgccttataaggcggatctgttattgtacggatccagcagtttgaaatccggccttgttgccgaaggcgtggcggactgttacgttcgtttgggcaatacgggtgaatgggataccgcagcggcagaagtattgctgaatgaagtgggcggcaaaatttttaatttacaataccggcctctcacttataatcagcgagaaacattagtgaatccccattttgtcatggctaatgcacaattggattggaaaaaaatctttcgatttgatttgtaa

SEQ ID NO: 2317 - protein, 267 aa, Mannheimia succiniciproducens MBEL55E
MQITQQLLDDVLKIASLAGEHLKTFYAKSVNVEIKTDNTPVTEADLFLSQFLIEKLTVLTPDIPVLSEENCNIPLAERQKWQSYWLIDPVDGTQQFINHTGQFSIMICLVQDNQPQLGIIHAPIIGKTYYARRGLGAFLIENGCCRKLPPLQPHNHQHIKITIGSSNPEKIRQSVQPPYKADLLLYGSSSLKSGLVAEGVADCYVRLGNTGEWDTAAAEVLLNEVGGKIFNLQYRPLTYNQRETLVNPHFVMANAQLDWKKIFRFDL

SEQ ID NO: 2318 - DNA, 819 bp, Methylococcus capsulatus str. Bath
  CDS (1)..(819): transl_table=11
atgcccatcatgaaggagccttcccgcctgctcgaatccgtggtcgcgctggccaaggaggccggccgggctatcctcgcgatctatgactcggagttcagcgtcacgcagaaatccgaccaatcaccactgacggcggcggatctggcatcgcatgagttgattgtagccggactggctcgtctgagaccccaatttccggtactttcggaagagtcagcggctcacgcgttcgaagacaggaaaaactggtcttcgctctggctggtcgacccgctggacggcaccaaggaattcgtgaaaagaaacggggaattcacggtgaacatcgccctgatccatgaacacgcgcccgtcctgggcgtcgttcacgcccctgcgctggacctgacgtatttcgccgccgaaggttgtggcgcctttcgccagcacggcgaccagacaccgcaacgcatccgggtgcgcgcccaggcaccgctgcatcccgtcgtcgtcggcagccggtcgcacgtgaatgctgcaatggagacttatctgaaccggctgggagaatatgaattgcggccgatgggcagttcgctcaagctctgtctggtggcggaaggaaccgccgatctgtatccccggatcggtccgacttccgaatgggatacggcggcggcacattgcgtcgtcaccgaggccggcggcgcggtgaccgacctcacgggcgccccgctcgtgtataacgcaagagacagtctgttgaatccttacttcctggtgttcggcgacaagagccgtccctggctcgactacacgcgaggaatcgaaggctag

SEQ ID NO: 2319 - protein, 272 aa, Methylococcus capsulatus str. Bath
MPIMKEPSRLLESVVALAKEAGRAILAIYDSEFSVTQKSDQSPLTAADLASHELIVAGLARLRPQFPVLSEESAAHAFEDRKNWSSLWLVDPLDGTKEFVKRNGEFTVNIALIHEHAPVLGVVHAPALDLTYFAAEGCGAFRQHGDQTPQRIRVRAQAPLHPVVVGSRSHVNAAMETYLNRLGEYELRPMGSSLKLCLVAEGTADLYPRIGPTSEWDTAAAHCVVTEAGGAVTDLTGAPLVYNARDSLLNPYFLVFGDKSRPWLDYTRGIEG

SEQ ID NO: 2320 - DNA, 798 bp, Silicibacter pomeroyi DSS-3
  CDS (1)..(798): transl_table=11
gtgacctacgaggaactaattcccgtcattcgccgtctcgcgcttgaggcgggcgatgtgatcatgtccatctacaacgccgacgatttcggcgtgaaggtcaaatcggactccagcccggtgaccgaggcggacgaggcagccgacgcgctgatctcggcgggcttgcgcgcggccttccccgatatcctgctggtgaccgaggaacaggcggcctcgcacagccagacgggcgacaccttcctgatcgtcgatccgctggacgggaccaaggaattcatcaaccggcgcggcgatttcaccgtcaatatcgcgctggtggaaaacggcacgcccacgcgtggcgtggtctatgccccggccaagggacggatgttctatactctggcggatggcagctcggtcgaggagaccggcggactggacaaggaaacgcccggtgacctctctccgatccgggtggccgaggccgacaatgccgcgctgctggtggtggcgtcgaaatcgcaccgcgaccaggcgaccgaggattacatcggcaaatacgccgtcaaggacagcaagagcgccggatcctcgctgaaattctgtctggtggccacgggcgaggccgatctttacccgcgtgttggccgtaccatggaatgggacactgccgccggtcacgcggttctggccggagccgggggcaaggtggtacgtttcgacaatcaccagccgctgacctatggcaaggacggctatgccaacccgttcttcatcgcctacgcccccagcgtcaccctcaaggaagcctga

SEQ ID NO: 2321 - protein, 265 aa, Silicibacter pomeroyi DSS-3
MTYEELIPVIRRLALEAGDVIMSIYNADDFGVKVKSDSSPVTEADEAADALISAGLRAAFPDILLVTEEQAASHSQTGDTFLIVDPLDGTKEFINRRGDFTVNIALVENGTPTRGVVYAPAKGRMFYTLADGSSVEETGGLDKETPGDLSPIRVAEADNAALLVVASKSHRDQATEDYIGKYAVKDSKSAGSSLKFCLVATGEADLYPRVGRTMEWDTAAGHAVLAGAGGKVVRFDNHQPLTYGKDGYANPFFIAYAPSVTLKEA

SEQ ID NO: 2322 - DNA, 843 bp, Pseudomonas syringae pv. syringae B728a
  CDS (1)..(843): transl_table=11
atgaccgattcgttgcacaacctgccacatccgctgctcgccccggtgattgaactcacgcgactggcgggcgaagtgatcctgccgttctggcgcgccaatgtcaccgtgaccaccaagactgacgactcgccggtgaccgccgctgatctggccgcccatcaggtgctggtcgagggcctgcaggcgcttgatccggacattcatgtgctctctgaagaggacgctgacatccccttccgcgagcgggcaggctgggagcgctggtggctggtcgatccgctggacggcaccaaggagttcatctccggcagcgaagagttcaccgtcaatgtcgcactgatcgaacgcggccgcgtggtattcggtgtggtctcgatgcccaccaacaaccgttgttacttcggcggtgccgggctgggtgcctggcgcagcgatggcgtcggccacctccagccgatcgcagtgcgcaatcatcttgctgaagggcagacctttacggtggtcgccagccgccgccattccagcccggagcaggaacatttgctcgcgggcctgtcgaacgggctgggtcatttgcaactgaccaacatcggcagctcactgaaattctgcctgctggccgaaggcgccgccgactgctacccgcgcctggccccgacctcgcaatgggacaccgcagcggcgcagggcgtgcttgaaggtgcaggaggcgaagtgttgcaactggacggccagccgttcagctacccggcccgcgaatcactgctcaacccgttcttcctggccctgccggccaacgccgaatggcgcgacaaactgctggtgctggcgcagtcctga

SEQ ID NO: 2323 - protein, 280 aa, Pseudomonas syringae pv. syringae B728a
MTDSLHNLPHPLLAPVIELTRLAGEVILPFWRANVTVTTKTDDSPVTAADLAAHQVLVEGLQALDPDIHVLSEEDADIPFRERAGWERWWLVDPLDGTKEFISGSEEFTVNVALIERGRVVFGVVSMPTNNRCYFGGAGLGAWRSDGVGHLQPIAVRNHLAEGQTFTVVASRRHSSPEQEHLLAGLSNGLGHLQLTNIGSSLKFCLLAEGAADCYPRLAPTSQWDTAAAQGVLEGAGGEVLQLDGQPFSYPARESLLNPFFLALPANAEWRDKLLVLAQS

SEQ ID NO: 2324 - DNA, 810 bp, Pseudomonas fluorescens Pf-5
  CDS (1)..(810): transl_table=11
ttgctggcgccggttgccgagctggccctgcgtgccggtgaagcgatcctgccgttctggcgcgccgatgtggcggtcaatcacaaggccgacgagtcgccggtgaccgccgccgacctggccgcccatcacctgatcgtggccggcctcacggccctggacccgagcatcccggtgctgtccgaagaggatgcggacattccccaggccacccgcgccagctggcagcgctggtggctggtggacccgctggacggcaccaaggaattcatttccggcagtgaagaattcaccgtcaatatcgccctgatcgagcaggggcgggtggtgttcggcgtggtgtcgatgcccaccagtggccgctgctacctgggcggtgccggccttggggcctggcgcgtggatcgcgggcaggcaccgcaggcgatccaggtgcgtgagcaaccaggggccggcgaggcgtttaccgtggtggccagccgccggcattcgagcccggagcaggaacgtctgctcagtggtttgagcgccgccctgggtgaattgcaactggccaatatcggcagttcgctgaaattctgcctgctggccgaaggcgcggcggactgttatccacgcctggcgcccacctcgcagtgggacaccgcggcggcccagggcgtgctcgaaggcgcgggcggcgaggtgctggatctcagcggtgcgccgttctgctatccacctcgggagtcgttgctcaacggcttcttcctggccctgccggccaaggcgccctggcgcgccaagttgctggaactggcccgctcctga

SEQ ID NO: 2325 - protein, 269 aa, Pseudomonas fluorescens Pf-5
MLAPVAELALRAGEAILPFWRADVAVNHKADESPVTAADLAAHHLIVAGLTALDPSIPVLSEEDADIPQATRASWQRWWLVDPLDGTKEFISGSEEFTVNIALIEQGRVVFGVVSMPTSGRCYLGGAGLGAWRVDRGQAPQAIQVREQPGAGEAFTVVASRRHSSPEQERLLSGLSAALGELQLANIGSSLKFCLLAEGAADCYPRLAPTSQWDTAAAQGVLEGAGGEVLDLSGAPFCYPPRESLLNGFFLALPAKAPWRAKLLELARS

SEQ ID NO: 2326 - DNA, 822 bp, Colwellia psychrerythraea 34H
  CDS (1)..(822): transl_table=11
atgagccaagataaattattgagcattgctttagaaagcgcaaagaaagctggcgtagaagtaatgaagtattatcgtcaaggaaactatactgaagaaaccaaagctgatgaaagcccagtaaccagtgccgatttagccgcaaatgacatcttgatggatcagctcaaaacactgacaccagatatccctattatttctgaagaagtgggtactgtgcagttaaatgagcgaaaagattggtctcgttattggttactcgaccctattgatggcactggcgaattcatcatcggtagcggtgattttgccgtaaatatcgcgctcgttgaaaatggttggccaacactgggtgttattcacgcgccggatcactgcctaacctattatggtcaaaaaaatctgggtgctttcaaagataatagccaagccagtcatgcaattcgtgtcgctgaatatcaagaaaaccgtcgtattaaagtcgccattagtcgtcgtcagcagctggaactcatgggacaatatttaaataatgactatgattatgactatgttgctttaggtagttgttcattaaaaaactgtcttatcgctgaaggtggagccgattgttatatacgagtaggagtcactggcgaatgggataccggagctagtcaatgtatcttggaacaagccggcggtgatatcatcgatagtgagtttaatcctttaagttacaataaacgagaaagcttacttaatcctgattttgtcagtttaggtgcgagagactttccatggcaaaaaataattaaagcacatagaaaagtttatgaataa

SEQ ID NO: 2327 - protein, 273 aa, Colwellia psychrerythraea 34H
MSQDKLLSIALESAKKAGVEVMKYYRQGNYTEETKADESPVTSADLAANDILMDQLKTLTPDIPIISEEVGTVQLNERKDWSRYWLLDPIDGTGEFIIGSGDFAVNIALVENGWPTLGVIHAPDHCLTYYGQKNLGAFKDNSQASHAIRVAEYQENRRIKVAISRRQQLELMGQYLNNDYDYDYVALGSCSLKNCLIAEGGADCYIRVGVTGEWDTGASQCILEQAGGDIIDSEFNPLSYNKRESLLNPDFVSLGARDFPWQKIIKAHRKVYE

SEQ ID NO: 2328 - DNA, 843 bp, Pseudomonas syringae pv. phaseolicola 1448A
  CDS (1)..(843): transl_table=11
atgaccgattcgttacaaaacctgccacatccgctgctcgccccggtgattgaactggtccgcctggcgggcgaggtgatcctgccgttctggcgagccaatgtcaccgtcaccaccaagaccgacgactcgccagtgaccgccgccgacctggcagcccaccaggttttggtcgagggcttgcaggcgcttgatcggagcattcatgtgctctctgaagaagacgccgacatcccgttcagcgagcgagcgaaatgggagcgctggtggctggtcgatccgctggatggtaccaaggagtttatctccggcagtgaggagttcaccgtcaacgtcgcgctgattgagcgcggtcgtgtggtgttcggtgtggtgtcgatgcccaccaacaaccgttgttacttcggcggtgcagggctgggtgcctggcgcagtgatgacatcgaccacctccagccgattgccgtgcgcactcagccgggcgaagggcagacctttaccgtagtcgccagccgccgtcattccagtccggagcaggagcatttgctggctggcctgtcgagcgggcttgggcatttgcagctgaccaatatcggcagttcattgaaattctgcctgctggccgaaggtgctgccgattgctacccgcgactggccccgacttcgcaatgggacactgctgcggcgcaaggcgtgcttgaaggcgctggcggcgaagtgctgcaactggacggcaaaccgttcagctacccggcacgcgaatcgctgctcaacccgttcttcctggcgttgcctgccaacgccgaatggcgcgacaaactgctggtgcttgcgcagtcctga

SEQ ID NO: 2329 - protein, 280 aa, Pseudomonas syringae pv. phaseolicola 1448A
MTDSLQNLPHPLLAPVIELVRLAGEVILPFWRANVTVTTKTDDSPVTAADLAAHQVLVEGLQALDRSIHVLSEEDADIPFSERAKWERWWLVDPLDGTKEFISGSEEFTVNVALIERGRVVFGVVSMPTNNRCYFGGAGLGAWRSDDIDHLQPIAVRTQPGEGQTFTVVASRRHSSPEQEHLLAGLSSGLGHLQLTNIGSSLKFCLLAEGAADCYPRLAPTSQWDTAAAQGVLEGAGGEVLQLDGKPFSYPARESLLNPFFLALPANAEWRDKLLVLAQS

SEQ ID NO: 2330 - DNA, 828 bp, Pseudomonas fluorescens PfO-1
  CDS (1)..(828): transl_table=11
atgaattttccccatccgttgatggcgccggtggtcgagctggcattgcgggccggtgaggcgattttgccgttctggcgtgccgatgtggccgtcaccgccaagtccgatgattcaccggtgacggcggcggacatggccgctcaccacgtgatcgtggccggcctgacagcgctggatccgagcattccggtgctgtccgaagaggacgccgacatcccgcaaagcgtgcgtgcaggctggcagcgctggtggctggtggacccgctggatggcaccaaggagttcatcagcggcagcgaagaattcaccgtcaatatcgcgttgatcgagaatggccgggtggtgttcggtgtggtgtcgatgccgaccaacggtcgcttctacgttggcggagccgggctcggtgcctggcgcggcgacacgggcggcacgccggtggcgattcaggtgcgtgatgtgccggggccgggcgaagcgttcaccgtggttgccagccgccgtcattcgagtccggagcaggaacgcttgctggccggattgagtgccagccttggcgagttgcaactggccaacatcggcagttcgctgaagttctgtctgctcgccgaaggggcggccgattgttacccgcgactggcgccgacgtcccagtgggacacagcggcggcgcagggcgttctggaaggcgccggcggcgaggttctggatttgaacggtgacgcgttctgctatccaccacgggattcgttacgcaacgcgttctttcttgcactgccggcaaaagcggcgtggcgttcgaagttgctggaactggcccattcgtaa

SEQ ID NO: 2331 - protein, 275 aa, Pseudomonas fluorescens PfO-1
MNFPHPLMAPVVELALRAGEAILPFWRADVAVTAKSDDSPVTAADMAAHHVIVAGLTALDPSIPVLSEEDADIPQSVRAGWQRWWLVDPLDGTKEFISGSEEFTVNIALIENGRVVFGVVSMPTNGRFYVGGAGLGAWRGDTGGTPVAIQVRDVPGPGEAFTVVASRRHSSPEQERLLAGLSASLGELQLANIGSSLKFCLLAEGAADCYPRLAPTSQWDTAAAQGVLEGAGGEVLDLNGDAFCYPPRDSLRNAFFLALPAKAAWRSKLLELAHS

SEQ ID NO: 2332 - DNA, 774 bp, Desulfovibrio desulfuricans subsp. desulfuricans str. G20
  CDS (1)..(774): transl_table=11
atgtttgaaaacgtacccctgagcgggatgatccgcatagccagacaggcgggaaaagaaatcgccgcccgtcagcaggccattgtgcaggcaggtgaagccgccatatggcacaaggacgacgactcgcccgtcactcaggcggacagggcggccagtgccgttctgtgtgccggactggcacagatggctccttctgttcccgttatttcagaagaggaatccattccccctgccgaggtacgacggggctgggggctgtattttctggtggacccgctggacggcaccaaaggctatctgaaaggagaggcagactacagtgtctgtgtggcactcatgcgccgcgacatgcctctggccggagttgtccatgtgcctgcgcgcgggcttacctattacggtctgcccggcacgggcgcatggcgcgaagatgaaagcggcatgccggtgcgcctgcataccgcccccgccgtttcaggaaaacaaccggtggtgctgcaaagccgggtgtccgcaacccccaaactggatgcctacatggatggtctgccccatacgcgcctgatggcaggcagtgcctacaagttctgcctgctggccgagggaacggcccagatgtatccctgtctgcaccccacatgggaatgggacaccgccgccggagaagccgttctgcgcggagcgggcggcactgtgaccgatatggacggccgccccctcagatacggcaaaagctctctgctcaacgatcttttcatagcgcggggatga

SEQ ID NO: 2333 - protein, 257 aa, Desulfovibrio desulfuricans subsp. desulfuricans str. G20
MFENVPLSGMIRIARQAGKEIAARQQAIVQAGEAAIWHKDDDSPVTQADRAASAVLCAGLAQMAPSVPVISEEESIPPAEVRRGWGLYFLVDPLDGTKGYLKGEADYSVCVALMRRDMPLAGVVHVPARGLTYYGLPGTGAWREDESGMPVRLHTAPAVSGKQPVVLQSRVSATPKLDAYMDGLPHTRLMAGSAYKFCLLAEGTAQMYPCLHPTWEWDTAAGEAVLRGAGGTVTDMDGRPLRYGKSSLLNDLFIARG

SEQ ID NO: 2334 - DNA, 783 bp, Rhodospirillum rubrum ATCC 11170
  CDS (1)..(783): transl_table=11
atgatcgacatcgatgctccgctagaccttgtccaggctctgatccccatcgccgaaaaggcgggcgaggagatcctggcggtctacaccacgcccttcgccgttgaaagcaaggccgaccattccccggttaccgaggccgaccgccgggcggaagcggtgatcatcgaggccttgacccggctgaccccggccattccgatcgtcgccgaggaagccgtcgccgccggccatatcccggtggtcggcgatcagccgttctggctggtcgacccgctggacggcaccaaggaattcgtcaagcgcaacggcgagttcacggtcaatatcggccttgtcgtcggcggcgtgccggtgctgggcgtcgtgcattgcccggccctggagatcacctattggggggccggcctcggccatgcggtcatgcgcagccgccacagcacgcggacgatcacctgccgcccggagcccgaggacggattgaccgttctggccagccgcagccatggctcggacgacgagatgacgacctttctcgccgcctttccggtcaaggcccgcatcgccgccggcagcagcctgaagttctgccgcatcgccgagggaaccgccgatctgtatccccggcttggcccgacctatgaatgggacacctgcgccgcccatgcggtgctgcgcgccgccggcggtggcgtcttcaccctggacggccagcctttggcctatgccaagcgcggcgatttcctcaatccgcccttcgtcgcccggggattgccggcgtga

SEQ ID NO: 2335 - protein, 260 aa, Rhodospirillum rubrum ATCC 11170
MIDIDAPLDLVQALIPIAEKAGEEILAVYTTPFAVESKADHSPVTEADRRAEAVIIEALTRLTPAIPIVAEEAVAAGHIPVVGDQPFWLVDPLDGTKEFVKRNGEFTVNIGLVVGGVPVLGVVHCPALEITYWGAGLGHAVMRSRHSTRTITCRPEPEDGLTVLASRSHGSDDEMTTFLAAFPVKARIAAGSSLKFCRIAEGTADLYPRLGPTYEWDTCAAHAVLRAAGGGVFTLDGQPLAYAKRGDFLNPPFVARGLPA

SEQ ID NO: 2336 - DNA, 816 bp, Saccharophagus degradans 2-40
  CDS (1)..(816): transl_table=11
atgaatttagcaaccttactacctagtatcgaacagcttgccaaacaagcgggtgaagccacgcttgcggtttataaaaagccagaattgtgggatgtagagcataaagacgattgcagcccactcactcaagcagatattcaaagccacaatattattgccgaaggcctagccgcgcttacgcctaacattcctgtgttatcggaagaagacgacgtaccgtcctttgaggtgcgcagccaatggcaacagtattggttaatagacccgttagatggcaccaaagaatttattaatcgcaaaggcgagttcactgtaaacatcgcacttattcaaaataataaagctgtgcttggcgttgtatacgcgccggtgttagatgtgtgttacacaggggcagaaggcattggcgcgtttaaaatagatgctaaaggcaaaacgccactgcgtgtaaaaaaacttacacagggcaagcaaacattgaatattgtagccagccgccggcatggcgcagaagaagtagatcgcttactagaaactataaccagcaagtatggcgaaccccaattaacaagtatgggcagctcgttaaagttgtgtttagtggctgagggtaaagccgacatttacccgcgcttagcacctacctgcgaatgggataccgccgcctcgcaagctgttgtggagcaagccggtggtgtagtgctagatgatcaatttaaacccatgcaatacaacgccaaacccgagctgctaaacggctatttttatgtaataggcgaccaacaatttgattggttggcactgcttaaataa

SEQ ID NO: 2337 - protein, 271 aa, Saccharophagus degradans 2-40
MNLATLLPSIEQLAKQAGEATLAVYKKPELWDVEHKDDCSPLTQADIQSHNIIAEGLAALTPNIPVLSEEDDVPSFEVRSQWQQYWLIDPLDGTKEFINRKGEFTVNIALIQNNKAVLGVVYAPVLDVCYTGAEGIGAFKIDAKGKTPLRVKKLTQGKQTLNIVASRRHGAEEVDRLLETITSKYGEPQLTSMGSSLKLCLVAEGKADIYPRLAPTCEWDTAASQAVVEQAGGVVLDDQFKPMQYNAKPELLNGYFYVIGDQQFDWLALLK

SEQ ID NO: 2338 - DNA, 801 bp, Methylobacillus flagellatus KT
  CDS (1)..(801): transl_table=11
atgagtcatgcgctgctcccggcattgatccgattggcgcataaggccggggatgccatcatgcaggtataccggggagattttgcagtacagcgcaaacaagattactctcccctgacagaggcggacctggttgcccatggtgtcattgccgcgggcttgcagcgcttgacaccgggcgtgcccttgatttccgaggagtgcgagcttgctccgttcttggagcgtcggcagtggcggcaatactggctggtagaccctctggacggcacgcgggagttcgtcaagcgtaatgatgaattcagcgtcaatatcgccctgatcgatcaaggccggcctgtactcggggtcatccatgcgccagcactggggctcagctattatgccgacggtaaagctgcctataagcaatctggcagcgggtcagccattaggattcacgcgcggacgctggattttgggcatatcacggtagcggtcagccgttcccatctcaacaataaagtccaggcaatgctgcgcaacattgccaagcggcatggcgagccggatatgatcagcatggggagctctctcaaaatatgtctggtggcggaagggcgggctgatgtctatcctcgcctgggtctgacatcggagtgggatacggcagccgggcaatgcgtgctcgaatgcgcaggcgggcaagtggtggaccgccatggcctggccctgcaatacaatggcaaggatacgattctcaacccagaattctttgcgcgtggcgcgacagcgcacgactggaatcaatatatggagtaa

SEQ ID NO: 2339 - protein, 266 aa, Methylobacillus flagellatus KT
MSHALLPALIRLAHKAGDAIMQVYRGDFAVQRKQDYSPLTEADLVAHGVIAAGLQRLTPGVPLISEECELAPFLERRQWRQYWLVDPLDGTREFVKRNDEFSVNIALIDQGRPVLGVIHAPALGLSYYADGKAAYKQSGSGSAIRIHARTLDFGHITVAVSRSHLNNKVQAMLRNIAKRHGEPDMISMGSSLKICLVAEGRADVYPRLGLTSEWDTAAGQCVLECAGGQVVDRHGLALQYNGKDTILNPEFFARGATAHDWNQYME

SEQ ID NO: 2340 - DNA, 798 bp, Silicibacter sp. TM1040
  CDS (1)..(798): transl_table=11
gtgaattatgatgatctggtagtggtgatgcggcgcttggctctggaagcgggtgacaagatcatggagatctacaactccgatgatttcgacgtgaagcagaaatcagacgatagccctgttaccgttgcggacgaggcggcagacgcattgatctcggcggggctgcgctcggcttttcctgacgtgatgctcgtcaccgaagagcaagccgagtctcatagcgcaacaggcgatacattcctgattgttgaccctctggacggcaccaaggaattcatcaatcgccgtggcgacttcaccgtcaatatcgcctatgtcgaggcaggcgtgcccacgcgcggtgtggtctacgcgcccgccagagaccgtatgttctacactcttgccgatggatcagcggtcgaggaaaaaggccccttcagcaagaatgaagtgggcgagaccacggcgctcaaagtggctgagagcgacaatagcgctctgcttgtggtcgcgtcgaaatcccaccgcgatcaggccacagacgattacatcaacaaatacagcgtgaaagacactcgcagcgcagggtcttcgttgaaattctgccttgttgcgacgggcgaggccgatctttatccgcgcgttggccgcacgatggagtgggatacggcggcagggcatgctgttctttcgggcgctggtggccgcgttgtgcgttttgatgatcacaacccgctgcggtacggcaaggacggatttgcgaacccgttctttatcgcccacgcgcctgcggtcgagttgaaagacgcgtaa

SEQ ID NO: 2341 - protein, 265 aa, Silicibacter sp. TM1040
MNYDDLVVVMRRLALEAGDKIMEIYNSDDFDVKQKSDDSPVTVADEAADALISAGLRSAFPDVMLVTEEQAESHSATGDTFLIVDPLDGTKEFINRRGDFTVNIAYVEAGVPTRGVVYAPARDRMFYTLADGSAVEEKGPFSKNEVGETTALKVAESDNSALLVVASKSHRDQATDDYINKYSVKDTRSAGSSLKFCLVATGEADLYPRVGRTMEWDTAAGHAVLSGAGGRVVRFDDHNPLRYGKDGFANPFFIAHAPAVELKDA

SEQ ID NO: 2342 - DNA, 834 bp, Myxococcus xanthus DK 1622
  CDS (1)..(834): transl_table=11
atgcatccgctcgacgccgaactcgacatcgcccgccgcgtagcccgccaggcgggagccatcctcctggaggtctacgccacgcccttcgccgtccatgacaaggcgggaggcatggggcccgtcaccgaggccgacgagcgcgccaacgccttcatcgtggaagcgctgcgcgacgcatttccttccgacggtgtcgtggccgaggagtccgacaacacctccggcgcgagccgcttcgagcgctgctggttcgtggaccccatggacggcacgcaggagttcgtcaaccgcaacggcgagttcgccatccacatcgggctcgccatcgcggggaaggccacgctgggcgtcgtgtaccggcccgttggagacacgctgtactggggcgtggtggggcagggcggcttcgtggagcacgcgaaggggcgccgcgccctgcgggtgtcggacacggcggagccgtccgcgctgcggctggtggtgtcccgctcacaccgctcgcgcctgacggacgcggtggtccggcggctgggcatcacgcacgagcaggcgtgcggctccgtgggcctcaagtgcggtctgctggcggaggccgcctgcgacctctacctgcacgtcagcgacaagagctatcgctgggacaactgcgcgcccgaagcggttctgcgcgcggcgggcggcatcctcacggacctgggcgggacgccgtacgcctatgacggttcggagctccagaaccgccgcggcctgctggcctgcaacgccgccgccttcgagcacgtggcgcccgtggtggccggattcgcccgcgaggccggcatccttcgctga

SEQ ID NO: 2343 - protein, 277 aa, Myxococcus xanthus DK 1622
MHPLDAELDIARRVARQAGAILLEVYATPFAVHDKAGGMGPVTEADERANAFIVEALRDAFPSDGVVAEESDNTSGASRFERCWFVDPMDGTQEFVNRNGEFAIHIGLAIAGKATLGVVYRPVGDTLYWGVVGQGGFVEHAKGRRALRVSDTAEPSALRLVVSRSHRSRLTDAVVRRLGITHEQACGSVGLKCGLLAEAACDLYLHVSDKSYRWDNCAPEAVLRAAGGILTDLGGTPYAYDGSELQNRRGLLACNAAAFEHVAPVVAGFAREAGILR

SEQ ID NO: 2344 - DNA, 825 bp, Mesorhizobium sp. BNC1
  CDS (1)..(825): transl_table=11
ttgctgacctccgcccttccgtcgatggctggcgagacagcccttctggcgctcttcgaggagctggcgcttgcggccggccgtcaggtcatggcgcattatgaagccggcgtgcagatcgagcacaaatccgatgcctcccccgtgacggaagccgatcgtgccgccgagcgcgtcattctcgccgggctgcgtgccaccgtggcggggacgccgtgcgtctctgaagaggaggcctcgggcggcgtgctgccggcctgcggcgacgaaggattttttctggtcgacccgctcgacggcacccgcgaattcattgggcgcaggccggatttcacggtcaacatagcctatgtgaaggatggtgctccggtggtcggcgtggtctatgcgccggcgcgcgggcttctctattccggcaggcccggcgcggccttcgaagccgaatgccacaacggcgcaatcacaagccgccgcgggatcaatacccgcccgcggcgcaatcctccagcgatcgtggccagccgctcccattccacgccggaaacggaagccttcatcgcccgctatcccggcgcggaaaccgtctccgtcggctcgtcgctgaaattctgcatgattgcctgcggccaggcggatctttatccgcgttacggccgcaccatgcagtgggatacggcagccggtgacgcggtgctgcgcgccgcgggtggcagcacgcttacgcttcaaggcaaaccgcttacctatgggccgaaggaaggtgagggactggaggctttcgccaacccgttcttcatagccgaggggcgggcggctcaagattag

SEQ ID NO: 2345 - protein, 274 aa, Mesorhizobium sp. BNC1
MLTSALPSMAGETALLALFEELALAAGRQVMAHYEAGVQIEHKSDASPVTEADRAAERVILAGLRATVAGTPCVSEEEASGGVLPACGDEGFFLVDPLDGTREFIGRRPDFTVNIAYVKDGAPVVGVVYAPARGLLYSGRPGAAFEAECHNGAITSRRGINTRPRRNPPAIVASRSHSTPETEAFIARYPGAETVSVGSSLKFCMIACGQADLYPRYGRTMQWDTAAGDAVLRAAGGSTLTLQGKPLTYGPKEGEGLEAFANPFFIAEGRAAQD

SEQ ID NO: 2346 - DNA, 786 bp, Cytophaga hutchinsonii ATCC 33406
  CDS (1)..(786): transl_table=11
ttgaaatttaaaaccgatttgatgaataatttacttgaaaatgcaattgtagcgagtatggtggcgggaaaagcaatcatggaggtctatgcaatacccgattttacggatctgatcgaaatcaaaaacgataaatccccccttacggtcgcagataaaaatgcacatcaagtgatttatacccttttgagaggtgaattccctgagattccgatgatctcggaagaaggaaaaggtactccgtacgaagaacgtaaagactggaaacggtactggctggttgatccgctggatggaacaaaggaattcatcaaacgcaacggagagtttaccgtaaacattgccttgatcgaaaataaccgtccggtgatgggcgtggtatacattcccgtaacagacaccttgtatgccgggatcgtggggcaaggtgccttcaaaattgtgaacggcgaagaaacgccgattaccgtacgcaaggcaccggatacaggccggacagccgtgggatcgcgttcacacagtacggaagaagaagcaaaattattggccgattataacgtaaccgattttatcacaacgggaagctcgatcaaattctgtttggtagcggaaggtacagcggacctgtattaccgcgccggacctacaatggagtgggacactgccgccgggcaagctgtattagaagccgcaggcggaacattgacaaatcccgatggatcgatgtttttatacaacaaagaaaatttattgaacggcggatttttgtgcaagggagatatttaa

SEQ ID NO: 2347 - protein, 261 aa, Cytophaga hutchinsonii ATCC 33406
MKFKTDLMNNLLENAIVASMVAGKAIMEVYAIPDFTDLIEIKNDKSPLTVADKNAHQVIYTLLRGEFPEIPMISEEGKGTPYEERKDWKRYWLVDPLDGTKEFIKRNGEFTVNIALIENNRPVMGVVYIPVTDTLYAGIVGQGAFKIVNGEETPITVRKAPDTGRTAVGSRSHSTEEEAKLLADYNVTDFITTGSSIKFCLVAEGTADLYYRAGPTMEWDTAAGQAVLEAAGGTLTNPDGSMFLYNKENLLNGGFLCKGDI

SEQ ID NO: 2348 - DNA, 975 bp, Haemophilus somnus 129PT
  CDS (1)..(975): transl_table=11
gtgttttataaaagcgtgcagcccatagccatttatcgagccgaatactatcatctttttccttgggtaaatgctgttttgccatatttgtcttttcgttcagttaaaatcaggggtatgatagggggattaaagacatttgtaaaagggaagattatgaatgaattaaaaagtcaggtactactggaaaaggttttacaaatcgctcatcaagctggagactatcttaatcttttttacaatggagaaattgattttcagatcaacataaaatcggataatacgcctatcacaaacgcagatttatttgtaaaccaatttcttatcgaaaaactgaccgcacttacgccacatatccctgttttatcagaagaaagctgtcaaatttctttttcagatcgacggcggtggcgtacttattggttgattgatccgctggatggtacacaacaatttattaatcgaacagatcaattcgctgtgctaattgcactgattcatcaaaatcggagcatgttaggtattattcatgctcccgtgttaaaacaaacttattatgcactgcaaggtcatggtacttataaacaaacggaacattctctgcaaactttatcagctagaaaatttggcttaaaccatacagtaaaaattgcagtaggttcaaaaaatgcggagcaaaaagtgcggtcaattttgagctcaaattatcaatacgaatttattacttatggttctagcggtttaaaaaccgcactggttgcagaaggaagtgcagattgctatattcgactgggacaaaccggtgaatgggacacggctgcggcggaagccattttatccgaaataggcggaggaatccgtgatacccaattcaacgccctaacttataacaaacgaccgagtttaataaaccctgattttattatggtatcggacatatctgccgattggaaaaaaatctttcaatttaattaa

SEQ ID NO: 2349 - protein, 324 aa, Haemophilus somnus 129PT
MFYKSVQPIAIYRAEYYHLFPWVNAVLPYLSFRSVKIRGMIGGLKTFVKGKIMNELKSQVLLEKVLQIAHQAGDYLNLFYNGEIDFQINIKSDNTPITNADLFVNQFLIEKLTALTPHIPVLSEESCQISFSDRRRWRTYWLIDPLDGTQQFINRTDQFAVLIALIHQNRSMLGIIHAPVLKQTYYALQGHGTYKQTEHSLQTLSARKFGLNHTVKIAVGSKNAEQKVRSILSSNYQYEFITYGSSGLKTALVAEGSADCYIRLGQTGEWDTAAAEAILSEIGGGIRDTQFNALTYNKRPSLINPDFIMVSDISADWKKIFQFN

SEQ ID NO: 2350 - DNA, 918 bp, Synechococcus sp. CC9311
  CDS (1)..(918): transl_table=11
atgatgccgagctcgccaacccttcttgccggtatcaacctgcaagatgttttaaaggttcttcgccctctcagctggggagccgcagacatcctgcgcgcctatgcccgtggagaacagccacctcacggtttttcgaaggccctgagcgttgacaacggaggcgaaggtccagtttccgcagctgatctagcggttaatcaatggctcctggatggcttgaaacaatccttccccaccgctgattggactcttctcagtgaagaaaccgccaaagagcaactaacggaagggcaacccttggctgctgagtggttatggattttggatccactcgatggcaccaaagatttcctgcaaggcacaggcgaatacgccgtgcatcttgcgttagtgcatcagcaacgaccggtccttggggtggtgctagtaccagagcgagaagagctttggattggtgtggtgggtgacggcacctggtgcgagaaccgctcaggagaacgcacgccagttcgtttcagtgagcgaaaggccaccaaccaactcaccttggtggcaagccgcagtcacagagatcagcgacttgaacagttgatcaccgccctagaactcggggattcccatgcggtgggcagtgttggctgcaaagtggccacgatccttcgcggcgaaaccgatttgtacatctccctgtctgggaaaagtgctccgaaagattgggatatggccgctccagaagccgtactactcgcagctggtggtgccttcacccatgcagatggcagagagctcatctacaacaccggcgatgttcgccaggccggctgtttgatcgctagccatggaaaagcccatgccactttgtgtaggaaagcggcacaggcgatgggattgatcgatcccggttttcaggtttag

SEQ ID NO: 2351 - protein, 305 aa, Synechococcus sp. CC9311
MMPSSPTLLAGINLQDVLKVLRPLSWGAADILRAYARGEQPPHGFSKALSVDNGGEGPVSAADLAVNQWLLDGLKQSFPTADWTLLSEETAKEQLTEGQPLAAEWLWILDPLDGTKDFLQGTGEYAVHLALVHQQRPVLGVVLVPEREELWIGVVGDGTWCENRSGERTPVRFSERKATNQLTLVASRSHRDQRLEQLITALELGDSHAVGSVGCKVATILRGETDLYISLSGKSAPKDWDMAAPEAVLLAAGGAFTHADGRELIYNTGDVRQAGCLIASHGKAHATLCRKAAQAMGLIDPGFQV

SEQ ID NO: 2352 - DNA, 813 bp, Shewanella sp. MR-4
  CDS (1)..(813): transl_table=11
atgaagccagaagagttaatcgacgaggtgattgcgatagcaacggatgcgggtcgcactattcgtgagatttacctcaagggtaattttgagcgagaaaccaagtctgataatacccccgtcacctcggcggacttagcggcgaataagctcatctgtgagcgcttagccgcattgacgcccgatattcctatcctgtctgaagaggctgccgatattcccctaagcgtgcgcgaaggctggaaacgttattggttagtcgaccctctcgatggtacgggggagtttattgcaggtagtggtgacttttcggtgatcatcgcgctggtggaacacaatcgtccagtaatgggtgtggtgtatgtgccgatgacgcaggtgtgttactacgctatcgctggattaggtgcctataaacggaccgataagcaagaagtgcgtattagcagtcggcaaattcagcaccgtgaacaagtttctcttaggttagctgtgagtcgtcgtcaggaccctcaatctgtgttgaccctgttcaatcagcctaagcactgtgagctggtggtcatgggcggtgcggccttgaagagttgtcttgttgccgaaggacgcgccgattgttatgtgcgagtcgggcctacgggagagtgggacaccggcgccgcgcagatcattattgaggaagcgggtggccagctcatggataccgaactgcaacctttgacttataacgagcgtgagacgcttgaaaatcccaactttattgttgttggtgcgcccaatttagagtgggataaaattttaattggtgaatag

SEQ ID NO: 2353 - protein, 270 aa, Shewanella sp. MR-4
MKPEELIDEVIAIATDAGRTIREIYLKGNFERETKSDNTPVTSADLAANKLICERLAALTPDIPILSEEAADIPLSVREGWKRYWLVDPLDGTGEFIAGSGDFSVIIALVEHNRPVMGVVYVPMTQVCYYAIAGLGAYKRTDKQEVRISSRQIQHREQVSLRLAVSRRQDPQSVLTLFNQPKHCELVVMGGAALKSCLVAEGRADCYVRVGPTGEWDTGAAQIIIEEAGGQLMDTELQPLTYNERETLENPNFIVVGAPNLEWDKILIGE

SEQ ID NO: 2354 - DNA, 807 bp, Shewanella sp. MR-4
  CDS (1)..(807): transl_table=11
gtgacagataatacagcgatggcagcgcatttttcgaaggccgatttactgcgggtggtgaagattgcccatgcggcaggcgacgccatcatggcgatttatgcccaagaggactttgccgttacgcaaaagcgtgatgcgagcccagtgacggcggccgatttggcggctcacaaagttattttagcccagcttaccgagcaatttgcgggcattcccgtgatgtcggaagaagcagctgatattgcctgggatgaacgtcaacactggcagacctattggctgatagaccctttggatggcactaaggaatttattaagcgaaatggtgagtttaccgtcaatattgcgcttatccatcaaggtgttgctattgctggtgtggtttatgcgcccgtgctcaatactgtctattttggcgccaaacacttaggcgcttggcgacgggatgggctgcaagagcgagagcttcagggctgtaactcgccaagagaagtgccaattgttgtcggcagtcgttcgcatttaagccctgatgtggcggaatatttaaaggatttcggtcaacatgagatgttaagcgtgggaagctcgctgaagttttgtatgttggcagagggcaaggccgatctctatcccagattagggcctacaagcgaatgggacacggcagctgcgcaggctgtgctggaaagtgcaggcggcaaagtggtgtgttatgactcaggtttacccttaacctacaatcaaaaacctgacatattaaacccttattttattgccacggcgccaggctgggcagaataa

SEQ ID NO: 2355 - protein, 268 aa, Shewanella sp. MR-4
MTDNTAMAAHFSKADLLRVVKIAHAAGDAIMAIYAQEDFAVTQKRDASPVTAADLAAHKVILAQLTEQFAGIPVMSEEAADIAWDERQHWQTYWLIDPLDGTKEFIKRNGEFTVNIALIHQGVAIAGVVYAPVLNTVYFGAKHLGAWRRDGLQERELQGCNSPREVPIVVGSRSHLSPDVAEYLKDFGQHEMLSVGSSLKFCMLAEGKADLYPRLGPTSEWDTAAAQAVLESAGGKVVCYDSGLPLTYNQKPDILNPYFIATAPGWAE

SEQ ID NO: 2356 - DNA, 807 bp, Shewanella sp. MR-7
  CDS (1)..(807): transl_table=11
gtgacagataatacagcgatggcagagcatttttcgaaggccgatttactgcgggtggtaaagattgcccatgcggcaggcgacgccatcatggcgatttatgcccaagaggattttgccgttacgcaaaagcgtgatgagagcccagtgacggcggccgatttggcggctcacaaagttatcttggcccagcttaccgagcaatttgcaggcattcccgtgatgtcggaagaagcagctgatattgcctgggatgaacgtcgacactggcagacctattggctgatagaccctttagatggcactaaggaatttattaagcgaaatggtgagtttaccgtcaatattgcgcttatccatcaaggtgttgctattgcgggtgtggtttatgcgcccgtgctcaatactgtctattttggcgccaaacacttaggcgcttggcgacaggatgggcaacaagaactggtgctacagggctgtaacccgccaagacatgtaccgattgtggtgggtagtcgttcgcatctaagccctgatgtggcggaatatttaaaggatttcggtcaacacgagatgttaagcgtgggaagctcgctgaagttttgtatgttggcagagggcaaggccgatctctatccaagattagggcctacgagcgaatgggacacggcagccgcgcaggccgtgctggaaagcgcaggcggcaaagttgtgtgttatgactcaggtttacccttaacctacaatcaaaaacctgacatattaaacccttattttattgccacggcgccaggctgggcagaataa

SEQ ID NO: 2357 - protein, 268 aa, Shewanella sp. MR-7
MTDNTAMAEHFSKADLLRVVKIAHAAGDAIMAIYAQEDFAVTQKRDESPVTAADLAAHKVILAQLTEQFAGIPVMSEEAADIAWDERRHWQTYWLIDPLDGTKEFIKRNGEFTVNIALIHQGVAIAGVVYAPVLNTVYFGAKHLGAWRQDGQQELVLQGCNPPRHVPIVVGSRSHLSPDVAEYLKDFGQHEMLSVGSSLKFCMLAEGKADLYPRLGPTSEWDTAAAQAVLESAGGKVVCYDSGLPLTYNQKPDILNPYFIATAPGWAE

SEQ ID NO: 2358 - DNA, 810 bp, Alkalilimnicola ehrlichei MLHE-1
  CDS (1)..(810): transl_table=11
atgcagaagctacttgaatccgtacaccaagccatggacgaggcggcccgcgaggtgatggcgatttacgccgatcccacccgtttcgatacccagcacaaggacgacgacagccccctgaccgccgccgatctggcggcgcatcgctgtctctgccggcacctggaggcggccacgccggagatcccggtgttgtcggaggagtccgccgaggtgccttcggaggagcgccggcggtgggcgcgctgttgggtggtggacccgctggacgggaccaaggagttcctcaagcgcaacgacgagtttacgctgaatgtggcgctggtggaggacggccgggtggtgttgggggtggtggatgcgccggcgctggggcggcgttattttgccgccgagggtgtgggggcctggcggcgggatggggccgcggccaccgaggagcgcctgtccgtggcgtcaccccctgccgaaggccgggcctggcgggtggtgggcagccgctcccaccccgggccggcgctgcaggcctttgtcgatcggctgcccgccgccgaggtggtgcccatgggcagctcgctgaagctctgcctggtggccgagggcagcgccgacctttacccccggctggggcccacctgcgagtgggacaccgccgccgcccagtgtgtggtggagcaggccggcggccgggtgctggatgccgcgaccggcgagccgctgcgctataaccagcgtgataccctactcaacccctggttcatcgcctgcgccgagcgccacccggcctggcgcttgcccgataccgaataa

SEQ ID NO: 2359 - protein, 269 aa, Alkalilimnicola ehrlichei MLHE-1
MQKLLESVHQAMDEAAREVMAIYADPTRFDTQHKDDDSPLTAADLAAHRCLCRHLEAATPEIPVLSEESAEVPSEERRRWARCWVVDPLDGTKEFLKRNDEFTLNVALVEDGRVVLGVVDAPALGRRYFAAEGVGAWRRDGAAATEERLSVASPPAEGRAWRVVGSRSHPGPALQAFVDRLPAAEVVPMGSSLKLCLVAEGSADLYPRLGPTCEWDTAAAQCVVEQAGGRVLDAATGEPLRYNQRDTLLNPWFIACAERHPAWRLPDTE

SEQ ID NO: 2360 - DNA, 825 bp, Alkalilimnicola ehrlichei MLHE-1
  CDS (1)..(825): transl_table=11
atgaacaacctgctcacgaccctgcacacggcgatggacgaggcggcccatcgggtgatggccatctacgccgatcccgaccgcttcgatacccggcgcaaggccgatgacagcccggtcactgccgccgatctcgccgctcacgactgcctggtggcgcacctgcgggcggtggcgcccgacatcccggtggtgtccgaggaggcgcgcccggccccttggtcggaacggcgtcattggtcgcgctgctggatcatcgacccgctggacggaaccaaggagtttctcaagcgcaacgatgagttcaccatcaatgtgggactggtggagggcggccagccggtgctgggcatggtggacgccccggccctgggcgagcgctattacgccatacgcggtgagggggcctggcgccagagcgctggggccgagccgcgaagcattcgggtggtggagccgccccgggccggcgaccgcccctggcgggtggtgggcagccggtcccatgcctcggcggagacccaggccttcatcgagcagcttcctgaggtggagttggtgcccatgggcagttccatgaaggtctgcctggtggccgagggccgagccgatctctacgcccgtctgggccccaccggcgagtgggataccgccgccgcgcaatgcgtgctggaggaggcgggcggctgcctgctgagcgctgagaccggcgagccgctgcgttacaacgagcgcgagtcgctgatcaacccctggtttatcgcctgcgcccgccccgaccccgcctggcagttgccacacgtccccctggccgaggcccgttaa

SEQ ID NO: 2361 - protein, 274 aa, Alkalilimnicola ehrlichei MLHE-1
MNNLLTTLHTAMDEAAHRVMAIYADPDRFDTRRKADDSPVTAADLAAHDCLVAHLRAVAPDIPVVSEEARPAPWSERRHWSRCWIIDPLDGTKEFLKRNDEFTINVGLVEGGQPVLGMVDAPALGERYYAIRGEGAWRQSAGAEPRSIRVVEPPRAGDRPWRVVGSRSHASAETQAFIEQLPEVELVPMGSSMKVCLVAEGRADLYARLGPTGEWDTAAAQCVLEEAGGCLLSAETGEPLRYNERESLINPWFIACARPDPAWQLPHVPLAEAR

SEQ ID NO: 2362 - DNA, 789 bp, Hyphomonas neptunium ATCC 15444
  CDS (1)..(789): transl_table=11
atggcagtcaccgcagacattctcgccgctatcgcccttgccgccggcaaggaaatcatgcgcgtttatcgcacggacttcagcgtcagccacaaggacgatcattccgtactgaccgaagccgatggccttgccgaagcaatcatactgaaaggcctcgccgaggcggagcccagcctccaggtcatcgccgaagaggcggtcgcgggcggacacatgcccgaacacggcgcccgcttcgcactggttgacccgctggacgggaccaaggaattcgtcgcaaagaatggcgagttcacggtgaatattgcaatcatcgaacatggccgtccggtcatgggcgtcgtttatgttcctgcccagaaccgtctttttgtcgccgaaggccctggcaaagcctggcatgcaaatgctgcacccgacgggccggttcccggcgatcgcacgacgctcaaggtacgccctgccccggctgccggactaaccgccgttgcctccaagtcgcaccgtagtcccgagacggatgaatggctgtcgcagtatccggttgccgaaatcaaaggggctggctctgccctgaaattctgcctcgttgcagcaggtgaggcagacgtctacccccgtctcggccgcaccatggagtgggatactgctgctggacaggccgtcgtggaagctgccgggggccgcgtactgactatttccggagagcccctcctctatggcaagcgggaccgcggatacgacaatccccactttgtcgtttttggagatgtgacgccgcattga

SEQ ID NO: 2363 - protein, 262 aa, Hyphomonas neptunium ATCC 15444
MAVTADILAAIALAAGKEIMRVYRTDFSVSHKDDHSVLTEADGLAEAIILKGLAEAEPSLQVIAEEAVAGGHMPEHGARFALVDPLDGTKEFVAKNGEFTVNIAIIEHGRPVMGVVYVPAQNRLFVAEGPGKAWHANAAPDGPVPGDRTTLKVRPAPAAGLTAVASKSHRSPETDEWLSQYPVAEIKGAGSALKFCLVAAGEADVYPRLGRTMEWDTAAGQAVVEAAGGRVLTISGEPLLYGKRDRGYDNPHFVVFGDVTPH

SEQ ID NO: 2364 - DNA, 798 bp, Rhizobium leguminosarum bv. viciae 3841
  CDS (1)..(798): transl_table=11
atgctgaggacatttgaaaaggcggcgctcgaagccggcagggccatcatcacggtcttgcgcgaaggcttccccgtcgccatgaaggcggatgcaagtccggtcacggtcgccgacgaggaggccgaacgtatcatcctcgctcatctcgccagagattatcccgaaataccggtggtggcggaagaatcggtcgcagccggcaaggtgcccgacatcgctggccgaggcttcttcctcgtcgaccctctcgacggcacccgtgaattcgtcgacggacgacaggaattcaccgtcaacatcgcctatatcgagaacggcgctccggtggccggcattgtctacgcgccggcgctggggcttgccttctctggagagcgcggccacgccgaaaggctcgtcgtcatggacgatttcacggttggcgcacgcaacgcaatcacggtgcgcgaacagccggacgacaggctggcgcttgcaagccttcgccacaacagcccggagaccggaagcttcctcgccgaccacgcgatcttcaaatgcaccaatatcggttcctcgttgaagttctgcctgctggccgaaggcaaggcagacgtctatccgcgtttcacccgcacgatggaatgggacaccgcggccggggatgcggtgctgcgcgccgccggcggttcgacggtgacgctggacggaacgccgctgacctacggcaagacgggaacggccgccgatttcgacttcgccaacccgaacttcatctcctggggtggcaggaaacgcgtcctcgaactggcgtga

SEQ ID NO: 2365 - protein, 265 aa, Rhizobium leguminosarum bv. viciae 3841
MLRTFEKAALEAGRAIITVLREGFPVAMKADASPVTVADEEAERIILAHLARDYPEIPVVAEESVAAGKVPDIAGRGFFLVDPLDGTREFVDGRQEFTVNIAYIENGAPVAGIVYAPALGLAFSGERGHAERLVVMDDFTVGARNAITVREQPDDRLALASLRHNSPETGSFLADHAIFKCTNIGSSLKFCLLAEGKADVYPRFTRTMEWDTAAGDAVLRAAGGSTVTLDGTPLTYGKTGTAADFDFANPNFISWGGRKRVLELA

SEQ ID NO: 2366 - DNA, 822 bp, Pseudomonas aeruginosa UCBPP-PA14
  CDS (1)..(822): transl_table=11
atgaggccggtgccttggggcgaattggtggcgctggtgcggcgcgccggcgaggcgatcctgccgcactggcgcgccgacgtggcggtgcgctcgaaggccgacgaatcgccggtgactgccgccgacctggccgcgcaccatatattggaggcgggattgcgggcgctggcgccggacattccggtgctttccgaagaggattgcgagataccgctgagcgagcgcggccactggcggcgctggtggctggtggacccgctggacggcaccaaggagttcatctccggtagcgaggagttcaccgtcaacgtggccctggtcgaggatggccgggtgctgttcggcctggtcggcgtgccggtgagcggccgctgctactacggtggcgccggtctcggtgcctggcgcgaggaggccgatggccgcgcgcaaccgatcagtgtgcgcctggagcccgaggaggccttcaccgtggtggccagcaagcgccacggcagcccggcccaggagcgcctgctggatggcttgagcgagcgcttcggcgacctgcggcgagccagtatcggcagttcgctgaagttctgcctgctggccgagggcgctgccgactgctatccgcgcctgacgccaacctcgcaatgggacacggccgccgcccagggtgtgctggagggcgccggcggcgaggtgctcgacctgcatggcgcgccattcacctacgagccgcgcgaggactacctcaacggctccttcctggccctgccgcgcgctgccgagtggcgcagcgaactgatccaactggcgcgcgcgctgcactga

SEQ ID NO: 2367 - protein, 273 aa, Pseudomonas aeruginosa UCBPP-PA14
MRPVPWGELVALVRRAGEAILPHWRADVAVRSKADESPVTAADLAAHHILEAGLRALAPDIPVLSEEDCEIPLSERGHWRRWWLVDPLDGTKEFISGSEEFTVNVALVEDGRVLFGLVGVPVSGRCYYGGAGLGAWREEADGRAQPISVRLEPEEAFTVVASKRHGSPAQERLLDGLSERFGDLRRASIGSSLKFCLLAEGAADCYPRLTPTSQWDTAAAQGVLEGAGGEVLDLHGAPFTYEPREDYLNGSFLALPRAAEWRSELIQLARALH

SEQ ID NO: 2368 - DNA, 807 bp, Shewanella sp. ANA-3
  CDS (1)..(807): transl_table=11
gtgacagataatacagtgatggcagcgcatttttcgaaggccgatttactgcgggtggtaaagattgcccatgcggcaggcgacgccatcatggcaatttatgcccaagaggattttgccgttacgcaaaagcgtgatgagagcccggtaacggcggccgatttggtggctcacaaagttatcttagcccagcttaccgagcaatttgcgggcattcccgtgatgtcggaagaagcggcggatatcgcctgggatgaacgtcggcactggcagacctattggctgattgaccctttggatggcactaaggaatttattaagcgaaatggtgagtttaccgtcaatattgcgcttatccatcaaggtgtggctattgctggtgtggtttatgctcccgtactcaataccgtttattttggcgccaaacacttaggcgcttggcgacaggatgggcaacaagagctagtgctacagggctgtaatacgccaaggcaaataccgatagtggtgggtagtcgttcgcacttaagccctgatgtggcggaatatttaaaggatttcggtcaacacgagatgttaagcgtgggaagctcgctgaagttttgtatgttggcagagggcaaggccgatctctatccaagattagggcctacgagcgaatgggatacggcagccgcgcaggccgtgctggaaagcgcaggcggcaaagttgtgtgttatgactcaggtttacccttaacctacaatcaaaaacctgacatattaaacccttattttattgccacggcaccaggctgggcagaataa

SEQ ID NO: 2369 - protein, 268 aa, Shewanella sp. ANA-3
MTDNTVMAAHFSKADLLRVVKIAHAAGDAIMAIYAQEDFAVTQKRDESPVTAADLVAHKVILAQLTEQFAGIPVMSEEAADIAWDERRHWQTYWLIDPLDGTKEFIKRNGEFTVNIALIHQGVAIAGVVYAPVLNTVYFGAKHLGAWRQDGQQELVLQGCNTPRQIPIVVGSRSHLSPDVAEYLKDFGQHEMLSVGSSLKFCMLAEGKADLYPRLGPTSEWDTAAAQAVLESAGGKVVCYDSGLPLTYNQKPDILNPYFIATAPGWAE

SEQ ID NO: 2370 - DNA, 777 bp, Magnetospirillum magnetotacticum MS-1
  CDS (1)..(777): transl_table=11
atgaccctgcctaccgatctttcgcccctgctcgcccccctggaagacctggcccgccaagcgggcgcggtaatcatggaggtctataattccgacttcgccgtgcgcgacaagaccgacgcctcgccggttaccgaggccgacgaaaaggcggaggccatcatcttgccgggactggcggcgcttacccccggcgtgcccgtggtggccgaggaatcggtggcggccgggcgcattcccgagatcggctccggcccgttctggctggtggaccccctggacggcaccaaggaattcatcaagaagaacggcgagttcacagtgaatatcggcctgatcagagacggcgttccggtgttgggcgtggtgctggcaccggcgcgcggcgaattatggtcgggcaccggcaccaccgccttcaaggccgattcccagggccgccgccccatcgcctgccgccccattcctgccacgggcgccgtggccatgacctcgcgctcgcaccgtaaccccgaagccatgggcaaatggctggcgcaatttcccggcgtcagcctggatttcgcgggctcgtccctgaaattctgcctggtggccgagggcgccgccgatctctatccccgctttggccccacctgtgaatgggacatcgcggcggccagcgccgtgctgatggcggcgggcggcagtgtcgaaaccttcgagggcaggcccatggcctatggcaagacgcccaaattcctcaacccggacttcatcgcgcggggcaaggcgtaa

SEQ ID NO: 2371 - protein, 258 aa, Magnetospirillum magnetotacticum MS-1
MTLPTDLSPLLAPLEDLARQAGAVIMEVYNSDFAVRDKTDASPVTEADEKAEAIILPGLAALTPGVPVVAEESVAAGRIPEIGSGPFWLVDPLDGTKEFIKKNGEFTVNIGLIRDGVPVLGVVLAPARGELWSGTGTTAFKADSQGRRPIACRPIPATGAVAMTSRSHRNPEAMGKWLAQFPGVSLDFAGSSLKFCLVAEGAADLYPRFGPTCEWDIAAASAVLMAAGGSVETFEGRPMAYGKTPKFLNPDFIARGKA

SEQ ID NO: 2372 - DNA, 792 bp, Prosthecochloris aestuarii DSM 271
  CDS (1)..(792): transl_table=11
atgagtgcatcactgctgacagagtcgcttgttcagacagccatagatgctgcgctcaaggctggtgccgagatactggggatatatagccgggatgatcacggtgttgagctcaagggcgatgactcaccgttgacgctggctgacaaggcagcgcatagggtgatcatgcagatgcttcaggacacagctttgccggtgctgagtgaagaggggcgcaatattccttatgttgagcgtgcacagtgggaacggttctggatggttgatccccttgacgggaccaaggagtttatttccaggaacggagagtttacggtgaacattgcgctggtcgagcatggcaagcctgtgatgggtgtggtgtatgtgccggtactcgatgagttgtatgttggtaaggcggggcggggcgcgctgttgattcgcaatgctgctgctgaaccatgggaaacggtaacgttaccttgtggtgctgctggtgatggtgtgtatcgtgtggttggtagtcgttcccatcttaatgatgagacgcttgcgtttgtggaagagcttcgtgctgagcatccggagattgagatggtgcagcggggaagttcgctgaaaatctgcatggtggcagccggtgatgccgattgctatccacggttcggccttaccatggagtgggatactgcggctgggcatgctgttgtgaatgctgcgggaaaacgaatggttattgccggcagtgatgatgaggtgcggtataataaggaggatctgttgaatccgttttttattgttaggtga

SEQ ID NO: 2373 - protein, 263 aa, Prosthecochloris aestuarii DSM 271
MSASLLTESLVQTAIDAALKAGAEILGIYSRDDHGVELKGDDSPLTLADKAAHRVIMQMLQDTALPVLSEEGRNIPYVERAQWERFWMVDPLDGTKEFISRNGEFTVNIALVEHGKPVMGVVYVPVLDELYVGKAGRGALLIRNAAAEPWETVTLPCGAAGDGVYRVVGSRSHLNDETLAFVEELRAEHPEIEMVQRGSSLKICMVAAGDADCYPRFGLTMEWDTAAGHAVVNAAGKRMVIAGSDDEVRYNKEDLLNPFFIVR

SEQ ID NO: 2374 - DNA, 819 bp, Xylella fastidiosa Ann-1
  CDS (1)..(819): transl_table=11
atggctggaacatcagcagtgatcactattcccagcgatcttcacgagtcggtcatcgccattgctacagattccggcagagcgatcatggagatctatcaggatcatttcaaggtccagataaaagcagacatgagtccactgacgcaggccgatttaatctcacatcagatcatcgtgcatggactcaagcaactgacccccagtctgcccgtgttgtcggaagagtcgacaggaatcacttgggaggaacgccgtcactggaagagctactggttggtcgatccactcgacggcacccgcgaatttgtgaaacgcaatggcgagttttgcataaacatcgcactgatccatgaaggtatccccgtatatggaatgatcctggcgccggtggaagggaccatctggcatgcaatgcatggcgggcaggcattccgccgtgatggtcaccgtgataccacattgcacgtgcgggcacctgctggcaccgcgttacaggtcgcagcaagccggtcgcacattgatgtacacacctcggcgttactggcacagatgaaagaaataaccctagtttcgcagggatcggcgctgaagttctgtcgacttgctgaaggcacactcgacgtgtacccgcgtctaggcgctacctatgagtgggatactgccgcaggccagtgcttactgcttgctgcgggcggtacgctactgaacatcgagactggaaaaccgttccgctacaacaaacgcgagacactgcttaacggcggttttatcgcactgggcgacgccacgctgccttggcgcgattggttgccctga

SEQ ID NO: 2375 - protein, 272 aa, Xylella fastidiosa Ann-1
MAGTSAVITIPSDLHESVIAIATDSGRAIMEIYQDHFKVQIKADMSPLTQADLISHQIIVHGLKQLTPSLPVLSEESTGITWEERRHWKSYWLVDPLDGTREFVKRNGEFCINIALIHEGIPVYGMILAPVEGTIWHAMHGGQAFRRDGHRDTTLHVRAPAGTALQVAASRSHIDVHTSALLAQMKEITLVSQGSALKFCRLAEGTLDVYPRLGATYEWDTAAGQCLLLAAGGTLLNIETGKPFRYNKRETLLNGGFIALGDATLPWRDWLP

SEQ ID NO: 2376 - DNA, 807 bp, Croceibacter atlanticus HTCC2559
  CDS (1)..(807): transl_table=11
atgaatagtaatcttgaagcaaattttgtagtggcagttaaagcttctgttttggctggtaaggaaattatgaaagtgtatcagcaggagtttgaagtttctaaaaaggctgataattccccaattacagaggctgataataaagctaatgattgtattaataaatttttaaagcaaactgaaataccaatcatttcagaagagaacgaagatatttcatttgagattagaaaacattggacaaagtgctggattgttgaccctttagacggtacaaaagaatttgtaaatagaaatggagaatttacggtaaacattgctttagtaaatagaggcgtgcctaccttcggtgtcatatattggccagttaaacaactattatatgttggtgatgtaagtcaaaatcttgcatttagactacagttaataaaccatcaattttctaatagattattaaaagatgtaaaggtattgtcaccgaagagagaccataaatcgttaaaggtgttggtaagtagatcgcatgcaagcaatgaaacaaaaaaatatatagacaatttgcaaaagacagggcatcctatcgaattaaaatctattgggagctctcttaaattttgtcaaatcgccgagggaaacgcacatctttatcctagatttgcaccaaccatggaatgggatactgctgcaggacatgctatttgcaacgctgtaaatatcaaagtaatgcaagtaaattcaacaaatgaattagagtataataaagagaatctttataatcctaactttattgtaacatttaaacaatag

SEQ ID NO: 2377 - protein, 268 aa, Croceibacter atlanticus HTCC2559
MNSNLEANFVVAVKASVLAGKEIMKVYQQEFEVSKKADNSPITEADNKANDCINKFLKQTEIPIISEENEDISFEIRKHWTKCWIVDPLDGTKEFVNRNGEFTVNIALVNRGVPTFGVIYWPVKQLLYVGDVSQNLAFRLQLINHQFSNRLLKDVKVLSPKRDHKSLKVLVSRSHASNETKKYIDNLQKTGHPIELKSIGSSLKFCQIAEGNAHLYPRFAPTMEWDTAAGHAICNAVNIKVMQVNSTNELEYNKENLYNPNFIVTFKQ

SEQ ID NO: 2378 - DNA, 798 bp, Sulfitobacter sp. EE-36
  CDS (1)..(798): transl_table=11
atggattatgagcaactggtaacggtgatgcgccgtttgtcgatcgaagcaggcgacaagatcatggagatttacggcgcggatgatttcgaggtcaaaaccaaatccgacgaaagccccgtgaccattgccgacgaagcggcggacaagatcatctcggacgggctgcgcgcggcgttccctgatgtgatgcttgtcacggaagagcagtcggccacccattcggcgtcgggcgatacattcctgatcgtggacccgctggacggcacgaaagagttcatcaaccgtcggggcgatttcaccgtgaacatcgcgctggtcgaaggcggcgtgccgatgcgcggtgttgtctatgcccccgcccgttcgcgcatgttcttcacgctggccgatggcagcgcggtcgaggaaactggcgatttcccaaaagacagcatgggccctgtgcagccgatatcagtctctacgccggataatgccgcgctgatggtagttgcgtccaagtcgcaccgcgatcaggcgaccgatgactacatcgcgaaatacaatgtgcgcgacatgaaaagcgcgggctcgtcgctgaagttctgcctgatcgccacgggcgaggcggatctgtaccctcgggtcgggcgcacgatggaatgggacacggctgcaggccacgcggttctgaccggcgctggtggggccgttgtgcgctttgacgacctgaccccgctgacctacggcaaagccgatttcgccaaccccttctttatcgcccatgcgccgggcgttgatctgaaagcctcctga

SEQ ID NO: 2379 - protein, 265 aa, Sulfitobacter sp. EE-36
MDYEQLVTVMRRLSIEAGDKIMEIYGADDFEVKTKSDESPVTIADEAADKIISDGLRAAFPDVMLVTEEQSATHSASGDTFLIVDPLDGTKEFINRRGDFTVNIALVEGGVPMRGVVYAPARSRMFFTLADGSAVEETGDFPKDSMGPVQPISVSTPDNAALMVVASKSHRDQATDDYIAKYNVRDMKSAGSSLKFCLIATGEADLYPRVGRTMEWDTAAGHAVLTGAGGAVVRFDDLTPLTYGKADFANPFFIAHAPGVDLKAS

SEQ ID NO: 2380 - DNA, 771 bp, Roseovarius nubinhibens ISM
  CDS (1)..(771): transl_table=11
atgcgccgccttgccctcgaagctggtgacaagatcatggaaatctatcaggccgacgatttcgagatcaaatccaagtccgacgacagcccggtgaccgccgccgacgaagcggcagacgccatcatctcggccggtctgcgcgccgcctttcccgatgtgaccctcgtcaccgaggaacaggccgcctcgcacagccagcgggccgagacctttctcatcgtcgatcctctcgacgggaccaaggaattcatccaccgccgcggcgatttcaccgtcaacatcgcttatgtggaaaacggcgtcccgcagcgcggcgtggtctatgccccggccaagggccgcatgttctttaccctcgccgatggccgcgcggtcgaagaaaccggccccttggacaaggacagcatcggcgacaccgcgcccctgtcggtcagccaggccgacaatagcgcgctcttggtggtggcctccaaatcgcaccgcgatcaggccaccgacgattacatcggcaaatacgccgtcaaagacatgaagagcgcgggctcgtcgctcaaattctgcctcgtcgccaccggcgaggccgacatctatccccgcgtcgggcgcacgatggaatgggacaccgccgccggtcacgccgtgctcttgggggcgggtggtcaggtggtgcgttttgacgatcacagcccgctcacctatggcaaggaagattacgccaacccgttcttcatcgcctatgccccctccgttgacctgaaagaggcctga

SEQ ID NO: 2381 - protein, 256 aa, Roseovarius nubinhibens ISM
MRRLALEAGDKIMEIYQADDFEIKSKSDDSPVTAADEAADAIISAGLRAAFPDVTLVTEEQAASHSQRAETFLIVDPLDGTKEFIHRRGDFTVNIAYVENGVPQRGVVYAPAKGRMFFTLADGRAVEETGPLDKDSIGDTAPLSVSQADNSALLVVASKSHRDQATDDYIGKYAVKDMKSAGSSLKFCLVATGEADIYPRVGRTMEWDTAAGHAVLLGAGGQVVRFDDHSPLTYGKEDYANPFFIAYAPSVDLKEA

SEQ ID NO: 2382 - DNA, 798 bp, Oceanicola batsensis HTCC2597
  CDS (1)..(798): transl_table=11
atggactacgcaaagctcgaaaccgtcatgcggcgcctcgcactcgaagccggcgaccggatcatggagatctacaattccgacgatttcggggtgaagaccaagtccgatgccagcccggtcaccgaagcggacgaggccgccgatgcgctgatctcggccggcctgcgcgaagcctttcccgacctgccgctgatcaccgaggaacaggccgccacgcattccgaaagcgccagcaccttcctcatcgtcgatccgctggacggcaccaaggagttcgtcaaccgccgcggcgatttcaccgtcaacatcgcgctggtcgaggacggcattcccacgcgaggcgtcgtctacgccccggcgcgggaccgcatgttctatacccggaccgacggcaccgcggtcgaagaggccgcccccttcgacagggacgcgcccggggcgcagaccgaactgcgggtctccgcggccgacaacgacgcgctgatgatcgtcgcctccaagtcgcaccgcgaccaggcgaccgacgactacatcgcgaaatatgcggcgaaggacatgaccagcgcgggatcttcgctcaagttctgtctgatcgccagcggcgaggccgacctctatccccgcctgggccgcacgatggagtgggataccgccgccggccacgccgtcgtcgccggcgccggcggccgggttctgcatttcgagacgctcgagcccctgacctacggcaaggaagggttcgccaaccccttcttcatcgccgcctcgccttcggtcacgctcaagccggcctga

SEQ ID NO: 2383 - protein, 265 aa, Oceanicola batsensis HTCC2597
MDYAKLETVMRRLALEAGDRIMEIYNSDDFGVKTKSDASPVTEADEAADALISAGLREAFPDLPLITEEQAATHSESASTFLIVDPLDGTKEFVNRRGDFTVNIALVEDGIPTRGVVYAPARDRMFYTRTDGTAVEEAAPFDRDAPGAQTELRVSAADNDALMIVASKSHRDQATDDYIAKYAAKDMTSAGSSLKFCLIASGEADLYPRLGRTMEWDTAAGHAVVAGAGGRVLHFETLEPLTYGKEGFANPFFIAASPSVTLKPA

SEQ ID NO: 2384 - DNA, 936 bp, Synechococcus sp. WH 5701
  CDS (1)..(936): transl_table=11
atgatggctgccccctgcctgcccgccggcctcgatctcgaggagctgctggtgctcttgcggcgcctgtgctgggagtcggggtcgattctgcgggcctacgcccgcggcgagcagcccccctttggctatggcgcggccctgagcgtcgatgaaggcggcgaggggccagtgacggcggctgatctggcggtgaaccagcacctgctcgagggcctcgctcaggcttttcccgatgccccctggaccctgctgagcgaggagaccgccaaggagcaactcagcgccggcgtgcccctcgaggccgactggctctggatcctcgatcccctggatggcaccaaggatttcctccagggcaccggcgaatatgcggtgcatctggcgctggtgcatcagggccagccggtgctcggggtggtgctgctgcctgagaaggaggagctctggttcggtctggtgggcgcggcggctgaggagttgatcggtggcgcctggcgggagaatccggccggcgagcacttcgcgccccagctcagtgaacgccgtgagccgggagagctggtgctggtggccagccgtaaccaccgggatcagcgcctggagcagctggtgcaggcgctggagctgggctcctcgctggcggtgggcagcgtgggttgcaaggtggccacgatcctacgcggcgaaaccgacctttacctctcactttcaggccgcagcgccccgaaggactgggacatggcggcgccggaagcggtgctgcgggcggcgggcggggccttcagccacgccgatggccgccctcttcactacaacaagggtgacggattgcaggccggttgcctgatcgccagccatggtctggcccatgccgaactgtgtgagcgggccgccgccgccatggcgcgaatcgatccgggtttcgagctctga

SEQ ID NO: 2385 - protein, 311 aa, Synechococcus sp. WH 5701
MMAAPCLPAGLDLEELLVLLRRLCWESGSILRAYARGEQPPFGYGAALSVDEGGEGPVTAADLAVNQHLLEGLAQAFPDAPWTLLSEETAKEQLSAGVPLEADWLWILDPLDGTKDFLQGTGEYAVHLALVHQGQPVLGVVLLPEKEELWFGLVGAAAEELIGGAWRENPAGEHFAPQLSERREPGELVLVASRNHRDQRLEQLVQALELGSSLAVGSVGCKVATILRGETDLYLSLSGRSAPKDWDMAAPEAVLRAAGGAFSHADGRPLHYNKGDGLQAGCLIASHGLAHAELCERAAAAMARIDPGFEL

SEQ ID NO: 2386 - DNA, 783 bp, Pseudoalteromonas tunicata D2
  CDS (1)..(783): transl_table=11
ttggataagcaaatgaaccaacaccacttgctcgaccaagtcgtcgcgattgccaaagctgccggtgaagcagcaatgatcatttatcaaaaagattttaatatcgaatataaaggtgatgacagcccagttaccgacgctgatttagcagcccacgcggtgattgttaaaggattgaaagcattaacaccacacctacccatcctcagtgaagaaagtgccgatattagctgggaagagcgccgaacgtgggaggaatattggttggttgacccaattgatggcacgaaagagttcatcaaaaaaaatggcgaattcacggttaatattgctttgatcaaacaaggtaaaccggttttaggggttgttgatgcaccggcgttaaatgaaacctattttgccgaagcaagtcttggagcatttaaacaagacagccaaggcattcattcgcttaaagtcactaaaaaagccaataaaggtttaattcgtgtggtgggcagccgctcacatccatcgccagatttagccgcttatttagagcaatttgaagcggttgacatggtaccaaaaggcagctcacttaagctgtgcctagttgcagaaggcaaagccgatatctatcctcgattgggccttacttctgaatgggataccggagcgggccatgcagttgccgaaattgctggtgcaagcattacacaaattgatggcagccccctgacctataaccaaaaagcacagtacctcaatccttattttattgtgtctgctttattggactaa

SEQ ID NO: 2387 - protein, 260 aa, Pseudoalteromonas tunicata D2
MDKQMNQHHLLDQVVAIAKAAGEAAMIIYQKDFNIEYKGDDSPVTDADLAAHAVIVKGLKALTPHLPILSEESADISWEERRTWEEYWLVDPIDGTKEFIKKNGEFTVNIALIKQGKPVLGVVDAPALNETYFAEASLGAFKQDSQGIHSLKVTKKANKGLIRVVGSRSHPSPDLAAYLEQFEAVDMVPKGSSLKLCLVAEGKADIYPRLGLTSEWDTGAGHAVAEIAGASITQIDGSPLTYNQKAQYLNPYFIVSALLD

SEQ ID NO: 2388 - DNA, 798 bp, Pseudoalteromonas tunicata D2
  CDS (1)..(798): transl_table=11
atgaatatgctgtctttacttgaaccctgcattgccttagctgagcaagcgggacgtgctattttagcgatttatgaccaagatgatattggtcaacaagagaaactcgatcataccccagtcactaaggctgatttggctgccaatgatgtattaatggcgggtttaatcgctttagattcctcaatccctattatgtctgaagaaaccagtattccgagcttagaagagcgtaagcattggcaacgttattggttgctggatcctatggacggtaccggtgagtttattcttaaaagtggtgattttgcagtgaacatcgccttaattgaaaataatcaacctgtactgggtattattcattggccaaccaagggggtgacttattttgctgcagagggaaatggtgcatttaaacgtgaaaatgggcaagacattgctattaaggtcgcaaagccccaaaaactaacgttagcaattagtcgcagacaaaagctcgatgttgttagccagtatataacaactcaatttgacactattccattagggtcatgttccttaaaagcatgcttaattgctgagggacaggctgatttttttatgcgaataggccctacaggcgagtgggatacaggtgcatctcaagtgattgttgagcaagctggtggtaccttggtggatgcgcagtttcagccattaacttataaccaaagagaatcgaccgaaaatccagattttatagtaatggggcatcccgactgggattggttaagcttgattcaaccccatcaaagatag

SEQ ID NO: 2389 - protein, 265 aa, Pseudoalteromonas tunicata D2
MNMLSLLEPCIALAEQAGRAILAIYDQDDIGQQEKLDHTPVTKADLAANDVLMAGLIALDSSIPIMSEETSIPSLEERKHWQRYWLLDPMDGTGEFILKSGDFAVNIALIENNQPVLGIIHWPTKGVTYFAAEGNGAFKRENGQDIAIKVAKPQKLTLAISRRQKLDVVSQYITTQFDTIPLGSCSLKACLIAEGQADFFMRIGPTGEWDTGASQVIVEQAGGTLVDAQFQPLTYNQRESTENPDFIVMGHPDWDWLSLIQPHQR

SEQ ID NO: 2390 - DNA, 834 bp, Photobacterium sp. SKA34
  CDS (1)..(834): transl_table=11
atggcctattcgcatttactgcctgatgtggttgagatcgctcgagcatcaggtcaattgattttagatatctatcaacgtggtcagtttgagaaacagatcaaagatgataatacgccggtgacaagtgctgatcttgcggctcataagttagtgatggagcgactgacacaactaacgcctgatattcccgtgttgtcggaagaagatgctagcgtaccattaacagagcgtagccaatggaaacgttattggttagttgacccattagatggtacgcaagaatttattgcaggtagtggtgattttgcgacaatcattgcgttagttgaaggtaaccgcccgatcatgggggttgtttatgcgcctgtctctggggtgtcttattatgcttatgctggtaaaggtgcgtataaaattaccgctgaaggtgaaagtgttaaaattgcaactcatcatcatgaagagaataccaagtcgattgttgttgcgatcagtcgtcgtcaagatattagctcaatcacatcgcgtttagatccgagttataactatgaacttgtgcctttaggctctgcggcattaaaatcatgtttggtggcagaaggcgcggtagattgttacttacgcttaggacctacgggtgaatgggatactgcagcaactcagtgtattgttgaagaggcgggtggccgtattcttaatactcatttaacgccgctgtcttataacgaacgtaatacattagagaatccaaattttattaccttaggtgatgaaggactgccttgggcggatattttagagccggatgatcggatgatgaatgctgactga

SEQ ID NO: 2391 - protein, 277 aa, Photobacterium sp. SKA34
MAYSHLLPDVVEIARASGQLILDIYQRGQFEKQIKDDNTPVTSADLAAHKLVMERLTQLTPDIPVLSEEDASVPLTERSQWKRYWLVDPLDGTQEFIAGSGDFATIIALVEGNRPIMGVVYAPVSGVSYYAYAGKGAYKITAEGESVKIATHHHEENTKSIVVAISRRQDISSITSRLDPSYNYELVPLGSAALKSCLVAEGAVDCYLRLGPTGEWDTAATQCIVEEAGGRILNTHLTPLSYNERNTLENPNFITLGDEGLPWADILEPDDRMMNAD

SEQ ID NO: 2392 - DNA, 813 bp, Neptuniibacter caesariensis
  CDS (1)..(813): transl_table=11
atggaccagcagcgtttgattacaccgttgattcaaatatgcgaacgagccagcaaggcgatccttgagatctatcaaggtgaacatttttcagtagaaaccaagcaagataattcgccagtgactcaagcagatattgctgctcacgagatcatcaaaaaagggctttttgaactgacacctgatattcctcaactcagtgaagaagaagggattagttaccagcaaagaaaaaactggtctcgattctggtgcattgaccctctagatggcactaaagaatttattcaccgaaatggcgaattcactattaacatcgcgctgatagaggataataagcctgtcctcgggattatctacatccctgtcagcgatattgtctattggggtggcagccagattaatgcctggaaaaaacagcctaatcacccacctgctcagatacgcagtaagccaatgggaccagaacttatcgtcgccgcaagccgcagacatggccaggacgaacatcacaatctgcttaaacccatcgaacatcgcttccagcatgtaacaaacaaaggcatgggtagctcactgaaaatgtgtctgatcgccgaaggactcgcagatttctatccacgcctattcccgaccagcgaatgggataccgcagcagcgcaagccattgtagaagcagcgggaggtaagctggtcaacgcaagtgacctacatccgcttcggtataacgagcgagagtcactgatcaatcccttcttttttgtctgcggagatccgcagtttccactggaagagataagggtcaagcattga

SEQ ID NO: 2393 - protein, 270 aa, Neptuniibacter caesariensis
MDQQRLITPLIQICERASKAILEIYQGEHFSVETKQDNSPVTQADIAAHEIIKKGLFELTPDIPQLSEEEGISYQQRKNWSRFWCIDPLDGTKEFIHRNGEFTINIALIEDNKPVLGIIYIPVSDIVYWGGSQINAWKKQPNHPPAQIRSKPMGPELIVAASRRHGQDEHHNLLKPIEHRFQHVTNKGMGSSLKMCLIAEGLADFYPRLFPTSEWDTAAAQAIVEAAGGKLVNASDLHPLRYNERESLINPFFFVCGDPQFPLEEIRVKH

SEQ ID NO: 2394 - DNA, 789 bp, Neptuniibacter caesariensis
  CDS (1)..(789): transl_table=11
atgtccatagccaaaaaaattttcaaaaattcagaactgtttcaacaacttgaaaagctcatgaatgatgctgatacttccatcttagagatttataacagcaataatttcggtgaagaaagcaaaggcgatgactctccagttaccaaagcagatctggcagcccatcagttacttgttgatgggttacaacaattaactccgaacatccctattgtaagcgaagaagacccttcttctcttacaattcctgcagaacattcggcgtattggttaatcgacccacttgatggcaccaaagagtttattaaaagaaatgacgaattcacatgcaacctcgcactcatagaaagtggtgcatcaactcttggatttgtcagtattccagccaagcaagaactttattacgggggcaaagaactaggctcgtttaaacaacacaaacagcatgagccaacaccgattcaccactcttccaagaaaggagcaacgcgagttgttgcaagtaagagtcaccttaatgctgagactcaggaatttatagctcagctacaaggaaaaattgagcttattcaagcaggcagtagtcttaaattcttgaaaatcgcgacaggtgaagcagatctttatccaagactcgcccccacatgcgaatgggatacagcagctgctcacgctattcttgaaggcgcaggcggtaaagttctacaagcagatagtctacagcccctggtttatgccaaagagaacatattaaacccctacttcattgcgtcagctaagggatga

SEQ ID NO: 2395 - protein, 262 aa, Neptuniibacter caesariensis
MSIAKKIFKNSELFQQLEKLMNDADTSILEIYNSNNFGEESKGDDSPVTKADLAAHQLLVDGLQQLTPNIPIVSEEDPSSLTIPAEHSAYWLIDPLDGTKEFIKRNDEFTCNLALIESGASTLGFVSIPAKQELYYGGKELGSFKQHKQHEPTPIHHSSKKGATRVVASKSHLNAETQEFIAQLQGKIELIQAGSSLKFLKIATGEADLYPRLAPTCEWDTAAAHAILEGAGGKVLQADSLQPLVYAKENILNPYFIASAKG

SEQ ID NO: 2396 - DNA, 819 bp, Oceanobacter sp. RED65
  CDS (1)..(819): transl_table=11
atgcaaccgaattacgaagcggtaatgcgcctagccaaattggcaggcgaggccatcattaccatttacgagcgcagtgattacaccactgtgaccgagaaagaagataacagcccactcacagatgcggacttagcggccaatcaaatcatctgcgatggcttacaaagcattgcagatattcccattatcagtgaagaagcacacatcccagatcaagaagtgcgcaaacagtggcagcgtttctggcttgttgatcctttagatggcaccaaagaattcatcgaccgcaatggcgaatttacggtgaatattgcccttatcgaagaaggccagccaacgtttggcttgatatacgcacctgtgctcgacacgttctactatggtggcgatgataaagcctatatgaaaaaaggcgacgagccggctgtttccatcaaacccagccaacctttatcacaaattcgggaaagcaataccattcgcatgttcgtgagtcgccgccatactgatgatcaaatggaattattgcgtgatcgtctcgaagaaaagcttgcgcatgtcgctgcgatacctttgggcagttcattaaagattgctcaattagccaatggcgaaggtgagttgtatccacgatttggcaatgtcagcgagtgggatatcgcagcaggccatgccatattgcgggccgctgggggcgaaattttgagtcgtcaatttgaaggtatcgaatacggacgcaaacccagcatgatcgtgcccggctttttcgcagtgggcagtatcgactttgactggcgccctattttgctcacctaa

SEQ ID NO: 2397 - protein, 272 aa, Oceanobacter sp. RED65
MQPNYEAVMRLAKLAGEAIITIYERSDYTTVTEKEDNSPLTDADLAANQIICDGLQSIADIPIISEEAHIPDQEVRKQWQRFWLVDPLDGTKEFIDRNGEFTVNIALIEEGQPTFGLIYAPVLDTFYYGGDDKAYMKKGDEPAVSIKPSQPLSQIRESNTIRMFVSRRHTDDQMELLRDRLEEKLAHVAAIPLGSSLKIAQLANGEGELYPRFGNVSEWDIAAGHAILRAAGGEILSRQFEGIEYGRKPSMIVPGFFAVGSIDFDWRPILLT

SEQ ID NO: 2398 - DNA, 828 bp, Vibrio sp. Ex25
  CDS (1)..(828): transl_table=11
atgccaatgacaaaagatctatctcacctgcttcctcaagtcatcgaaattgcccgtagtgccgggcaaatgatcctcgaaatatatgaaaaaaaacagtacgaggcctacacaaaaagtgacgagactccggtaacgagcgcagatatcgcggctcacaagctcatcacagaacgcttgagtgaactcacacccgacattcccgtattgtcagaagaagacgcagacatcagcctcgagcaacgagctcagtgggaacggtattggttagtcgaccctcttgacggtactcaagaattcatcgctcgcagcggcgactttgcgactattattgcactggtcgacaacaacaaaccaaccatgggggtcgtttatggccctgtctctggcgtgacttattacgcttatagtggcaaaggtgcttggaaaattcccgacatgtcggacagcgtaaaaatccatacgcacaaacacgagcagccagggcaaagcatcgcgattgctattagccgccgtcaagatatcaatcgcatcactagccgcatgagcagtgcttggaattacgatttaattccgctcggctctgcggcattaaaagcgtgtcttgttgcagaaggcgcggtagattgctatctcagactaggcccaacaggtgagtgggacaccgctgcgacacaatgcattgttgaagaagcgggcggtcgcattctcagcacgcaattggagccgctgtcatataacgagcgggaaacgctagagaacccaaactttattgtgcttggtgatgcggatttaccttggaatgagattttacaacgcaaagattaa

SEQ ID NO: 2399 - protein, 275 aa, Vibrio sp. Ex25
MPMTKDLSHLLPQVIEIARSAGQMILEIYEKKQYEAYTKSDETPVTSADIAAHKLITERLSELTPDIPVLSEEDADISLEQRAQWERYWLVDPLDGTQEFIARSGDFATIIALVDNNKPTMGVVYGPVSGVTYYAYSGKGAWKIPDMSDSVKIHTHKHEQPGQSIAIAISRRQDINRITSRMSSAWNYDLIPLGSAALKACLVAEGAVDCYLRLGPTGEWDTAATQCIVEEAGGRILSTQLEPLSYNERETLENPNFIVLGDADLPWNEILQRKD

SEQ ID NO: 2400 - DNA, 771 bp, Alteromonadales bacterium TW-7
  CDS (1)..(771): transl_table=11
atgaaccaaaccgaactgctagaagaaaccctcatccttgcccgcaccgcaggcaaagccattatggggatttacgaaaaggactttaacgttgaatacaaagccgatgaaagcccagtaaccgacgccgacttagcagctcataaggtcattgtagcggggctacttcagcttacgcccgacatcccaatccttagcgaagaaaacgccgacataagctgggctattcgccaaacgtggaaaagctactggttagtcgatccaatcgacggaaccaaagagttcattaaaaagaacggcgaatttaccgtaaacattgccctaatagaaaacggaaaaccggtactcgcggttgttgatgcccctgcacttggtgtatcgtacctagcaagtgacgccattggcgcgtttaaagacacgggcgatgagcgtatagaacttaaagtaaccaccaagcctaacaaagggttaatacgtgttgtaggcagccgctcgcacccatcccccgatttagccgaatttgtaaagcgctttgacgacgtagaaatggtctcaaaaggcagctcactaaaactgtgtttagttgccgaaggcagcgccgatatttacccgcgcttaggcccaacctgtgaatgggataccggcgcaggccatgcaatcgccgaaatagccggtgcaaaagtcactaaacttgatggcagcccgcttatttataacaccaaagatgagtacttaaatccgtattttattgtaagtgcgatagaagaataa

SEQ ID NO: 2401 - protein, 256 aa, Alteromonadales bacterium TW-7
MNQTELLEETLILARTAGKAIMGIYEKDFNVEYKADESPVTDADLAAHKVIVAGLLQLTPDIPILSEENADISWAIRQTWKSYWLVDPIDGTKEFIKKNGEFTVNIALIENGKPVLAVVDAPALGVSYLASDAIGAFKDTGDERIELKVTTKPNKGLIRVVGSRSHPSPDLAEFVKRFDDVEMVSKGSSLKLCLVAEGSADIYPRLGPTCEWDTGAGHAIAEIAGAKVTKLDGSPLIYNTKDEYLNPYFIVSAIEE

SEQ ID NO: 2402 - DNA, 804 bp, Alteromonadales bacterium TW-7
  CDS (1)..(804): transl_table=11
atgaataaattattagaaccttgtattgaattagccgaacgtgcaggcgatgccattatggctatatacaaaaaagatgatattggccaacaagaaaagtcagaccacacaccagtaactaaagccgatttagctgcaaatgatgtgcttgttgcaggcttaaaggcacttgcgcccgatattcctattatgtcggaagaaacacctattcctgcattagccgataggcaagattggcagcgttattggttacttgatcccatggatggcacaggtgaatttattttagaaagtggtgattttgcggtaaacattgcgcttattgaaaataaccaccctgtgttgggtgtaattcattggccgtcgaaaggtattacttactttgcgagtgctaaaaatggtgcttttaagcgtgaagaaaagagcgacacacgaatatacgtagctccgcctgaaagtttaacactagcggtaagtcgccgtcagaaaattgagtcggtgagtcaatacttaaatagccaatttacaaccattgcggttggttcgtgctcgttaaaagcatgtattgttgctgagggtaaagcggattgctttttaagaataggcccaacaggtgagtgggacacaggggcttcacaagttattgtagaagaagcgggcggttgcattactgatgcagagtttaaccctttaacctataaccaacgcgagagcactgaaaacccagactttattgtaatggggcaccctgattgggagtttcaaaaaatgattactcctcaccaaagagcgagtatagagtag

SEQ ID NO: 2403 - protein, 267 aa, Alteromonadales bacterium TW-7
MNKLLEPCIELAERAGDAIMAIYKKDDIGQQEKSDHTPVTKADLAANDVLVAGLKALAPDIPIMSEETPIPALADRQDWQRYWLLDPMDGTGEFILESGDFAVNIALIENNHPVLGVIHWPSKGITYFASAKNGAFKREEKSDTRIYVAPPESLTLAVSRRQKIESVSQYLNSQFTTIAVGSCSLKACIVAEGKADCFLRIGPTGEWDTGASQVIVEEAGGCITDAEFNPLTYNQRESTENPDFIVMGHPDWEFQKMITPHQRASIE

SEQ ID NO: 2404 - DNA, 816 bp, marine gamma proteobacterium HTCC2143
  CDS (1)..(816): transl_table=11
atggataaacgggtgttggcagaaaagctgacggcactgtgtgctgaagccggcgtagcaattgttgcgatttataatgcgactcaaccggtttctgttgagtacaagagtgatgactccccgctgacagcggctgacaggcgcgcacacgatattattgtgtcggggttacaggtgatgacccccgattggccggtgctgtcggaggagcaggaacttcctgattttgagttgcgtaaaagctggagcagatattggctagtagatccgatggacggtactcgagagtttgtcgagcgcacgggtgaatttactattaatgtggctttgatcgagcagggtgtggcaacgttggggatcgtctatctaccactggaaaaaattgcctatattggtattccagagcaggcatttgctgttaaggccgaaaataatcgtcaaacctcgttgcgagtaagtactgctgggcaatctgcctctcttactgtgctgagcagcagccgctatcaaggtgaaaagctagagcggtgcatccttcgcttagcggagcattttggtgatattgagcgattgccggcaggtagcgcgttaaaattttgttatttggcagaagggcggggtgatatataccctcgtttttcaccctgttgtgagtgggataccgcagcggggcaagccgttctggaggctgcgggagggtcattggtggatttgaaatttaacccgctgcgatacaatcaacaattatcgatcatgagtcctaatttttatgggttggcacgaataggaacaaactggaagaaaatattggattag

SEQ ID NO: 2405 - protein, 271 aa, marine gamma proteobacterium HTCC2143
MDKRVLAEKLTALCAEAGVAIVAIYNATQPVSVEYKSDDSPLTAADRRAHDIIVSGLQVMTPDWPVLSEEQELPDFELRKSWSRYWLVDPMDGTREFVERTGEFTINVALIEQGVATLGIVYLPLEKIAYIGIPEQAFAVKAENNRQTSLRVSTAGQSASLTVLSSSRYQGEKLERCILRLAEHFGDIERLPAGSALKFCYLAEGRGDIYPRFSPCCEWDTAAGQAVLEAAGGSLVDLKFNPLRYNQQLSIMSPNFYGLARIGTNWKKILD

SEQ ID NO: 2406 - DNA, 786 bp, Marinobacter sp. ELB17
  CDS (1)..(786): transl_table=11
atgaagaacgacgcttacgcatcctggcttgaaaagcttctacccatcgtgcaccacgccggcaacgccatcatggacatttacgccggcgatattgacgtgcgtacgaagagcgatgcatcgccagtaacagaagccgacgagctggccgaagctctcattttgccggcgctgcaggcactggacagaagaattcctattgtcgcggaagagcaggctgccgccggcaatacaccaaaaaccggcgaccgtttttggctggtagaccccctggacggcacaaaagaattcatcaaccgcaacggcgagttcaccgttaacattgcgctgattgagaacggcgtgccggtactgggcgtggttctggcgccggctctgaagcggctgttcgccggtggccgcgggctaggtgcttttatagaggaaaacggcgagcgcaaggccattcagtgccgcccggtgccagcggccgggttaaccgttgtcgccagccgctcccatggcgacgaggccgctctggcgcgctttttagccggtgccaaggtggccagccagaccagtgcgggctcttcactaaagctgtgcctgctggccgccggtgaagcggatgtgtatccgcgactggggcccactatggaatgggacattgctgccggtgacgctgtgctgcgtgcagccggtggccgactgattaccctggacaacaagcccatggtgtacggcaagccaaactttgccaacccgcacttttcagcctggggcttacgggctggggacagatcctag

SEQ ID NO: 2407 - protein, 261 aa, Marinobacter sp. ELB17
MKNDAYASWLEKLLPIVHHAGNAIMDIYAGDIDVRTKSDASPVTEADELAEALILPALQALDRRIPIVAEEQAAAGNTPKTGDRFWLVDPLDGTKEFINRNGEFTVNIALIENGVPVLGVVLAPALKRLFAGGRGLGAFIEENGERKAIQCRPVPAAGLTVVASRSHGDEAALARFLAGAKVASQTSAGSSLKLCLLAAGEADVYPRLGPTMEWDIAAGDAVLRAAGGRLITLDNKPMVYGKPNFANPHFSAWGLRAGDRS

SEQ ID NO: 2408 - DNA, 777 bp, Moritella sp. PE36
  CDS (1)..(777): transl_table=11
atggatagttcaatagagagttcaatcgatcatttagtcagtcaagttaatgatatcgctgttgcagcaggacaagagatattaacgatttatcagcgcgattttaaggttgataccaaagatgataactcaccagtgacagaagctgatattgcagctaatgacatcattgttgccagtttacgtactattacccctgatattcccattttgtctgaagaaggtgcaagcatcccttgggacgaaagaaagcaatggcaaacattttggcttgttgaccccttagatggcactaaagagtttattaaacgtaatggtgaatttaccgttaatatcgccttgatccacaaccaacaaccaatattaggtgttgtctatgcaccagtattagataagctttattatactaattctgatggtgcttttttattgcatggcggtgaaaccgttaagttagctgcactacccattcctaatgatgacgtcgttaaagtggtcggttcccgttctcatgccagtcctgaaatggcattgtatttagctcgttataaagaaacagatattattccggttggtagttcattgaagttttgtttgattgccgaagggagtgcacattgttatccacgattaggcccaacttgttggtgggataccggcgctggacatgcggttgcttgtgctgcaggagccaaagtagtacagcttgatggttcaccgttattgtataaccaccaagagtcagtgctaaatccgttctttgttgtagctaaataa

SEQ ID NO: 2409 - protein, 258 aa, Moritella sp. PE36
MDSSIESSIDHLVSQVNDIAVAAGQEILTIYQRDFKVDTKDDNSPVTEADIAANDIIVASLRTITPDIPILSEEGASIPWDERKQWQTFWLVDPLDGTKEFIKRNGEFTVNIALIHNQQPILGVVYAPVLDKLYYTNSDGAFLLHGGETVKLAALPIPNDDVVKVVGSRSHASPEMALYLARYKETDIIPVGSSLKFCLIAEGSAHCYPRLGPTCWWDTGAGHAVACAAGAKVVQLDGSPLLYNHQESVLNPFFVVAK

SEQ ID NO: 2410 - DNA, 795 bp, Rickettsiella grylli
  CDS (1)..(795): transl_table=11
atgaattttttgcttaatgaagttatttctcttgctaaaaaagtagggaatttagtgcttacactgtatcaaagtgattttagtgctgaatataaaaaagatcactcccctataactgttgctgatttagcctctcatgagtgtatttgtcaagaattgaaacgattaacaccggatattcctattatttctgaagaatcaggatcgatttcgtatcaaaaaaatcaagtgtgggataagtactggctcgttgaccctttggatggaacaaaagaatttctagaaaaaaacgacgaatttacaattaatattgctttaattgaacaaaataagccaagtttgggagttatatttgttccttgtaagaatatttgctactttgctcataagcgtttgggtgcttataaacaagtcggtcaaacgcaaccacaggttatacgtagccgcattttaaatgccaaggaacctattactgccgtcgtgagtcgacggcatggtagagaaaggataaaaaaatttttaactcagtttgcgcgtttaaatttattgtcttgtggaagtgcattaaaattctgttggctcgctgaaggcttagcagatgtatacccccgtttttcgcctacttttgcctgggatatcgcagccggtcactgcatattgacggaggcaggcggtttcattatagatgatatcgggaaagagttggaatataatccattcgttttacaacgatctggttttttagcggtagcggataaacaatatgcgtggttaaattatcttaaaccgtattaa

SEQ ID NO: 2411 - protein, 264 aa, Rickettsiella grylli
MNFLLNEVISLAKKVGNLVLTLYQSDFSAEYKKDHSPITVADLASHECICQELKRLTPDIPIISEESGSISYQKNQVWDKYWLVDPLDGTKEFLEKNDEFTINIALIEQNKPSLGVIFVPCKNICYFAHKRLGAYKQVGQTQPQVIRSRILNAKEPITAVVSRRHGRERIKKFLTQFARLNLLSCGSALKFCWLAEGLADVYPRFSPTFAWDIAAGHCILTEAGGFIIDDIGKELEYNPFVLQRSGFLAVADKQYAWLNYLKPY

SEQ ID NO: 2412 - DNA, 771 bp, Thauera sp. MZ1T
  CDS (1)..(771): transl_table=11
atggacaccgcaaccgcctcacggctcctcgaagccctgctcccgatcgtgcgcgcggccggcgcgctggtgatggacatctaccgcagcgacttcgcggtgcgcggcaaggacgacgcctcgccggtaaccgaggccgacgagcgcgccgaggcgctcatcgtccccgccctcgaggccttgctgcccggcgtgccggtggtggccgaagaggccgtcgcggcgggccgcctgcccgcactcgggcgccgcttctggctggtcgatcccctcgacggcaccaaggagttcatcggccgcaacggcgagttcaccgtcaacatcgccctcgtcgaggatggcgagccggtcctcggcaccgtcttcgcacccgcgctcgagcgcctcttcctcggcgcgggcggggtcggcgccttcgtcgagcaggacggccgtcgccgcccgatccgctgccgcaccgtcccgcccgccggcctcaccgtggtggccagccgctcgcacggcgacgcggccgcgctcgacgccttcctcgacgggcgcaaggtggccgcgctcaccaacgccggctcctcgctcaagctgtgcctggtcgcggcgggcgaggccgatctctatccgcgcctcggccgcaccatggaatgggacatcgccgccggccatgcggtgctgaccgccgccggcggccgcgtgcaaaccctggcgggggcgccgctgcgctacggcaagccggggctggacaacccccacttcgtcgccagcggactggactga

SEQ ID NO: 2413 - protein, 256 aa, Thauera sp. MZ1T
MDTATASRLLEALLPIVRAAGALVMDIYRSDFAVRGKDDASPVTEADERAEALIVPALEALLPGVPVVAEEAVAAGRLPALGRRFWLVDPLDGTKEFIGRNGEFTVNIALVEDGEPVLGTVFAPALERLFLGAGGVGAFVEQDGRRRPIRCRTVPPAGLTVVASRSHGDAAALDAFLDGRKVAALTNAGSSLKLCLVAAGEADLYPRLGRTMEWDIAAGHAVLTAAGGRVQTLAGAPLRYGKPGLDNPHFVASGLD

SEQ ID NO: 2414 - DNA, 783 bp, Magnetospirillum gryphiswaldense
  CDS (1)..(783): transl_table=11
gtgtcagacagctatggtctggccatgacctatctgcccctgctcccctgcctggaaaccgccgcccgtgacgccggtcgcgtgatcatggacatctacgcccaggacttcgccgtccacttcaagggcgagaatgatccggtcaccgccgccgattcattggccgaagcggtgatcctgccggtgctgcgggcactgacacccgacacccccatcgtcgccgaggaagaggccgccgccggtcgcatccccgatgtgggcgacaccttctggctggtcgatccgctggacgggaccaaggagttcgtcaagaagaatggcgaattcaccgtcaatatcggcctgatcgcaggcggcgtgccggtcctgggcgtggtctatgccccggcgctcgacatcttgtgggcaggcgccgatggtcaggcctggcgccaggatgcccaaggtcgccacaccatcgcctgtcgtcccacgccgccccatggcgccatcgtgctggattcgcgctcgcaccgcgccgccgaccgcttgcagtccttcctcgacggcctgcccggcgcggtggtggaaaacgctggctcgtcgttgaaattctgccgcatcgccgaagggtcgggggattattacccccgcttcggccccacctgcgaatgggacacggcggccgcccatgcggtgctgctggccgccggcggcgaggtggtgacctgggacaatgtggcgctgggatacggcaagcggaaattccttaatcccgatttcctcgcccgcgccaagacttga

SEQ ID NO: 2415 - protein, 260 aa, Magnetospirillum gryphiswaldense
MSDSYGLAMTYLPLLPCLETAARDAGRVIMDIYAQDFAVHFKGENDPVTAADSLAEAVILPVLRALTPDTPIVAEEEAAAGRIPDVGDTFWLVDPLDGTKEFVKKNGEFTVNIGLIAGGVPVLGVVYAPALDILWAGADGQAWRQDAQGRHTIACRPTPPHGAIVLDSRSHRAADRLQSFLDGLPGAVVENAGSSLKFCRIAEGSGDYYPRFGPTCEWDTAAAHAVLLAAGGEVVTWDNVALGYGKRKFLNPDFLARAKT

SEQ ID NO: 2416 - DNA, 798 bp, Rhizobium leguminosarum bv
  CDS (1)..(798): transl_table=11
atgctgaggacatttgaaaaggcggcactcgaagccggcagggccatcatcacggtcttgcgcgaaggcttccccgtcgccatgaaggcggatgccagtccggtcacggtcgccgacgaggaggctgaacgtatcatcctcgctcatctcgccagagattatcccgaaatacccgtcgtggcggaagaatcggtcgccgccggaaaagtgcccgacattgccggccgcggcttctttcttgtcgaccctctcgacgggacccgcgagttcgtcgacggacggcaggaattcaccgtcaacatcgcctatatcgagaacggcgccccggtggcgggcatcgtctacgcgccagcgctcggacttgccttctcgggagaacgcggccacgccgaaagcgtcgtcgtcgcggacgatttcacggttggcgcacgcagcacaatcactgtgcgcgagcagcctgacgacaggctggcgcttgcaagccttcgccacaacagcccggagaccggaagcttcctcgccgaccacgcgatcttcaaatgcaccaatatcggctcctcgctgaaattctgcctgctggccgaacggaaggccgacgtctacccgcgtttcacccgcacgatggaatgggacaccgcggccggcgatgcggtgctgcgcgccgtcggcggttcgacggtgacgctggacggaacgccgctgacctatggcaagacgggaaccgcggccgatttcgacttcgccaacccgaacttcatctcctggggcggcaggaaacgcgtcctcgaaccggcgtga

SEQ ID NO: 2417 - protein, 265 aa, Rhizobium leguminosarum bv
MLRTFEKAALEAGRAIITVLREGFPVAMKADASPVTVADEEAERIILAHLARDYPEIPVVAEESVAAGKVPDIAGRGFFLVDPLDGTREFVDGRQEFTVNIAYIENGAPVAGIVYAPALGLAFSGERGHAESVVVADDFTVGARSTITVREQPDDRLALASLRHNSPETGSFLADHAIFKCTNIGSSLKFCLLAERKADVYPRFTRTMEWDTAAGDAVLRAVGGSTVTLDGTPLTYGKTGTAADFDFANPNFISWGGRKRVLEPA

SEQ ID NO: 2418 - DNA, 927 bp, Candidatus Kuenenia stuttgartiensis
  CDS (1)..(927): transl_table=11
atgaacactataaaatattcccaacatcttttcaccgctctttccgccgccggtaaagcgggacgcgcaatcttagaagtgtactacaccgattttgcagttgagcacaaagacgatacatctcctttgacgctggcagacaagcattcgcatgaagttattacaaaagacctgaaaaccctgactaccggcaataattccggcaatgccaatgctgtctcctcactgcctgtattaagtgaggaagggaaagagataccctataccgagaggagatactgggaatctttttggttggttgatccgcttgacggtaccaaggaatttattaagagaaacggcgaatttaccgtaaacattgcccttatccataaaaacaggcctgttttaggttgtatttatgtgccggtcaaggatgttctttattttgcatgcgaaggattaggggcatataggcgggaaaacaatcaaggcatagcaaatgttttatcattaaaagaacttgttgatagttcggaaagattgccatcacgccatactcataaaaagaatgttgaaaacaatcgttccccggacgaagatggaattcatctgacggttatcggaagccgttcacatccttcggagcaatttgcaaaatttgtggaaagtttgcgtggtgaagggcggaaaattgaaatcatctccgcagggagttctctgaaattctgccttttggctgagggcaaggcggatatttacccaaggtttggcccaacaatggaatgggatacggcggcaggacaagcaattgtcgagcagagcaatgggaaaataatggatgcagaaaccaatatgcctttgaaatataataaggaaaatctggtcaacccgttttttataggaaggggagaaaatagtcccttcccgcccattacagggcaatag

SEQ ID NO: 2419 - protein, 308 aa, Candidatus Kuenenia stuttgartiensis
MNTIKYSQHLFTALSAAGKAGRAILEVYYTDFAVEHKDDTSPLTLADKHSHEVITKDLKTLTTGNNSGNANAVSSLPVLSEEGKEIPYTERRYWESFWLVDPLDGTKEFIKRNGEFTVNIALIHKNRPVLGCIYVPVKDVLYFACEGLGAYRRENNQGIANVLSLKELVDSSERLPSRHTHKKNVENNRSPDEDGIHLTVIGSRSHPSEQFAKFVESLRGEGRKIEIISAGSSLKFCLLAEGKADIYPRFGPTMEWDTAAGQAIVEQSNGKIMDAETNMPLKYNKENLVNPFFIGRGENSPFPPITGQ

SEQ ID NO: 2420 - DNA, 864 bp, Rhizobium leguminosarum
  CDS (1)..(864): transl_table=11
gtgacagggatggtttgcggacgagcaacagcgggtgctcgccgcgtggcgaacggcaaaaggacaatgctgaggacatttgaaaaggcggcgctcgaagccggcagggccatcatcacggtcttgcgcgaaggcttccccgtcgccatgaaggcggatgcaagtccggtcacggtcgccgacgaggaggccgaacgtatcatcctcgctcatctcgccagagattatcccgaaataccggtggtggcggaagaatcggtcgccgccggcaaggtgcccgacatcgctggccgaggcttcttcctcgtcgaccctctcgacggcacccgtgaattcgtcgacggacgacaggaattcaccgtcaacatcgcctatatcgagaacggcgctccggtggccggcattgtctacgcgccggcgctggggcttgccttctctggagagcgcggccacgccgaaaggctcgtcgtcatggacgacttcacggttggcgcacgcagcgcaatcacggtgcgcgaacagccggacgacaggctggcgcttgcaagccttcgccacaacagcccggagaccggaagcttcctcgccgaccacgcgatcttcaaatgcaccaatatcggttcctcgttgaagttctgcctgctggccgaaggcaaggcagacgtctatccgcgtttcacccgcacgatggaatgggacaccgcggccggggatgcggtgctgcgcgccgccggcggttcgacggtgacgctggacggaacgccgctgacctacggcaagacgggaacggccgccgatttcgacttcgccaacccgaacttcatctcctggggtggcaggaaacgcgtcctcgaactggcgtga

SEQ ID NO: 2421 - protein, 287 aa, Rhizobium leguminosarum
MTGMVCGRATAGARRVANGKRTMLRTFEKAALEAGRAIITVLREGFPVAMKADASPVTVADEEAERIILAHLARDYPEIPVVAEESVAAGKVPDIAGRGFFLVDPLDGTREFVDGRQEFTVNIAYIENGAPVAGIVYAPALGLAFSGERGHAERLVVMDDFTVGARSAITVREQPDDRLALASLRHNSPETGSFLADHAIFKCTNIGSSLKFCLLAEGKADVYPRFTRTMEWDTAAGDAVLRAAGGSTVTLDGTPLTYGKTGTAADFDFANPNFISWGGRKRVLELA

SEQ ID NO: 2422 - DNA, 786 bp, Xanthomonas axonopodis pv
  CDS (1)..(786): transl_table=11
atggagctgcgcgaaaccgtgatcgccatcgcgcgcgacgccggcgacgcaatcatggaggtctacgcccaggacttttcggtggagatcaaggacgacgccagcccgctgacccaggccgacctggcggccaaccgcgtcatcgtcgaaggcctgcgccgtgtcaccccggatgtgccggtgctgtcggaagagtctgcgcacgtggcctgggagcaacgccagtactggaccagttactggctggtcgatccgctcgatggcacccgcgaattcgtcaagcgcaatggcgagttcagcgtcaacatcgcactcatccatatgggcgcgccggtgctgggggtggtgcaggcgccggtcgacggacgggtctggtatgccgcgcgtggcgagaacgccttccgccgcgatggcgaccgcgatgagatgctgcacacgcgcaccccggccgccatgccgttgcgggtggcagccagccgttcgcatcgcgacgcgcggactgccgccgcgctggagcggatgggcgagatcgacgtggtcgcgcaaggctcgtcgttgaagttctgccgcatcgccgaaggcgatctggacgtgtatccgcgcttcggccccacctccgagtgggacaccgccgccggccagtgcgtgctgcatgcggccggtggcgtgttgctggccggcgccagcggcaaaccgttccgctacaaccgccgcgacaccttgctcaacggcgacttcatcgcactgggcgaccccaatctgccctggcgcgattggctggcctga

SEQ ID NO: 2423 - protein, 261 aa, Xanthomonas axonopodis pv
MELRETVIAIARDAGDAIMEVYAQDFSVEIKDDASPLTQADLAANRVIVEGLRRVTPDVPVLSEESAHVAWEQRQYWTSYWLVDPLDGTREFVKRNGEFSVNIALIHMGAPVLGVVQAPVDGRVWYAARGENAFRRDGDRDEMLHTRTPAAMPLRVAASRSHRDARTAAALERMGEIDVVAQGSSLKFCRIAEGDLDVYPRFGPTSEWDTAAGQCVLHAAGGVLLAGASGKPFRYNRRDTLLNGDFIALGDPNLPWRDWLA

SEQ ID NO: 2424 - DNA, 834 bp, Coxiella burnetii
  CDS (1)..(834): transl_table=11
atgattaagatggaagccttcatttatagtgaaaagatgttgacatctgtgatcgaaataatcaagtttgctgcaaaaaagattcttagtatctatagtgaacccacttctttagtagtgacaaagaaaggcgatggttccccgttaacaaaagctgatcaattggcacatgattttatttcagcgcaactcactaatttaaccccgaagattcccatcatttccgaagagttagattttgagatttattctaacacccttctaaattcttatttttggttggttgatcctttagacgggaccaaagactttattaaacgcaatggcgaatttactgttaatatagccttaatcaaagatgcgaaagtagtactcggggtagtgtttgttcctgtaaccaacacttgttattatgcaaataaagtagttggcgccttcaagcaagttggagaacaaccaccccaacaattacaattgaccccgcagaacaaagcaagggatttgaatcaacctatcaaagtcgcaataagtcgccaccatggacttgatggcatacaaaaatttattgataaaattggtccttgcgagtgtgtcagcatgggcagtagcttgaagatatgctcgttagcagaaggggaagtagacatctacccgagattaggtcctacgaaagagtgggatacggctgcagcgcaatgcgttttagaacaagcgggcggaaaaattctgattgaaaccggaaaatcattattttacaataaattggattttttaaatccaaaattcttggctcttggtagtaggggaaatccagcttgggttacctatttataa

SEQ ID NO: 2425 - protein, 277 aa, Coxiella burnetii
MIKMEAFIYSEKMLTSVIEIIKFAAKKILSIYSEPTSLVVTKKGDGSPLTKADQLAHDFISAQLTNLTPKIPIISEELDFEIYSNTLLNSYFWLVDPLDGTKDFIKRNGEFTVNIALIKDAKVVLGVVFVPVTNTCYYANKVVGAFKQVGEQPPQQLQLTPQNKARDLNQPIKVAISRHHGLDGIQKFIDKIGPCECVSMGSSLKICSLAEGEVDIYPRLGPTKEWDTAAAQCVLEQAGGKILIETGKSLFYNKLDFLNPKFLALGSRGNPAWVTYL

SEQ ID NO: 2426 - DNA, 819 bp, Xylella fastidiosa
  CDS (1)..(819): transl_table=11
atggctggaacatcagcagtgatcactattcccagcgatcttcgcgaatcggtcatcgccattgctaccgattccggcagagcgatcatggagatctatcaggatcatttccaggtccagatcaaagcagacatgagtccattgacgcaggccgatttaacctcacatcaaatcatcgtgcatggactcaagcaactgacccccagtctgcccgtgttgtcggaagagtcgacgggaatcacttgggaggaacgccgtcactggacgagctactggttggtcgatccactcgacggcacccgcgaatttgtgaaacgcaatggcgagttttgcatcaacatcgcactgatccatgaaggtatccccgtgtatggaatgatcctggcgccggtggaagggaccatctggcatgcaatgcatggcgggcaggcattccgccgtgatggtcaccgtgataccacattgcacgtgcgggcacctgctggcaccgcgttacaggtcgcagccagccgctcgcacattgatgtgcacacctcggcgttactggcacagatgaaagaaataaccctagtttcgcagggatcggcgctgaagttctgtcgccttgctgaaggcacactcgacgtgtacccgcgtctaggcgctacctatgagtgggatactgccgcaggccagtgcttgctgcttgctgcgggcggtacgctgctgaacattgagactggaaaaccgttccgctacaacaaacgcgagacgctgcttaacaacggttttatcgcactgggcgacgccacgctgccttggcgcgattggttggcgtga

SEQ ID NO: 2427 - protein, 272 aa, Xylella fastidiosa
MAGTSAVITIPSDLRESVIAIATDSGRAIMEIYQDHFQVQIKADMSPLTQADLTSHQIIVHGLKQLTPSLPVLSEESTGITWEERRHWTSYWLVDPLDGTREFVKRNGEFCINIALIHEGIPVYGMILAPVEGTIWHAMHGGQAFRRDGHRDTTLHVRAPAGTALQVAASRSHIDVHTSALLAQMKEITLVSQGSALKFCRLAEGTLDVYPRLGATYEWDTAAGQCLLLAAGGTLLNIETGKPFRYNKRETLLNNGFIALGDATLPWRDWLA

SEQ ID NO: 2428 - DNA, 810 bp, Actinobacillus actinomycetemcomitans
  CDS (1)..(810): transl_table=11
atgccaatcctcacgacccatttattgcaggatgtaatagagatcgcccaacaggcgggtgagcatttacgttgcttttatcaacgttcggtgacagttcgaatgaaagaagacaacacaccggtgaccgaagcggatttattcgtcagccaatttttaacggaaaaactgaccgcacttacgccgcagattccgattctttctgaagaaaattgccatattccgctgaccgagcggcaaacctggcgttcttactggttaatcgatcccctggacggcacgcaacaatttatcaatcgcaccggtcaattctccgtgctcgtcagtttggtgaaagatcatcaaccggtgttgggcgtgattcatgcgccgatgttgggttccacctattacgccatgcagggtttcggtgcgtataaacaccatgacgggcagcaccttaaattagccttccatgatattcaagcggacaatgccttgcgtattgctgtgggttccgccgccgcagccgaaaaagtgcggtcgattttaaataagaatttggcttacgaatttcatatttgcggatccagcgggttaaaaagcacactggtggcagacggcgtatgcgattgctacattcgcttgggttgcaccggtgaatgggatactgccgcttccgagattttactggcggaaatgggtggcattatttttgacttgaattatcaaccgctgacttataataaacgggaatctttcgtcaatccgaattttgtcatgggaatcacgcaggattttccgtgggataaaatttttcactccaattaa

SEQ ID NO: 2429 - protein, 269 aa, Actinobacillus actinomycetemcomitans
MPILTTHLLQDVIEIAQQAGEHLRCFYQRSVTVRMKEDNTPVTEADLFVSQFLTEKLTALTPQIPILSEENCHIPLTERQTWRSYWLIDPLDGTQQFINRTGQFSVLVSLVKDHQPVLGVIHAPMLGSTYYAMQGFGAYKHHDGQHLKLAFHDIQADNALRIAVGSAAAAEKVRSILNKNLAYEFHICGSSGLKSTLVADGVCDCYIRLGCTGEWDTAASEILLAEMGGIIFDLNYQPLTYNKRESFVNPNFVMGITQDFPWDKIFHSN

SEQ ID NO: 2430 - DNA, 798 bp, Buchnera aphidicola subsp
  CDS (1)..(798): transl_table=11
ttgcaaaaaattaatttttttgatactattaataatatatggcgtaaaatgttagataaaatttgtcaattagcacgttctgcaggtcattgtattatgaaactttataattctcaaaaatttataaatgtttcatataaaccagataacactcccatcaccgatgttgattatgcagccaataatatcatcaaaaaaggactttcattaatttctcctcaaattccaattatttctgaagaagaatcatataattttgaaatatgtcgtaattggaatagttattggttagttgatccgttagatggaactaaagaatttttaaaaaaaaatggtgaatttacagttaatattagtttgatcgaatacggtgtccctatactcggtgtaatatacgctcccttttttgatgttctatattctgctttttatgacaacgcgtggaaagaagaaaaatttggatcaaagaaaaagattaatgttgctcaagcagaagcaccattattagtgattagccgttcacatcctaatgaaaccttgaaaaattatttagaaaaaataaaatgttgtaaaataaaaaaaatgggttcatcactaaaattttgcttaatagcagaaggaactgctcaaatttatcccagatttggtgatactcatatatgggatactgccgctggtcatgctattgttatagcggctggtggaaaagtacaaacatggacaggcggcaatttaaattattcattgtcttcacgtgtttcttttattaattctggtttttatgcgtccgcattataa

SEQ ID NO: 2431 - protein, 265 aa, Buchnera aphidicola subsp
MQKINFFDTINNIWRKMLDKICQLARSAGHCIMKLYNSQKFINVSYKPDNTPITDVDYAANNIIKKGLSLISPQIPIISEEESYNFEICRNWNSYWLVDPLDGTKEFLKKNGEFTVNISLIEYGVPILGVIYAPFFDVLYSAFYDNAWKEEKFGSKKKINVAQAEAPLLVISRSHPNETLKNYLEKIKCCKIKKMGSSLKFCLIAEGTAQIYPRFGDTHIWDTAAGHAIVIAAGGKVQTWTGGNLNYSLSSRVSFINSGFYASAL

SEQ ID NO: 2432 - DNA, 741 bp, Escherichia coli O157
  CDS (1)..(741): transl_table=11
atgttagatcaagtatgccagcttgcacggaatgcaggcgatgccattatgcaggtctacgacggggcgaaaccgatggacgtcgtcagcaaagcggacaattctccggtaacggcagcggatattgccgctcacaccgttatcatggacggtttacgtacgctgacaccggatattccggtcctttctgaagaagatcctcccggttgggaagtccgtcagcactggcagcgttactggctggtagacccgctggatggtacgaaagagtttattaaacgtaatggcgaattcaccgttaacattgcgctcattgaccatggcaaaccgattttaggtgtggtgtatgcgccggtaatgaacgtaatgtacagcgcggcagaaggcaaggcctggaaagaagagtgcggcgtgcgcaagcagattcaggtccgcgatgcgcgcccgccgctggtggtgatcagccgctctcatgcggatgcggagctgaaagagtatctgcaacagcttggcgaacatcagaccacgtccatcggctcttcgctgaagttctgcctggtggcggaaggacaggcgcagctgtacccgcgtttcggaccaacgaatatttgggacaccgccgctggacatgctgtggctgcagctgccggagcgcacgttcacgactggcagggtaaaccgctggattacactccgcgcgagtcgttcctgaatccggggttcagagtgtctatttactaa

SEQ ID NO: 2433 - protein, 246 aa, Escherichia coli O157
MLDQVCQLARNAGDAIMQVYDGAKPMDVVSKADNSPVTAADIAAHTVIMDGLRTLTPDIPVLSEEDPPGWEVRQHWQRYWLVDPLDGTKEFIKRNGEFTVNIALIDHGKPILGVVYAPVMNVMYSAAEGKAWKEECGVRKQIQVRDARPPLVVISRSHADAELKEYLQQLGEHQTTSIGSSLKFCLVAEGQAQLYPRFGPTNIWDTAAGHAVAAAAGAHVHDWQGKPLDYTPRESFLNPGFRVSIY

SEQ ID NO: 2434 - DNA, 741 bp, Escherichia coli O6
  CDS (1)..(741): transl_table=11
atgttagatcaagtatgccagcttgcacggaatgcaggtgatgccattatgcaggtctacgacgggacgaaaccgatggacgtcgtcagcaaagcggacaattctccggtaacggcagcggatattgccgctcacaccgttatcatggacggtttacgtacgctgacaccggatattccggtcctttctgaagaagatcctcccggttgggaagtccgtcagcactggcagcgttactggctggtagacccgctggatggtactaaagagtttattaaacgtaatggcgaattcaccgttaacattgcgctcatcgaccacggtaaaccgattttaggtgtggtgtatgcgccggtaatgaacgtaatgtacagcgcggcagaaggcaaagcctggaaagaagagtgcggtgtgcgcaagcagattcaggtccgcgatgcgcgcccgccgctggtggtgatcagccgttcccatgcagatgcggagctgaaagagtatctgcaacagcttggcgaacatcagaccacgtccatcggctcttcgctgaaattctgcctggtggcggaaggacaggcgcagctgtacccgcgtttcgggccaacgaatatttgggataccgccgctggtcatgctgtggctgcagctgccggagcgcacgttcacgactggcagggtaaaccgctggattacactccgcgcgagtcgttcctgaatccggggttcagagtgtctatttattaa

SEQ ID NO: 2435 - protein, 246 aa, Escherichia coli O6
MLDQVCQLARNAGDAIMQVYDGTKPMDVVSKADNSPVTAADIAAHTVIMDGLRTLTPDIPVLSEEDPPGWEVRQHWQRYWLVDPLDGTKEFIKRNGEFTVNIALIDHGKPILGVVYAPVMNVMYSAAEGKAWKEECGVRKQIQVRDARPPLVVISRSHADAELKEYLQQLGEHQTTSIGSSLKFCLVAEGQAQLYPRFGPTNIWDTAAGHAVAAAAGAHVHDWQGKPLDYTPRESFLNPGFRVSIY

SEQ ID NO: 2436 - DNA, 741 bp, Salmonella typhi
  CDS (1)..(741): transl_table=11
atgttagaacaagtatgccagcttgcacggaacgcgggcgatgccattatgcaggtttatgatggagccaaaccgatggagtacgcccgcaagcaggacgattctccagtcactgcggcggatatcgccgcacataccgtgattctcgaagggttacgcacgctcacgccggatattccggtgctttcagaagaagatccgcccgcctgggaagtgcgccagcactggcagcgttactggctggtcgatccgctcgacggcaccaaagaattcatcaagcgcaatagagaattcacggtcaatatcgcgctgattgagcagggcaagccggtgttgggcgttgtctatgcgccggtgctgaaagtgatgtactacgcggcggaaggtaaggcctggaaagaggagtgcggggtgcgtaagcagattcaggtgcgggatgcccgcccgccgctggtggtgattagccgttcgcatacggatgatgaactcaccgaatatctccaacagcttggcgaacatcagactacctctattggttcctcgctgaaattctgtcttgtggcggaaggacaggcgcagctttaccccagatttgggccgaccagcgtctgggatactgccgcaggtcatgccattgccgttgcagccggggcgcacgttcacgactggcagggaaaaacgctggactatacccctcgtgaatcgttccttaaccccggcttccgggtgactatttactga

SEQ ID NO: 2437 - protein, 246 aa, Salmonella typhi
MLEQVCQLARNAGDAIMQVYDGAKPMEYARKQDDSPVTAADIAAHTVILEGLRTLTPDIPVLSEEDPPAWEVRQHWQRYWLVDPLDGTKEFIKRNREFTVNIALIEQGKPVLGVVYAPVLKVMYYAAEGKAWKEECGVRKQIQVRDARPPLVVISRSHTDDELTEYLQQLGEHQTTSIGSSLKFCLVAEGQAQLYPRFGPTSVWDTAAGHAIAVAAGAHVHDWQGKTLDYTPRESFLNPGFRVTIY

SEQ ID NO: 2438 - DNA, 741 bp, Salmonella typhimurium
  CDS (1)..(741): transl_table=11
atgttagaacaagtatgccagcttgcacggaacgcgggcgatgccattatgcaggtttatgatggagccaaaccgatggagtacgcccgcaagcaggacgattctccagtcactgcggcggatatcgccgcacataccgtgattctcgaagggttacgcacgctcacgccggatattccggtgctttcagaagaggatccgcccgcctgggaagtgcgccagcactggcagcgttactggctggtcgatccgctcgacggcaccaaggagttcatcaagcgcaatggcgaattcacggtcaatatcgcgctgattgagcagggcaagccggtgttgggcgtggtctatgcgccggtgctgaaagtgatgtactacgcggcggaaggtaaggcctggaaagaggagtgcggggtgcgtaagcagattcaggtccgggatgcccgcccgccgctggtggtgattagccgttcgcatacggatgatgaactcaccgaatatctccaacagcttggcgaacatcagacaacctctattggttcctcgctgaaattctgccttgtggcggaaggccaggcgcagctttaccccagatttgggccgaccagcgtctgggacactgccgcaggtcatgccattgccgttgcagccggggcgcacgttcacgactggcagggaaaaacgctggactatacccctcgtgaatcgttccttaaccccggcttccgggtgactatttactga

SEQ ID NO: 2439 - protein, 246 aa, Salmonella typhimurium
MLEQVCQLARNAGDAIMQVYDGAKPMEYARKQDDSPVTAADIAAHTVILEGLRTLTPDIPVLSEEDPPAWEVRQHWQRYWLVDPLDGTKEFIKRNGEFTVNIALIEQGKPVLGVVYAPVLKVMYYAAEGKAWKEECGVRKQIQVRDARPPLVVISRSHTDDELTEYLQQLGEHQTTSIGSSLKFCLVAEGQAQLYPRFGPTSVWDTAAGHAIAVAAGAHVHDWQGKTLDYTPRESFLNPGFRVTIY

SEQ ID NO: 2440 - DNA, 741 bp, Shigella flexneri
  CDS (1)..(741): transl_table=11
atgttagatcaagtatgccagcttgcacggaatgcaggcgatgccattatgcaggtctacgacgggacgaaaccgatggacgtcgtcagcaaagcggacaattctccggtaacggcagcggatattgccgctcacaccgttatcatggacggtttacgtacgctggcaccggatattccggtcctttctgaagaagatcctcccggttgggaagtccgtcagcactggcagcgttactggctggtagacccgctggatggtactaaagagtttattaaacgtaatggcgaattcaccgttaacattgcgctcattgaccatggcaaaccgattttaggtgtggtgtatgcgccggtaatgaacgtaatgtacagcgcggcagaaggcaaggcctggaaagaagagtgcggtgtgcgcaagctgattcaggtccgcgatgcgcgcccgccgctggtggttatcagccgttcccatgcagatgcggagctgaaagagtatctgcaacagcttggcgaacatcagaccacgtccatcggctcttcgctgaaattctgcctggtggcggaaggacaggcgcagctgtacccgcgcttcggaccaacgaatatttgggacaccgccgccggacatgctgtggctgcagctgccggagcgcacgttcacgactggcagggtaaaccgctggattacactccgcgcgagtcgttcctgaatccggggttcagagtgtccatttactaa

SEQ ID NO: 2441 - protein, 246 aa, Shigella flexneri
MLDQVCQLARNAGDAIMQVYDGTKPMDVVSKADNSPVTAADIAAHTVIMDGLRTLAPDIPVLSEEDPPGWEVRQHWQRYWLVDPLDGTKEFIKRNGEFTVNIALIDHGKPILGVVYAPVMNVMYSAAEGKAWKEECGVRKLIQVRDARPPLVVISRSHADAELKEYLQQLGEHQTTSIGSSLKFCLVAEGQAQLYPRFGPTNIWDTAAGHAVAAAAGAHVHDWQGKPLDYTPRESFLNPGFRVSIY

SEQ ID NO: 2442 - DNA, 825 bp, Oryza sativa
  CDS (1)..(825)
atggcggaggagcagttcctcgccgtcgcggtggacgccgccaagaacgccggcgagatcatccgcaagggcttctaccagaccaagaacgtggagcacaagggccaggtctctcttccttcttccacggtggatttggtgacggagacggacaaggcctgcgaggacctcatcttcaaccacctccggaagcactacccggaccacaagttcatcggcgaggagacgtccgcggcgctcggcgccaccgcggacctcaccgacgacccgacctggatcgtcgaccccctcgatggcaccaccaatttcgtccatggcttcccttttgtttgcgtctcgatcggtctcaccgtcgggaaaattcctactgttggagttgtgtacaaccccatcatgaatgagcttttcacagctgttcgtggaaaaggtgccttcctcaatggttctccaatcaaaacttcatctcaaaacgagctggtgaaggctcttctggtaacagaggttggaaccaaaagagataaggccactctggatgatacaacaaacagaatcaacaagttactattcaagattagatctatacggatgtgtggctcgttggccttgaacatgtgtggagttgcctgtggtaggcttgatttgtgttatgagattggatttggtggcccctgggatgtggccgctggagctctgattcttcgggaagctggtggttttgtttttgatccgagtggtggggagtttgatctgatggcacgaagaatggcaggatcaaacagctatctgaaggatcaattcatcaaagaattgggagatacaagttga

SEQ ID NO: 2443 - protein, 274 aa, Oryza sativa
MAEEQFLAVAVDAAKNAGEIIRKGFYQTKNVEHKGQVSLPSSTVDLVTETDKACEDLIFNHLRKHYPDHKFIGEETSAALGATADLTDDPTWIVDPLDGTTNFVHGFPFVCVSIGLTVGKIPTVGVVYNPIMNELFTAVRGKGAFLNGSPIKTSSQNELVKALLVTEVGTKRDKATLDDTTNRINKLLFKIRSIRMCGSLALNMCGVACGRLDLCYEIGFGGPWDVAAGALILREAGGFVFDPSGGEFDLMARRMAGSNSYLKDQFIKELGDTS

SEQ ID NO: 2444 - DNA, 804 bp, Oryza sativa
  CDS (1)..(804)
atggcggaggagcagttcctcgccgtcgcggtggacgccgccaagaacgccggcgagatcatccgcaagggcttctaccagaccaagaacgtggagcacaagggccaggtggatttggtgacggagacggacaaggcctgcgaggacctcatcttcaaccacctccggaagcactacccggaccacaagttcatcggcgaggagacgtccgcggcgctcggcgccaccgcggacctcaccgacgacccgacctggatcgtcgaccccctcgatggcaccaccaatttcgtccatggcttcccttttgtttgcgtctcgatcggtctcaccgtcgggaaaattcctactgttggagttgtgtacaaccccatcatgaatgagcttttcacagctgttcgtggaaaaggtgccttcctcaatggttctccaatcaaaacttcatctcaaaacgagctggtgaaggctcttctggtaacagaggttggaaccaaaagagataaggccactctggatgatacaacaaacagaatcaacaagttactattcaagattagatctatacggatgtgtggctcgttggccttgaacatgtgtggagttgcctgtggtaggcttgatttgtgttatgagattggatttggtggcccctgggatgtggccgctggagctctgattcttcgggaagctggtggttttgtttttgatccgagtggtggggagtttgatctgatggcacgaagaatggcaggatcaaacagctatctgaaggatcaattcatcaaagaattgggagatacaagttga

SEQ ID NO: 2445 - protein, 267 aa, Oryza sativa
MAEEQFLAVAVDAAKNAGEIIRKGFYQTKNVEHKGQVDLVTETDKACEDLIFNHLRKHYPDHKFIGEETSAALGATADLTDDPTWIVDPLDGTTNFVHGFPFVCVSIGLTVGKIPTVGVVYNPIMNELFTAVRGKGAFLNGSPIKTSSQNELVKALLVTEVGTKRDKATLDDTTNRINKLLFKIRSIRMCGSLALNMCGVACGRLDLCYEIGFGGPWDVAAGALILREAGGFVFDPSGGEFDLMARRMAGSNSYLKDQFIKELGDTS

SEQ ID NO: 2446 - DNA, 852 bp, Artificial sequence; identical to SEQ ID NO: 2219
  Unidentified
  CDS (1)..(852): transl_table=11

SEQ ID NO: 2447 - protein, 283 aa, Artificial sequence; identical to SEQ ID NO: 2220
  Unidentified

SEQ ID NO: 2448 - DNA, 804 bp, Zea mays
  CDS (1)..(804)
atgtcggaggagcagttcctcgccgtggcgatggaagccgccaagagcgccggcgagattattcgcaagggattctaccagaccaagaacgtccagcacaagggccaggtggatttggtgacggagacggacaaggcctgcgaggacctcatcttcaaccacctccggaagcacttcccggaccacaagttcatcggggaggaggagtccgcggcgctcggggccaccgctgacctcaccgacgaccccacctggatcgtcgatcccctcgacgggaccactaatttcgtccatggtttcccatttgtatgtgtctccgttggcctcaccattgggaaaattcccactgtcggagtcgtcttcaaccccatcatgaacgaacttttcacggcggttcgtggaaaaggggctttcctgaatggctctccaattaaagcatcatctcaagatgagttagtgaaggctcttctggtaacagaggctggaaccaatagagacaagaccactgtggatgatacaaccaacagaatcaacaggctactatacaagattcgatccatacggatgtgtggatcattggctttaaacatgtgtggagttgcctgtggtagactagatttgtgttatgagataggatttggtggtccatgggatgttgctgctggtgctgtaattcttcaggaagccggtggccttgtttttgacccaagcggcggagagtttgatttgatgtcgcgaagaatggcaggatcaaacagcttgctgaaggataagttcgtcaaggaactgggggatactaattga

SEQ ID NO: 2449 - protein, 267 aa, Zea mays
MSEEQFLAVAMEAAKSAGEIIRKGFYQTKNVQHKGQVDLVTETDKACEDLIFNHLRKHFPDHKFIGEEESAALGATADLTDDPTWIVDPLDGTTNFVHGFPFVCVSVGLTIGKIPTVGVVFNPIMNELFTAVRGKGAFLNGSPIKASSQDELVKALLVTEAGTNRDKTTVDDTTNRINRLLYKIRSIRMCGSLALNMCGVACGRLDLCYEIGFGGPWDVAAGAVILQEAGGLVFDPSGGEFDLMSRRMAGSNSLLKDKFVKELGDTN

SEQ ID NO: 2450 - DNA, 804 bp, Zea mays
  CDS (1)..(804)
atgtcggaggagcagttcctcgccgtggcggtggaagccgccaagagcgccggcgagattattcgcaagggattctaccagaccaagaacgtcgagcacaagggccaggtggatttggtgacggagacggacaaggcctgcgaggacctcatcttcaaccacctccggaagcacttcccggaccacaagttcatcggggaggaggagtccgcggcgctcggggccaccgctgacctcaccgacgaccccacctggatcgtcgatcccctcgacgggaccactaatttcgtccatggtttcccatttgtatgtgtctccgttggcctcaccattgggaaaattcccactgtcggagtcgtcttcaaccccatcatgaacgagcttttcacggcggttcgtggaaaaggggctttcctgaatggctctccaattaaagcatcatctcaagatgagttagtgaaggctcttctggtaacagaggctggaaccaatagagacaagaccactgtggatgatacaaccaacagaatcaacaggctactatacaagattcgatccatacggatgtgtggatcattggctttaaacatgtgtggagttgcctgtggtagactagatttgtgttatgagataggatttggtggtccatgggatgttgctgctggtgctgtaattcttcaggaagccggtggccttgtttttgacccaagcggcggagagtttgatttgatgtcgcgaagaatggcaggatcaaacagcttgctgaaggataagttcgtcaaggaactgggggatactaattga

SEQ ID NO: 2451 - protein, 267 aa, Zea mays
MSEEQFLAVAVEAAKSAGEIIRKGFYQTKNVEHKGQVDLVTETDKACEDLIFNHLRKHFPDHKFIGEEESAALGATADLTDDPTWIVDPLDGTTNFVHGFPFVCVSVGLTIGKIPTVGVVFNPIMNELFTAVRGKGAFLNGSPIKASSQDELVKALLVTEAGTNRDKTTVDDTTNRINRLLYKIRSIRMCGSLALNMCGVACGRLDLCYEIGFGGPWDVAAGAVILQEAGGLVFDPSGGEFDLMSRRMAGSNSLLKDKFVKELGDTN

SEQ ID NO: 2452 - DNA, 25 bp, Artificial sequence
  primer
atgttagatcaagtatgccagcttg

SEQ ID NO: 2453 - DNA, 25 bp, Artificial sequence
  primer
ttagtaaatagacactctgaacccc

SEQ ID NO: 2454 - protein, 312 aa, Artificial sequence
  consensus sequence
  Variant (3)..(15): Xaa in position 3 to 15 is any amino acid
  Variant (16)..(25): Xaa in position 16 to 25 is any or no amino acid
  Variant (27)..(27): Xaa in position 27 is any amino acid
  Variant (29)..(29): Xaa in position 29 is any amino acid
  Variant (30)..(33): Xaa in position 30 to 33 is any or no amino acid
  Variant (35)..(35): Xaa in position 35 is any amino acid
  Variant (37)..(37): Xaa in position 37 is any amino acid
  Variant (40)..(49): Xaa in position 40 to 49 is any amino acid
  Variant (51)..(59): Xaa in position 51 to 59 is any amino acid
  Variant (60)..(72): Xaa in position 60 to 72 is any or no amino acid
  Variant (75)..(85): Xaa in position 75 to 85 is any amino acid
  Variant (86)..(91): Xaa in position 86 to 91 is any or no amino acid
  Variant (93)..(94): Xaa in position 93 to 94 is any amino acid
  Variant (101)..(101): Xaa in position 101 is any amino acid
  Variant (104)..(109): Xaa in position 104 to 109 is any amino acid
  Variant (111)..(111): Xaa in position 111 is any amino acid
  Variant (113)..(114): Xaa in position 113 to 114 is any amino acid
  Variant (117)..(124): Xaa in position 117 to 124 is any amino acid
  Variant (126)..(129): Xaa in position 126 to 129 is any amino acid
  Variant (131)..(164): Xaa in position 131 to 164 is any amino acid
  Variant (165)..(196): Xaa in position 165 to 196 is any or no amino acid
  Variant (198)..(219): Xaa in position 198 to 219 is any amino acid
  Variant (220)..(236): Xaa in position 220 to 236 is any or no amino acid
  Variant (238)..(239): Xaa in position 238 to 239 is any amino acid
  Variant (240)..(240): Xaa in position 240 is any or no amino acid
  Variant (243)..(243): Xaa in position 243 is any amino acid
  Variant (245)..(246): Xaa in position 245 to 246 is any amino acid
  Variant (248)..(248): Xaa in position 248 is any amino acid
  Variant (250)..(253): Xaa in position 250 to 253 is any amino acid
  Variant (255)..(255): Xaa in position 255 is any amino acid
  Variant (257)..(259): Xaa in position 257 to 259 is any amino acid
  Variant (260)..(262): Xaa in position 260 to 262 is any or no amino acid
  Variant (264)..(265): Xaa in position 264 to 265 is any amino acid
  Variant (268)..(268): Xaa in position 268 is any amino acid
  Variant (271)..(277): Xaa in position 271 to 277 is any amino acid
  Variant (281)..(288): Xaa in position 281 to 288 is any amino acid
  Variant (289)..(295): Xaa in position 289 to 295 is any or no amino acid
  Variant (297)..(301): Xaa in position 297 to 301 is any amino acid
  Variant (302)..(308): Xaa in position 302 to 308 is any or no amino acid
  Variant (310)..(311): Xaa in position 310 to 311 is any amino acid
AGXXXXXXXXXXXXXXXXXXXXXXXKXDXXXXXPXTXADXXXXXXXXXXLXXXXXXXXXXXXXXXXXXXXXXEEXXXXXXXXXXXXXXXXXWXXDPLDGTXEFXXXXXXFXVXXALXXXXXXXXGXXXXPXXXXXXXXXXXXXXXXXXXXXXXXXXXXXXXXXXXXXXXXXXXXXXXXXXXXXXXXXXXXXXXXXXSXXXXXXXXXXXXXXXXXXXXXXXXXXXXXXXXXXXXXXXGXXXLKXCXXAXGXXXXYXRXXXXXXTXXWDXAAXXXXXXXAGGXXXXXXXXXXXXXXXYXXXXXXXXXXXXNXXF

SEQ ID NO: 2455 - protein, 12 aa, Artificial sequence
  protein pattern
  Variant (2)..(2): Xaa in position 2 is Ile, Leu, Met or Val
  Variant (3)..(3): Xaa in position 3 is Ile, Leu or Val
  Variant (6)..(6): Xaa in position 6 is Ile, Leu, Met or Val
  Variant (10)..(10): Xaa in position 10 is any amino acid
  Variant (11)..(11): Xaa in position 11 is Asp, Glu, Gly, Asn or Gln
WXXDPXDGTXXF

SEQ ID NO: 2456 - protein, 22 aa, Artificial sequence
  protein pattern
  Variant (2)..(2): Xaa in position 2 is any amino acid
  Variant (4)..(4): Xaa in position 4 is any amino acid
  Variant (5)..(5): Xaa in position 5 is Ser or Thr
  Variant (7)..(7): Xaa in position 7 is Ile, Leu or Val
  Variant (9)..(9): Xaa in position 9 is any amino acid
  Variant (12)..(13): Xaa in position 12 to 13 is any amino acid
  Variant (14)..(14): Xaa in position 14 is Ala, Ser or Val
  Variant (15)..(17): Xaa in position 15 to 17 is any amino acid
  Variant (18)..(18): Xaa in position 18 is Ile, Leu or Val
  Variant (19)..(21): Xaa in position 19 to 21 is any amino acid
KXDXXPXTXADXXXXXXXXXXL

SEQ ID NO: 2457 - DNA, 1374 bp, Populus trichocarpa
  CDS (1)..(1374)
atggagaaggcatttaacagacaaaaagttcttcttgctcatctgcaacccacttctccttctcctcttctctctgcttcaatttgtgctgctggggacagtgctgcatatcaccggacagctgcttttggtgatgatattgtgattgtggctgcgtaccgtactgctatttgcaaagccaggcgtggtgggttcaaggatacctttcccgatgatctacttggatttgtattaaaggcagtggtagaaaaaacaaatgtgaatccaagtgaagttggggacatcgttgttggaaccgttctggcacctggttcagaaagagcaattgagtgcaggatggcagcgttttatgctggtttccctgatacggtgcccctcagaacagtgaacaggcaatgctcatctggcctccaggcagttgctgatgttgctgcatccataaaagcaggatattatgacattggtattgcagctgggttggagtgcatgacagtgaacggcattaggagtgttccccaagttaacccaagagtagaggcctttcaacaagcccgagattgtcttcttcctatgggtctgacttctgaaaatgttgctcagcgttatggcgtgacacgacaagaccaagatcaggctgctgttgattctcatagaaaagcggcagctgcaagagcatctggtaaattcaaagatgaaattatcccagttactacaaagattgtggacccagaaactggtatacagaaggttatcacaatttcagaggatgatggcattcgaccaaactcaaacctggcagagctgtccaggctgaaacctgcattcaaaaaggatggatccaccactgctggcaatgctagccaagtcagtgatggtgctggagctgtacttcttatgaaaagaagccttgctgcacagaagggacttccaattcttggagtgttcaggagttttgctgctgttggtgtagatcctgctgtaatgggtgtaggcccagctgctgcaattccagcggcagtgcaagctgctggacttgagcttaatgatattgacctgtttgaaataaatgaggcatttgcatcacaatatgtttattgtataaagaagctggagcttgaccctgagaaagttaatgtgaatggcggtgcaattgctcttgggcatcctttaggtgctacaggtgcccgctgtgttggaactcttctgaatgagatgaagcgtcgtgggaaagatagtcgctttggagtgatctcaatgtgcatagggtctggcatgggggctgctgctgttttcgagagaggagactgtgtcgacgcaccatgcaatgttcgaaaggtggaaagcaacgaccttctgtcaaaagatgctcgttag

SEQ ID NO: 2458 - protein, 457 aa, Populus trichocarpa
MEKAFNRQKVLLAHLQPTSPSPLLSASICAAGDSAAYHRTAAFGDDIVIVAAYRTAICKARRGGFKDTFPDDLLGFVLKAVVEKTNVNPSEVGDIVVGTVLAPGSERAIECRMAAFYAGFPDTVPLRTVNRQCSSGLQAVADVAASIKAGYYDIGIAAGLECMTVNGIRSVPQVNPRVEAFQQARDCLLPMGLTSENVAQRYGVTRQDQDQAAVDSHRKAAAARASGKFKDEIIPVTTKIVDPETGIQKVITISEDDGIRPNSNLAELSRLKPAFKKDGSTTAGNASQVSDGAGAVLLMKRSLAAQKGLPILGVFRSFAAVGVDPAVMGVGPAAAIPAAVQAAGLELNDIDLFEINEAFASQYVYCIKKLELDPEKVNVNGGAIALGHPLGATGARCVGTLLNEMKRRGKDSRFGVISMCIGSGMGAAAVFERGDCVDAPCNVRKVESNDLLSKDAR

SEQ ID NO: 2459 - DNA, 1506 bp, Zea mays
  CDS (35)..(1420)
ccaggagcgagcagccaaggaaacgagtcaagcaatggagaaggccgtcgacaggcagcgggtcctgctgcggcacctcaaccccgccgcggcggggagccccgccccgcccgccatctccgcaagcgcgtgcgcggcgggggacagcgcggcgtaccaccggaggccggccttcgccgacgacgtcgtcatcgtcgctgcttacaggacggcaatctgcaaggccaagagagggggtttcaaggatacctttgctgaggacctcttggttcctgtcttcaaggctttggtagacaagacgaagctggacccaagtgaagttggcgacattgttgttggtactgtcttagctcctggttcccagagggcaatcgaatgcagaatggctgcactgtatgctggtttccctgacactgttcctcttaagactgtaaacaggcagtgctcttctggccttcaggcagttgcagatgttgccactgctattaaagcagggctctatgacattggtattgctgctggtttggagtccatgacagtgaacaaagttagtcttgatggccaagcgaatcccaaagttgagctattttctcaagcacgtgattgtcttctcccaatgggcctcacatctgagaatgttgcacaccgttttggcataacacgactggaccaagatcaagctgctgttgagtcacatagaaaggctgctgccgcagcagctgctggtaaattcaaagaggaaattgtgccagttcatacaaagattgttgatccaaaaactggtgaggaaaagaagatcgtagtctctgcagatgatggaatccgagtggatacttctcttgcagtcctgtcaaaactcaaaccagcattttcaaaggatggcagcactactgctgggaatgcaagccaagtgagcgatggcgctggggccgtcttgctaatgagacgggatgttgctatgaagaagggtcttccagttcttggtgtctttaggacctttgccgctgttggagttgatccagctgtcatgggtattggtcctgccgttgcaatccctgcagcagtgaaagctgctggccttcagatggatgatattgatcttttcgaaatcaacgaggcttttgcatctcagtatgtctactgctgcaagaagttggaacttgatcctgctaaagtcaatgttaatggcggtgcaatggctcttggacatcctttgggtgctacaggtgcacggtgcgtcagtactcttctcaatgagatgaagcgccgcggcaaggattgccggttcggagtgatttctatgtgcataggttctgggatgggtgccgctgctgtgttcgagcggggagacggcgttgatgagctcaccaatgctcggggaatctcgacccacaactggctttccaaggacgccatgtaaagctacacccaccaaaatttgccggaactggtagcattgtttccagatcgctgtatggagcgaattgggcaataaaatgattttgt

SEQ ID NO: 2460 - protein, 461 aa, Zea mays
MEKAVDRQRVLLRHLNPAAAGSPAPPAISASACAAGDSAAYHRRPAFADDVVIVAAYRTAICKAKRGGFKDTFAEDLLVPVFKALVDKTKLDPSEVGDIVVGTVLAPGSQRAIECRMAALYAGFPDTVPLKTVNRQCSSGLQAVADVATAIKAGLYDIGIAAGLESMTVNKVSLDGQANPKVELFSQARDCLLPMGLTSENVAHRFGITRLDQDQAAVESHRKAAAAAAAGKFKEEIVPVHTKIVDPKTGEEKKIVVSADDGIRVDTSLAVLSKLKPAFSKDGSTTAGNASQVSDGAGAVLLMRRDVAMKKGLPVLGVFRTFAAVGVDPAVMGIGPAVAIPAAVKAAGLQMDDIDLFEINEAFASQYVYCCKKLELDPAKVNVNGGAMALGHPLGATGARCVSTLLNEMKRRGKDCRFGVISMCIGSGMGAAAVFERGDGVDELTNARGISTHNWLSKDAM

SEQ ID NO: 2461 - DNA, 1347 bp, Oryza sativa
  CDS (1)..(1347)
atggagaaggcgatcgatcgccagcgcgtcctcctcgcccacctcctcccctcctcctcctccgaccaatcgctcctctccgcgtcggcgtgcgccgccggggacagcgccgcctaccagaggacttccgcctacggggacgacgtcgtcgtcgtcgctgcctacaggacacccatatgcaaggccaagcgaggaggtttcaaggatacatacccagaggaccttcttactgttgttctaaaggctgttctggacaacactaagatcaaccctggtgaaattggtgacattgtagttggcacggtgctaggtccaggctcgcagcgtgcaatcgagtgcagggctgcggctttctatgctggagttcccgaaaacgttcctgttagaactgtcaaccggcaatgttcctctggattacaggcagtggctgatgttgccgcggccattaaagctgggttctacgacatagggattggtgcaggcctggaatccatgtcagtaaatgctatgggttgggaaggacaagtaaaccctaaagtaaatgaagtccagaaagcacaggattgtcttttgcccatggggataacgtccgaaaatgttgcgcaccgatatggtgtaacaagacaagagcaggatcaggctgctgctgagtctcataggagggctgctgcagccacagctgctgggaaattcaaagatgagattgttccggtgcctacaaagattgttgaccccaagactggagaggaaaagaaagttgtgatatcagttgatgatggaattaggccagggaccacagcatctggattggcaaagcttaaaccagttttccggaaggatggtaccacaactgcaggcaactctagtcaagtgagcgatggtgctggagctgttcttctcatgaggagggacgtagcgatgaagaagggacttcctattcttggtgttttcaggagctttgctgctgttggagtagatcctgctgttatgggtgttggtcctgcagtagcaataccagctgcagtgaagtctgctggactccagattgaagacattgatctgtttgaattgaatgaggccttcgcttcgcagttcgtgtattgctgcaacaagctgggactggacaggtcaaaagtaaacgtgaatggaggcgcaatcgccctaggacatcctcttggtgcaacaggtgcccggtgcgtcgcaactcttctgaatgaaatgaagcgccggggcagggactgcagattcggtgttgtcaccatgtgcattggatctggcatgggggcagcagctgtgtttgagcggggtgactcggtcgaccaattctcaaacgtgcgccaccattag

SEQ ID NO: 2462 - protein, 448 aa, Oryza sativa
MEKAIDRQRVLLAHLLPSSSSDQSLLSASACAAGDSAAYQRTSAYGDDVVVVAAYRTPICKAKRGGFKDTYPEDLLTVVLKAVLDNTKINPGEIGDIVVGTVLGPGSQRAIECRAAAFYAGVPENVPVRTVNRQCSSGLQAVADVAAAIKAGFYDIGIGAGLESMSVNAMGWEGQVNPKVNEVQKAQDCLLPMGITSENVAHRYGVTRQEQDQAAAESHRRAAAATAAGKFKDEIVPVPTKIVDPKTGEEKKVVISVDDGIRPGTTASGLAKLKPVFRKDGTTTAGNSSQVSDGAGAVLLMRRDVAMKKGLPILGVFRSFAAVGVDPAVMGVGPAVAIPAAVKSAGLQIEDIDLFELNEAFASQFVYCCNKLGLDRSKVNVNGGAIALGHPLGATGARCVATLLNEMKRRGRDCRFGVVTMCIGSGMGAAAVFERGDSVDQFSNVRHH

SEQ ID NO: 2463 - DNA, 1386 bp, Oryza sativa
  CDS (1)..(1386)
atggagaaggcgatcaacaggcagagggtgcttctcgcccacctggagcccgccgcgagtcccgccgccgccgcgccggccatcaccgcgagcgcgtgcgccgcgggggacagcgccgcgtaccaccgcggggcgtgcttcgcagacgacgtcgtcatcgtcgctgcctataggacagcaatttgcaagtccaagagaggtggtttcaaggatactcccgcagaggacctcttggttccagtattcaaggctttgatagataaaacgaagttgaacccaagtgaagttggtgatattgttgttggtactgttttagctcctgggtcccaaagggcaattgaatgcagaatggctgcattttatgctggattccctgataccgttcctcttatgactgtaaacaggcaatgttcgtctgggcttcaagcagttgcaaatgttgcttctaacattaaagcaggactttatgacattggtattgctgctggcctagagtccatgacagtgaaccaagttcgccttgatgggcaagtgaaccccaaagttgagctgttttctcaagcacgcgattgccttctcccaatgggcctcacgtccgagaatgttgcaaaacgatttggcataacacgaatggagcaagaccaggctgctgttgagtcccacaggaaggctgcggctgcagctgcttctggtaaattcaaggaagaaattgttccagttcacacgaagattgtggatccaaaaactggtgaggaaaaggagatagtggtctcggcagatgatggaatccgaccaggcacttcattggcagtcctgtcaaaactcaaaccagcattctctaaagatggcaccactactgctggaaacgctagccaagtaagcgatggtgctggagcagtcttactaatgagacgtgacattgctatgcaaaagggtcttccaatagttggcgtcttcaggagctttgcagcagttggagttgatccagctataatgggtgttggtcctgctgttgccatccctgcggcagtgaaagctgctggtcttcaaatagatgatgttgaccttttcgagattaatgaggcctttgcatcacagtacgtatactgctgcaagaagttgggacttgatcctgcaaaagttaacgttaacggaggtgcaatggctcttgggcatccattgggtgctacaggtgcacggtctgtcagtacccttctcaacgaaatgaagcgacggggcaaagactgtcgatttggtgtgatttccatgtgcataggttctggcatgggggctgctgctgtctttgagcgtggggatgcagtggatgagctcactaatgctcggtgcatcccgacccataaccggctttcgaaggacgccatgtaa

SEQ ID NO: 2464 - protein, 461 aa, Oryza sativa
MEKAINRQRVLLAHLEPAASPAAAAPAITASACAAGDSAAYHRGACFADDVVIVAAYRTAICKSKRGGFKDTPAEDLLVPVFKALIDKTKLNPSEVGDIVVGTVLAPGSQRAIECRMAAFYAGFPDTVPLMTVNRQCSSGLQAVANVASNIKAGLYDIGIAAGLESMTVNQVRLDGQVNPKVELFSQARDCLLPMGLTSENVAKRFGITRMEQDQAAVESHRKAAAAAASGKFKEEIVPVHTKIVDPKTGEEKEIVVSADDGIRPGTSLAVLSKLKPAFSKDGTTTAGNASQVSDGAGAVLLMRRDIAMQKGLPIVGVFRSFAAVGVDPAIMGVGPAVAIPAAVKAAGLQIDDVDLFEINEAFASQYVYCCKKLGLDPAKVNVNGGAMALGHPLGATGARSVSTLLNEMKRRGKDCRFGVISMCIGSGMGAAAVFERGDAVDELTNARCIPTHNRLSKDAM

SEQ ID NO: 2465 - DNA, 1392 bp, Glycine max
  CDS (1)..(1392)
atggagaaagcgatcaacagacagaagattttgcttcatcatctcaacccttcatcatccacccaccccaacgaatcatcctccctccatgcttcagcatgtgtggcgggggatagcgctgcttatcaaaggacatcgacattcggggacgatgttgtgatcgtggctgcttatcggactgctcattgcaaagctaaacgaggtggtttcaaagacactcttcctgatgatctactggctcctgttttgaaggctgtaattgagaaaaccaatgtgaacccaagtgaagttggggatattgttgtaggtagtgtattggctcctggagctcaaagagctagtgaatgccgaatggctgcattttatgctggttttcccgaaactgtgcctgttaggaccgttaataggcaatgttcatctgggctccaggctgtcgctgatgtagctgctgctataagggctgggttctatgacattggtattggtgccggtttggaatctatgaccactaatccaatgggatgggatggatcagtgaatcctaaggtaaaaatgtttgaacaagcacaaaactgccttcttcctatgggaattacctctgaaaatgttgcacagcgctttggggtttcaaggaaggaacaagaccaggctgcagttgagtctcacaggcgagctgctgcagctactgctgctggtaaatttaaagatgaaattgtcccagttaccaccaagattgtggacccaaaaaccggtgaggagaaatctgtcaccatttctgttgatgatggaattcgacctggcacaacagtgtctgatctaggaagactcaaacctgtgttcaagaaagacggaagcaccactgctggtaattctagccaggtgaccgatggggcttcagctgttctgctgatgaaaagaagtgttgcattgcaaaaggggctacccattcttggtgtattcaggacttttgcagcagttggtgttgatcctgccatcatgggtgttggccctgctgctgcaattcctgttgctgttaaggctgcaggtctagagcttgatgatattgatctttttgaaataaatgaggcatttgcctcccagttcgtgtattgccgtaacaagctagggcttgatccagaaaagatcaatgttaatggaggtgcaatggcaattgggcatcctctgggttcaacaggtgctcgatgtgttgcaactctgttgcatgaaatgaagaaacgtggcagggactgtcgatttggagttatatctatgtgcataggtactggaatgggggcagctgctgtttttgagagtggtgattgtgctgatgagctatgcaatgcccggaaagtggatgaccttcttttatccaaggatgctcgcttgaaatag

SEQ ID NO: 2466 - protein, 463 aa, Glycine max
MEKAINRQKILLHHLNPSSSTHPNESSSLHASACVAGDSAAYQRTSTFGDDVVIVAAYRTAHCKAKRGGFKDTLPDDLLAPVLKAVIEKTNVNPSEVGDIVVGSVLAPGAQRASECRMAAFYAGFPETVPVRTVNRQCSSGLQAVADVAAAIRAGFYDIGIGAGLESMTTNPMGWDGSVNPKVKMFEQAQNCLLPMGITSENVAQRFGVSRKEQDQAAVESHRRAAAATAAGKFKDEIVPVTTKIVDPKTGEEKSVTISVDDGIRPGTTVSDLGRLKPVFKKDGSTTAGNSSQVTDGASAVLLMKRSVALQKGLPILGVFRTFAAVGVDPAIMGVGPAAAIPVAVKAAGLELDDIDLFEINEAFASQFVYCRNKLGLDPEKINVNGGAMAIGHPLGSTGARCVATLLHEMKKRGRDCRFGVISMCIGTGMGAAAVFESGDCADELCNARKVDDLLLSKDARLK

SEQ ID NO: 2467 - DNA, 1338 bp, Glycine max
  CDS (1)..(1338)
atggagaaagcaattcaaagacagagagttctgcttgaacatcttcaacccatttcttcaagttcaaatttttcctctcaaacccatcaatctacggatctctcagcttcattatgttttgctgggaattcttcgcatggtcaaacaggtggatcagatgatgacgtggtgattgtagctgcatatcgtactgccatctgcaaagcaaagcgtgggggctttaaggatacccttccagatgaccttcttgccacagttctgaaggctgtaatagagaaaacaaatgtggaccctgcggaagttggagatattgtcgtgggcacagtactggcacctggatcagatagaggaattgagtgcagaatggctgccttttatgcaggtttcccagagactgtgcctcttcgaactgtcaatcggcagtgttcatctggacttcaggcggtttctgacgtagctgcctatataaaagccgggttctatgacattggtattggggctggactggagtctatgacagtagatcgtgtgaataggcttcccaacattaacccaaaggtagagacctttgcagaagcccgggattgtcttcttccaatgggaatcacttctgagaatgtagcacaacgttatggtgtgacaaggctagagcaagatcaggctgctgttgagtctcacaagcgagctgcagctgcaacagcagctggcaagttcaaagaagaaatcattccagtttctacaaagtttgtggaccctaaaactggagtggagaagaaaattattgtttctgtcgatgatggtatccggccaaacacaaatttagcagatttggcaaagctgaagcctgcattccagaaagatggaaccacgacagcagggaatgctagccaaattagtgatggtgcagcagctgtgctcctcatgaagagaagagtggctgtgcaaaaggggcttcctattcttggaatcttcaggagttttgctgctgttggagtagatcctgcagtcatgggtgttggccctgctgttgctatcccagctgcagtgaaatctgctggtcttgaacttggcaacattgacttatttgaaatcaatgaggcatttgcatcgcagtatgtttattgcctcaagaaattgggacttgatcccagaaaggtcaatgtcaatggtggtgccattgctcttggacatcctttgggcgttacaggtgcacgttgtgttgcaactttgttgaatgagatgaaacgcggtggcaaggattgtcgctttggtgtaatctcaatgtgcatagggtcaggtatgggagctgctgctgtatttgaaaggggggacttttaa

SEQ ID NO: 2468 - protein, 445 aa, Glycine max
MEKAIQRQRVLLEHLQPISSSSNFSSQTHQSTDLSASLCFAGNSSHGQTGGSDDDVVIVAAYRTAICKAKRGGFKDTLPDDLLATVLKAVIEKTNVDPAEVGDIVVGTVLAPGSDRGIECRMAAFYAGFPETVPLRTVNRQCSSGLQAVSDVAAYIKAGFYDIGIGAGLESMTVDRVNRLPNINPKVETFAEARDCLLPMGITSENVAQRYGVTRLEQDQAAVESHKRAAAATAAGKFKEEIIPVSTKFVDPKTGVEKKIIVSVDDGIRPNTNLADLAKLKPAFQKDGTTTAGNASQISDGAAAVLLMKRRVAVQKGLPILGIFRSFAAVGVDPAVMGVGPAVAIPAAVKSAGLELGNIDLFEINEAFASQYVYCLKKLGLDPRKVNVNGGAIALGHPLGVTGARCVATLLNEMKRGGKDCRFGVISMCIGSGMGAAAVFERGDF

SEQ ID NO: 2469 - DNA, 1377 bp, Fragaria x ananassa
  CDS (1)..(1377)
atggagaaagcgatcaacaggcagaaggttctcctcgaccatctccgaccttcttcttcttccgacgactcttctctctccgcgtcggtatgtgcggctggggatagcgctgcgtatgctaggaatcatgtctttggggacgatgtcgtcatcgttgcagcttttcgcactccactctgcaaggctaagcgtggcggcttcaagtatacttatgctgatgatctcctcgcacctgtcctcaaggccgtggttgagaaaaccaatctcaatcccaaggaagtcggggatattgttgtcggtaccgtcttggccccaggatctcagagagctagcgaatgcaggatggctgctttctatgctggcttccctgagactgtgccggttagaactgtgaacagacaatgttcgtctggcctccaagcagttgctgatgttgctgctgccattagagcagggttttatgatattggcattggtgctggtttggaatccatgactgcaaacccaatggcatgggaaggggatgttaatcctaaagtaaagatctttgaacaagcccagaattgccttcttcctatgggagtcacctcagaaaatgttgctcatcgttttggtgtttcaagacaggagcaagatcaggctgcagttgactctcatagaaaggcagctgctgctgctgctgctggtagatttaaagatgaaatcatccctgtggcaaccaagattgttgatccaaaatctggtgatgagaaacctgttacaatctctgttgatgatgggattcgaaacacaacattggcggacctagcaaagctgaagcctgtgtttaagaaagatgggaccaccactgctggtaattctagtcaagttagtgatggtgctggagctgttctcttgatgaagagaagtgttgccgaccaaaaaggattgccgattcttggtgtattcaggaattttgttgctgttggtgtggatcctgccatcatgggtgttggcccagctgctgcaattccagttgcagttaaggcagctggtttagagcttgatgatattgacctttttgagataaatgaggcttttgcatcccaatttgtgtattgccgtaacaagctgggacttgatccagaaaaaatcaatgttaacggaggtgcaatggccatcggccatccacttggtgcaacaggtgcccggtgtgttgccactcttttgcatgagatgaagcgtcgtggtaaagactgccgctatggagtgatctcaatgtgcataggcacagggatgggtgcagccgctgtttttgaaagaggagaccggaccgatgaactctgcaatgctcgcaaggttgaatcactcaacttcttatccaaggatgttcggtag

SEQ ID NO: 2470 - protein, 458 aa, Fragaria x ananassa
MEKAINRQKVLLDHLRPSSSSDDSSLSASVCAAGDSAAYARNHVFGDDVVIVAAFRTPLCKAKRGGFKYTYADDLLAPVLKAVVEKTNLNPKEVGDIVVGTVLAPGSQRASECRMAAFYAGFPETVPVRTVNRQCSSGLQAVADVAAAIRAGFYDIGIGAGLESMTANPMAWEGDVNPKVKIFEQAQNCLLPMGVTSENVAHRFGVSRQEQDQAAVDSHRKAAAAAAAGRFKDEIIPVATKIVDPKSGDEKPVTISVDDGIRNTTLADLAKLKPVFKKDGTTTAGNSSQVSDGAGAVLLMKRSVADQKGLPILGVFRNFVAVGVDPAIMGVGPAAAIPVAVKAAGLELDDIDLFEINEAFASQFVYCRNKLGLDPEKINVNGGAMAIGHPLGATGARCVATLLHEMKRRGKDCRYGVISMCIGTGMGAAAVFERGDRTDELCNARKVESLNFLSKDVR

SEQ ID NO: 2471 - DNA, 1651 bp, Glycine max
  CDS (48)..(1439)
gcttcttctttctttttttcaatttccaaatcacgaaactcaagaagatggagaaagcgatcaacagacagaagattttgcttcatcatctcaacccttcatcatccacccaccccaacgaatcatcctccctccatgcttcagcatgtgtggcgggggatagcgctgcttatcaaaggacatcgacattcggggacgatgttgtgatcgtggctgcttatcggactgctcattgcaaagctaaacgaggtggtttcaaagacactcttcctgatgatccactggctcctgttttgaaggctgtaattgagaaaaccaatgtgaacccaagtgaagttggggatattgttgtaggtagtgtattggctcctggagctcaaagagctagtgaatgccgaatggctgcattttatgctggttttcccgaaactgtgcctgttaggaccgttaataggcaatgttcatctgggctccaggctgtcgctgatgtagctgctgctataagggctgggttctatgacattggtattggtgccggtttggaatctatgaccactaatccaatgggatgggatggatcagtgaatcctaaggtaaaaatgtttgaacaagcacaaaactgccttcttcctatgggaattacctctgaaaatgttgcacagcgctttggggtttcaaggaaggaacaagaccaggctgcagttgagtctcacaggcgagctgctgcagctactgctgctggtaaatttaaagatgaaattgtcccagttaccaccaagattgtggacccaaaaaccggtgaggagaaatctgtcaccatttctgttgatgatggaattcgacctggcacaacagtgtctgatctaggaagactcaaacctgtgttcaagaaagacggaagcaccactgctggtaattctagccaggtgaccgatggggcttcagctgttctgctgatgaaaagaagtgttgcattgcaaaaggggctacccattcttggtgtattcaggacttttgcagcagttggtgttgatcctgccatcatgggtgttggccctgctgctgcaattcctgttgctgttaaggctgcaggtctagagcttgatgatattgatctttttgaaataaatgaggcatttgcctcccagttcgtgtattgccgtaacaagctagggcttgatccagaaaagatcaatgttaatggaggtgcaatggcaattgggcatcctctgggttcaacaggtgctcgatgtgttgcaactctgttgcatgaaatgaagaaacgtggcagggactgtcgatttggagttatatctatgtgcataggtactggaatgggggcagctgctgtttttgagagtggtgattgtgctgatgagctatgcaatgcccggaaagtggatgaccttcttttatccaaggatgctcgcttgaaatagttacttcatactcactatatttggtcatcaaataagaaatcacaataaagtctttttctatggtagtgataatgtcaaccactcctcaagcgtttaatcctttctacttattagacttgcattaatttgtgatatattttggacaattgtaaacatacacttaatttttcttctatatctttttcactccaaaaaaaaaaaaaaaaaaaaaa

SEQ ID NO: 2472 - protein, 463 aa, Glycine max
MEKAINRQKILLHHLNPSSSTHPNESSSLHASACVAGDSAAYQRTSTFGDDVVIVAAYRTAHCKAKRGGFKDTLPDDPLAPVLKAVIEKTNVNPSEVGDIVVGSVLAPGAQRASECRMAAFYAGFPETVPVRTVNRQCSSGLQAVADVAAAIRAGFYDIGIGAGLESMTTNPMGWDGSVNPKVKMFEQAQNCLLPMGITSENVAQRFGVSRKEQDQAAVESHRRAAAATAAGKFKDEIVPVTTKIVDPKTGEEKSVTISVDDGIRPGTTVSDLGRLKPVFKKDGSTTAGNSSQVTDGASAVLLMKRSVALQKGLPILGVFRTFAAVGVDPAIMGVGPAAAIPVAVKAAGLELDDIDLFEINEAFASQFVYCRNKLGLDPEKINVNGGAMAIGHPLGSTGARCVATLLHEMKKRGRDCRFGVISMCIGTGMGAAAVFESGDCADELCNARKVDDLLLSKDARLK

SEQ ID NO: 2473 - DNA, 1753 bp, Glycine max
  CDS (105)..(1496)
ggactcaaaagctcaataaatgcatccaagcgaacaaatcaaatctctctctcaatctagccttctttctttttttcaatttccaaatcacgaaactcaagaagatggagaaagcgatcaacagacagaagattttgcttcatcatctcaacccttcatcatctacccaccccaacgaatcatcctccctctatgcttcagcatgtgtggcgggggacagcgctgcttatcaaaggacatcgacattcagggatgatgttgtgatcgtggctgcttatcggactgctcattgcaaaggtaaacgtggtggtttcaaagacactcttcctgatgatctactggctcctgttttgaaagctgtaattgagaaaaccaatgtgaacccaagtgaagttggggatattgttgtaggtagtgtattggctcctggagctcaaagagctagtgaatgccgaatggctgcattttatgctggttttcccgaaactgtgcctgttaggaccgttaataggcaatgttcatctgggctccaggctgtcgctgatgtagctgctgctataagggctgggttctatgacattggtattggtgccggtttggaatctatgaccactaatccaatgggatgggatggatcagtgaatcctaaggtaaaaatgtttgaacaagcacaaaactgccttcttcctatgggaattacctctgaaaatgttgcacagcgctttggggtttcaaggaaggaacaagaccaggctgcagttgagtctcacaggcgagctgctgcagctactgctgctggtaaatttaaagatgaaattgtcccagttaccaccaagattgtggacccaaaaaccggtgaggagaaatctgtcaccatttctgttgatgatggaattcgacctggcacaacagtgtctgatctaggaagactcaaacctgtgttcaagaaagacggaagcaccactgctggtaattctagccaggtgaccgatggggcttcagctgttctgctgatgaaaagaagtgttgcattgcaaaaggggctacccattcttggtgtattcaggacttttgcagcagttggtgttgatcctgccatcatgggtgttggccctgctgctgcaattcctgttgctgttaaggctgcaggtctagagcttgatgatattgatctttttgaaataaatgaggcatttgcctcccagttcgtgtattgccgtaacaagctagggcttgatccagaaaagatcaatgttaatggaggtgcaatggcaattgggcatcctctgggttcaacaggtgctcgatgtgttgcaactctgttgcatgaaatgaagaaacgtggcagggactgtcgatttggagttatatctatgtgcataggtactggaatgggggcagctgctgtttttgagagtggtgattgtgctgatgagctatgcaatgcccggaaagtggatgaccttcttttatccaaggatgctcgcttgaaatagttacttcatactcactatatttggtcatcaaataagaaatcacaataaagtctttttctatggtagtgataatgtcaaccactcctcaagcgtttaatcctttctacttattagacttgcattaatttgtgatatattttggacaattgtaaacatacacttaatttttcttctatatctttttcactccaaattttctttctaaaaaaaaaattaattgatcatgacaaagggcttctggccgaatcatgctactt

SEQ ID NO: 2474 - protein, 463 aa, Glycine max
MEKAINRQKILLHHLNPSSSTHPNESSSLYASACVAGDSAAYQRTSTFRDDVVIVAAYRTAHCKGKRGGFKDTLPDDLLAPVLKAVIEKTNVNPSEVGDIVVGSVLAPGAQRASECRMAAFYAGFPETVPVRTVNRQCSSGLQAVADVAAAIRAGFYDIGIGAGLESMTTNPMGWDGSVNPKVKMFEQAQNCLLPMGITSENVAQRFGVSRKEQDQAAVESHRRAAAATAAGKFKDEIVPVTTKIVDPKTGEEKSVTISVDDGIRPGTTVSDLGRLKPVFKKDGSTTAGNSSQVTDGASAVLLMKRSVALQKGLPILGVFRTFAAVGVDPAIMGVGPAAAIPVAVKAAGLELDDIDLFEINEAFASQFVYCRNKLGLDPEKINVNGGAMAIGHPLGSTGARCVATLLHEMKKRGRDCRFGVISMCIGTGMGAAAVFESGDCADELCNARKVDDLLLSKDARLK

SEQ ID NO: 2475 - DNA, 1993 bp, Sorghum bicolor
  CDS (103)..(1494)
aatacttctccgaaacaaattctccggaacagcctcccccgcaacgacttccgcttccgcttccttggataaccacaccacctgccccgaccgccctcagccatggagaaggcgatcgatcggcagcgggtcctcctggcgcacctcctcccctccgcctccgcctccgcctcctccgcgcagcctcagcttgcggcgtcggcgtgcgcggccggggacagcgccgcctaccagaggacctcctccttcggggacgatgtcgtcgtcgtcgctgcgtaccggacgcccatatgcaaggccaagcgaggaggcttcaaggacacctacccagaggacctcctcactgttgttctcaaggctgttctggacaacactagaatcaatccagctgacattggtgacattgtggttggtacggtgcttggtcctggttcccagcgtgcaatcgagtgcaggacggctgcgttgtttgctggattccctgaaaccgttcctgttagaactgtcaaccgacaatgttcatctgggcttcaggcagtagccgacgtcgcggctgctataaaggctggttactatgacatagggattggtgctggtttggaatccatgtccataaattccatgggttgggaagggcaagttaacccaagaataactgaactccagaaagcacaggattgtcttctgcccatgggaattacttctgaaaatgtcgcccatcgatatggtgtaaccaggcaagagcaagaccaggctgctgctgagtctcataggagagctgctgcagccacggcctctggaaaattcaaggatgagatcgtccccgtgccaacaaagattgttgatcctaaaactggagaggagaagaaagttgtgatatcagttgatgatggggttaggccagggaccacagcatctggattggcaaaacttaaaccagtttttaaaaaggatgggactacaactgcaggcaattctagtcaagtgagtgatggtgctggagctgttcttctcatgaaaagatctgtggctctgaagaaaggacttcctattcttggtgttttcaggagctttgccgctgttggagtggatccagctgttatgggtgttggtcctgctgtggccattcctgctgcagtgaaatctgctggccttgagattggagacattgatctgtttgaactgaatgaggcctttgcctctcaatttgtttattgctgcaacaagttgggcctggaccgttccaaagtaaatgtaaacggaggcgcgattgcccttggacacccactgggtgcaacaggtgcccggtgtgtggctactcttctaaatgaaatgaagcgccggggcagagactgcagatttggcgttgtcaccatgtgtatcggatctggaatgggggcagcagctgtgttcgagcggggagatgctgtggatggactctccaacgtgagggacacccagacacaaaattttctgtcaagggatgcaaagtagaggtgcagaaaaatcatccatccgagagcaacataagcctgctacattagtactaatacgacatccgtatatttttttcttcacaaacactactctgtatacgacaaataaaagggcgtcatgcagtatcctcttgtagccacctaagatgcgaaatcagaaaagaaaagggccgggtgttgtagacagctcaatgttctgagcttgttctgttattgccttttgtctcagactgaacaaacagcaaaaatcttgctcgttgccttgtgtgtatttgaaccagaaggatgaagagcgcctttgtgcactgggctgattaaaatccccaatctgctgttgagacgcttgcttgctataccactgttgtctggcaatagtagttggccgcattttgtccagtgtgctggatggatgaactggtaaccgattcagcagtgtagcttatagttgtaggtgctgtttgttaagataggccatgcctgaaatggctccatcattt

SEQ ID NO: 2476 - protein, 463 aa, Sorghum bicolor
MEKAIDRQRVLLAHLLPSASASASSAQPQLAASACAAGDSAAYQRTSSFGDDVVVVAAYRTPICKAKRGGFKDTYPEDLLTVVLKAVLDNTRINPADIGDIVVGTVLGPGSQRAIECRTAALFAGFPETVPVRTVNRQCSSGLQAVADVAAAIKAGYYDIGIGAGLESMSINSMGWEGQVNPRITELQKAQDCLLPMGITSENVAHRYGVTRQEQDQAAAESHRRAAAATASGKFKDEIVPVPTKIVDPKTGEEKKVVISVDDGVRPGTTASGLAKLKPVFKKDGTTTAGNSSQVSDGAGAVLLMKRSVALKKGLPILGVFRSFAAVGVDPAVMGVGPAVAIPAAVKSAGLEIGDIDLFELNEAFASQFVYCCNKLGLDRSKVNVNGGAIALGHPLGATGARCVATLLNEMKRRGRDCRFGVVTMCIGSGMGAAAVFERGDAVDGLSNVRDTQTQNFLSRDAK

SEQ ID NO: 2477 - DNA, 1802 bp, Zea mays
  CDS (210)..(1595)
tccaaagaattcggcacgaccggctttccgtcggccctccgccccaaaacttcgtggtaaaacctccgcgatttcccttccccccggccccacccaccgcggcagtcgcctcccctcctacaaataacccccgaccctccacgaggacgggagtaccttctgcagcaagtagtgaccaggagcgagcagccaaggaaaggagtcaagcaatggagaaggccgtcgacaggcagcgggtcctgctgcggcacctgaaccccgccgcggcggccagccccgccccgcacgccatctccgcaagcgcgtgcgcggcgggggacagcgcggcgtaccaccggaggccggccttcgccgacgacgtcgtcatcgtcgctgcttacaggacggcaatttgcaaggccaagagagggggtttcaaggatacctttgctgaggacctcttggttcctgtcttcaaggctttggtagacaagacgaagctggacccaagtgaagttggcgacattgttgttggtactgtcttagctcctggttcccagagggcaatcgaatgcagaatggctgcactgtatgctggtttccctgacactgttcctcttaagactgtaaacaggcagtgctcttctggccttcaggcagttgcagatgttgccactgctattaaagcagggctctatgacattggtattgctgctggtttggagtccatgacagtgaacaaagttagtcttgatggccaagcgaatcccaaagttgagctattttctcaagcacgtgattgtcttctcccaatgggcctcacatctgagaatgttgcacaccgttttggcataacacgactggagcaagatcaagctgctgttgagtcacatagaaaggctgctgccgcagcagctgctggtaaattcaaagaggaaattgtgccagttcatacaaagattgttgatccaaaaactggtgaggaaaagaagatcgtaatctcagcagatgatggaatccgagtggatacttctcttgcagtcctgtcaaaactcaaaccagcattttcaaaggatggcagcactactgctgggaatgcaagccaagtgagcgatggcgctggggccgtcttgctaatgagacgggatgttgctatgaagaagggtcttccagttcttggtgtctttaggacctttgccgctgttggagttgatccagctgtaatgggtattggtcctgccgttgcaatccctgcagcagtgaaagctgctggccttcagatggatgatatcgatcttttcgaaatcaacgaggcttttgcatctcagtatgtctactgctgcaagaagttggaacttgatcctgctaaagtcaatgttaatggcggtgcaatggctcttggacatcctttgggtgctacaggtgcacggtgcgtcagtactcttctcaatgagatgaagcgccgcggcaaggattgccggttcggagtgatttctatgtgcataggttctgggatgggtgctgctgctgtgttcgagcggggagacggcgttgatgagctcaccaatgctcggggaatctcgacccacaactggctttccaaggacgccatgtaaagctacacccaccaaaatttgccggaactggtagcattgtttccagatcgctgtagggagcgaattggggaataaaatgattttgtatctgtcgcccctgctggggatttaggaagatttttacgccactggtattggaacttgcttacctggaaaaaaaaaaaaaaaaaaaaaaaaaaaaaaaactcgagaaaaggcgcgggtacc

SEQ ID NO: 2478 - protein, 461 aa, Zea mays
MEKAVDRQRVLLRHLNPAAAASPAPHAISASACAAGDSAAYHRRPAFADDVVIVAAYRTAICKAKRGGFKDTFAEDLLVPVFKALVDKTKLDPSEVGDIVVGTVLAPGSQRAIECRMAALYAGFPDTVPLKTVNRQCSSGLQAVADVATAIKAGLYDIGIAAGLESMTVNKVSLDGQANPKVELFSQARDCLLPMGLTSENVAHRFGITRLEQDQAAVESHRKAAAAAAAGKFKEEIVPVHTKIVDPKTGEEKKIVISADDGIRVDTSLAVLSKLKPAFSKDGSTTAGNASQVSDGAGAVLLMRRDVAMKKGLPVLGVFRTFAAVGVDPAVMGIGPAVAIPAAVKAAGLQMDDIDLFEINEAFASQYVYCCKKLELDPAKVNVNGGAMALGHPLGATGARCVSTLLNEMKRRGKDCRFGVISMCIGSGMGAAAVFERGDGVDELTNARGISTHNWLSKDAM

SEQ ID NO: 2479 - DNA, 1948 bp, Gossypium hirsutum
  CDS (80)..(1474)
cccccgcgtccgattatttttcctgcattttctccctcgccaaacagaaatcttagatcatttctagacgcagcgaacgatggagaaagcgatcaaccgacagcaagttttgcttcaacaccttaatccttcagcttcttctttttcgtcgcaccaaaacaactctgccctctctgcatcggcttgtttagctggagatagcgctgcttatctaagaactaatgtatttggagatgatgtggtgatagtagcagcatataggaccgcgctttgcaaatccaagcgagggggtttcaaggatacttatcctgatgatttacttgcacctgttttaacggcagtgatagagaaaacaaatttgaatcctagtgaagttggggatattgttgtgggaacggtcttggcaccaggatctcaacgagctagcgaatgtcggatggctgcattctatgctggcttccctgaaactgtgcctgttagaactgtgaacaggcaatgctcatccgggcttcaggcagttgctgatgtagccgcagcgataaaagcagggttttatgaaattggcattggagctgggttggaatctatgaccactaatccaatggcatgggaaggttcagttaacccaagggtgaagcaaatggagcaagctcagaattgtctccttcctatgggtattacgtcagagaacgttgctcatcgctttggtgtgacaaggcaggagcaggatcaggctgcggttgaatctcacaggaaagcagctgctgctacagcttctggtaaattcaaagatgaaatagtccctgtggccaccaagattgttgatccaaagactggtgatgagaaacctgtcacaatctctgttgatgatgggatccgagctaacacatcagtgtcagatctgggaaaattgaaacctgtattcaagaaaaatgggaccactactgctggaaattctagtcaagtgagtgatggtgctggagctgttctgcttatgaaaagaagtgttgcgatgcgcaaaggactgccaattcttggtgttttcaggacttttgctgctgttggtgtggatcctgctatcatgggtgttggcccagctgtggcaattccagcagcagttaaatctgctggtctagaacttgatgatgttgatctttttgagataaatgaggcatttgcatcccagttcgtatattgtcaaaagaagttggagctcgatccacaaaagattaatgtaaatggaggcgcaatggcaattggacatccattgggcgcaacaggtgctcgttgtgttgctacgcttctgcatgaaatgaagcgtcgtggcaaagactgccgattcggagtggtttcgatgtgcataggcacaggaatgggggcggcagcggtcttcgaaaggggtgattgtgttgatgagctgtgcaatgcccgaaaagttgaaactcacaatctcttatctaaggatgcccgataggatacctagttttcttgttaaaaatatcctaaatcgagttggaaaatttaataaagcaatgtaataagtcaccgatcatgttaccccagaaaagagtagtattcagacgttctggctattatctttcataaaattatatctcagctatataataagtgtcaacttctttgtttcttcagccccataatggaagtagatttcgttagcagtgcaactgatgttgatctcgaaatgattcgttttcgtaagcggtgggttattttttttgtaaccacaattgtgtagctgttatgcttagcaaaacctcaagaagattattaccattttatatgtcaaaatgagttgtttgaactttttaactttatagagatgatctgtcttaatcgctttagttatttttattgacttcagtatttatcaagttacttgcattcagcttacagatattataaacttttactggtattagctttc

SEQ ID NO: 2480 - protein, 464 aa, Gossypium hirsutum
MEKAINRQQVLLQHLNPSASSFSSHQNNSALSASACLAGDSAAYLRTNVFGDDVVIVAAYRTALCKSKRGGFKDTYPDDLLAPVLTAVIEKTNLNPSEVGDIVVGTVLAPGSQRASECRMAAFYAGFPETVPVRTVNRQCSSGLQAVADVAAAIKAGFYEIGIGAGLESMTTNPMAWEGSVNPRVKQMEQAQNCLLPMGITSENVAHRFGVTRQEQDQAAVESHRKAAAATASGKFKDEIVPVATKIVDPKTGDEKPVTISVDDGIRANTSVSDLGKLKPVFKKNGTTTAGNSSQVSDGAGAVLLMKRSVAMRKGLPILGVFRTFAAVGVDPAIMGVGPAVAIPAAVKSAGLELDDVDLFEINEAFASQFVYCQKKLELDPQKINVNGGAMAIGHPLGATGARCVATLLHEMKRRGKDCRFGVVSMCIGTGMGAAAVFERGDCVDELCNARKVETHNLLSKDAR

SEQ ID NO: 2481 - DNA, 1647 bp, Zea mays subsp. mays
  CDS (78)..(1463)
aaaagaacaaacccagttgaattttcccagaaagttttctcctttttttcttgaattaagcttaacagtgagaaaagatggagaaagccactgaaaggcagaagattctgattcgtcatctcaatccactttcttcttctccttctcttcctagcattaatgataataaacctactcttctctccgctgtgaactgtgctgctgagctttccccaatggctgccttcggagacgacgttgtgatcgttgcggcgtatcgcactgccatctgcaaagctaaacgtggagggttcaaagatactctcccagatgatcttcttgcttctgttctcaaggctgtggtggaaaggacgtctttggatccaagtgaagttggggatattgttgttggtaccgttatagctcctggctctcagagagccatggagtgtagagtagctgcttactttgctggctttcctgactctgtgccaatcagaactgtcaacagacaatgctcatcaggactacaagctgttgctgatgttgctgcttccatcagagctggatattacgacattggtattggtgctggagttgagtccatgtcgattgatcacactgctggaggtggctttcacacaacaaacccgagggcacaagagtttcgtggagctcgtgactgcttgcttccgatgggcataacttctgaaaacgtagcagaaagatactgtgtcacaagagaagatcaagacatggctgcggtggagtctcacaagcgtgcagcagctgcaaacgcgtctggtaaactaaaggatgagatagttcctgttgcgactaagattgttgaccctgatacaaaagcagagaagccaattgttgtttctgttgatgatggtgtacgtccaaactcaaacatggctgatcttgcaaagctgaagacagtctttaaacctaatggttcaaccacagcaggcaatgctagtcagattagtgatggtgctggagctgtactgctgatgaagaggagcttggcgatgaagaagggacttcccattcttggaatattcaggagctttgctgttactggtgtggatccagctgtaatgggtatcggtccagcttacgccattcccgctgcagccaaccttgcaggactcaaagttagcgatatcgatctatttgagatcaatgaggcatttgcatctcagtatgtgtactgttgcaagaagctagagctggatgtggaaaaggtcaatgttaatggaggggccattgctattggccatcctcttggtgctacaggagctcgatgtgttgcgacattgttgcatgagatgaaacggagagggaaagactgccgctttggagttatttcaatgtgcataggcactggtatgggagccgcagctgtgtttgagagaggagactctgttgatgacttgtccaatgcgcgtgtggagactaatgggagcggtcactagaacaaggttgaataaggacaagcaatgaaagcactaagtcaaataaaaaagtgtgaagcttaaacagctctttcacattgttgaacaatgaacaatttgtcattctgagtttaaaatgtatcaactagtaacttgtgagtgaacaaagagtcaaatctaaaaagcaaagttacatctttcaccg

SEQ ID NO: 2482 - protein, 461 aa, Zea mays subsp. mays
MEKATERQKILIRHLNPLSSSPSLPSINDNKPTLLSAVNCAAELSPMAAFGDDVVIVAAYRTAICKAKRGGFKDTLPDDLLASVLKAVVERTSLDPSEVGDIVVGTVIAPGSQRAMECRVAAYFAGFPDSVPIRTVNRQCSSGLQAVADVAASIRAGYYDIGIGAGVESMSIDHTAGGGFHTTNPRAQEFRGARDCLLPMGITSENVAERYCVTREDQDMAAVESHKRAAAANASGKLKDEIVPVATKIVDPDTKAEKPIVVSVDDGVRPNSNMADLAKLKTVFKPNGSTTAGNASQISDGAGAVLLMKRSLAMKKGLPILGIFRSFAVTGVDPAVMGIGPAYAIPAAANLAGLKVSDIDLFEINEAFASQYVYCCKKLELDVEKVNVNGGAIAIGHPLGATGARCVATLLHEMKRRGKDCRFGVISMCIGTGMGAAAVFERGDSVDDLSNARVETNGSGH

SEQ ID NO: 2483 - DNA, 1206 bp, Zea mays
  CDS (1)..(1206)
atggcttccgacggcatcggccccagagatgtatgtgttgttggggttgcacgcaccccaatgggcggtttccttggtgccttgtctcccttgcctgctacgaaacttggctctatagtaattcaagctgctctggaaagagcaaacgtggatccagccctcgtgcaggaggtctactttggaaacgtattgagtgctaatttggggcaagctcctgcaaggcaagctgctctgggtgccgggataccaaactctgttgtttgcaccactgttaacaaagtctgtgcatctggcatgaaagctactatgtttgcagcacagtcaattcaattgggtatcaatgatattgttgtggctggtggcatggaaagcatgtccaatgccccaaagtacattgctgaagctaggaaggggtctcgttttggtcatgacacacttgttgatgccatgcttaaggatgggctttgggatgtatacaatgattgtgccatgggaatgtgtgccgagctttgtgctgacaatcatgccctcacaagagaagaccaggatgcatttgctatccaaagcaacgagcgtggaattgctgctcgtgacagtggtgcttttgcatgggagattattccggttcaagttcctgttggtagaggaaaacccccaacattaattgaaagagatgaaagcctggataagtttgacccagtaaaactaaagaaacttcgcccaagtttcaaggagaatggtggtacagttacagctggaaatgcttctagtataagtgatggagctgctgcattagttttggtgagtgggcagaaggctcaagagcttggccttcaagtccttgcaaggatcaaaggttatgctgatgcagctcaagctccggagctttttacaaccactccagcacttgcaataccaaaggctatcgcaaatgctggattagagtcatcccgtgttgatttctatgagattaatgaagccttttcggctgttgcgcttgcaaatcaaaagcttcttggaattccttcagaaaagattaatgttcatggaggagctgtatctttaggacatcctctcgggtgcagtggtgctcgcattttggttacccttattggtgttctcagggcgaagagtggcaagatcggagttgctggtgtctgcaacggtggaggcggagcatcagctcttgttctggagctcgcataa

SEQ ID NO: 2484 - protein, 401 aa, Zea mays
MASDGIGPRDVCVVGVARTPMGGFLGALSPLPATKLGSIVIQAALERANVDPALVQEVYFGNVLSANLGQAPARQAALGAGIPNSVVCTTVNKVCASGMKATMFAAQSIQLGINDIVVAGGMESMSNAPKYIAEARKGSRFGHDTLVDAMLKDGLWDVYNDCAMGMCAELCADNHALTREDQDAFAIQSNERGIAARDSGAFAWEIIPVQVPVGRGKPPTLIERDESLDKFDPVKLKKLRPSFKENGGTVTAGNASSISDGAAALVLVSGQKAQELGLQVLARIKGYADAAQAPELFTTTPALAIPKAIANAGLESSRVDFYEINEAFSAVALANQKLLGIPSEKINVHGGAVSLGHPLGCSGARILVTLIGVLRAKSGKIGVAGVCNGGGGASALVLELA

SEQ ID NO: 2485 - DNA, 1254 bp, Saccharomyces cerevisiae
  CDS (1)..(1254)
atgtctcaaagactacaaagtatcaaggatcatttggtggagagcgccatgggtaagggtgaatcgaagaggaagaactcgttgctggagaaaagacccgaagatgtagttattgtggctgctaacaggtctgccatcggtaaaggttttaaaggtgccttcaaagatgtaaacacagactacttattatacaactttctcaatgagttcatcgggaggtttccggaacctttgagggctgatttgaacttaatcgaagaagttgcctgtggaaatgttctcaatgttggagccggtgctacagaacacagggctgcatgcttggcaagtgggattccctactcgacgccatttgtcgctttaaacagacaatgttcttcaggtttaacggcggtgaacgatattgccaacaagattaaggttgggcaaattgatattggtttggcgctgggagtggaatcaatgaccaataactacaaaaacgtcaatcccttgggcatgatctcctctgaagagctgcaaaaaaaccgagaagcgaagaaatgtctaataccaatgggcattactaatgagaatgttgccgctaatttcaagatcagtagaaaggatcaagacgagttcgctgcgaattcatatcaaaaagcttacaaggcgaaaaatgaggggcttttcgaagatgaaattttacctataaaattaccagatggctcaatttgccagtcggacgaagggccacgccctaacgtcactgcggagtcgctttcaagcatcaggcctgcctttatcaaagacagaggaaccacaactgcgggcaatgcatcccaggtctccgatggtgtggcaggtgtcttgttagcccgcaggtccgtagccaaccagttaaatctgcctgtgctaggtcgctacatcgattttcaaacagtgggggttccccctgaaatcatgggtgtgggccctgcatacgccataccaaaagtcctggaagctactggcttgcaagtccaagatatcgatatttttgaaataaatgaagcattcgcggcccaagcattatactgcatccataaactgggcatcgatttgaataaagtaaatccaagaggtggtgcaatcgcgttaggccatcccttgggttgtactggcgcaaggcaagtagctaccatactaagagaactgaaaaaggatcaaatcggggttgttagtatgtgtatcggtactggtatgggtgccgccgccatctttattaaagaatag

SEQ ID NO: 2486 - protein, 417 aa, Saccharomyces cerevisiae
MSQRLQSIKDHLVESAMGKGESKRKNSLLEKRPEDVVIVAANRSAIGKGFKGAFKDVNTDYLLYNFLNEFIGRFPEPLRADLNLIEEVACGNVLNVGAGATEHRAACLASGIPYSTPFVALNRQCSSGLTAVNDIANKIKVGQIDIGLALGVESMTNNYKNVNPLGMISSEELQKNREAKKCLIPMGITNENVAANFKISRKDQDEFAANSYQKAYKAKNEGLFEDEILPIKLPDGSICQSDEGPRPNVTAESLSSIRPAFIKDRGTTTAGNASQVSDGVAGVLLARRSVANQLNLPVLGRYIDFQTVGVPPEIMGVGPAYAIPKVLEATGLQVQDIDIFEINEAFAAQALYCIHKLGIDLNKVNPRGGAIALGHPLGCTGARQVATILRELKKDQIGVVSMCIGTGMGAAAIFIKE

SEQ ID NO: 2487 - DNA, 1197 bp, Saccharomyces cerevisiae
  CDS (1)..(1197)
atgtctcagaacgtttacattgtatcgactgccagaaccccaattggttcattccagggttctctatcctccaagacagcagtggaattgggtgctgttgctttaaaaggcgccttggctaaggttccagaattggatgcatccaaggattttgacgaaattatttttggtaacgttctttctgccaatttgggccaagctccggccagacaagttgctttggctgccggtttgagtaatcatatcgttgcaagcacagttaacaaggtctgtgcatccgctatgaaggcaatcattttgggtgctcaatccatcaaatgtggtaatgctgatgttgtcgtagctggtggttgtgaatctatgactaacgcaccatactacatgccagcagcccgtgcgggtgccaaatttggccaaactgttcttgttgatggtgtcgaaagagatgggttgaacgatgcgtacgatggtctagccatgggtgtacacgcagaaaagtgtgcccgtgattgggatattactagagaacaacaagacaattttgccatcgaatcctaccaaaaatctcaaaaatctcaaaaggaaggtaaattcgacaatgaaattgtacctgttaccattaagggatttagaggtaagcctgatactcaagtcacgaaggacgaggaacctgctagattacacgttgaaaaattgagatctgcaaggactgttttccaaaaagaaaacggtactgttactgccgctaacgcttctccaatcaacgatggtgctgcagccgtcatcttggtttccgaaaaagttttgaaggaaaagaatttgaagcctttggctattatcaaaggttggggtgaggccgctcatcaaccagctgattttacatgggctccatctcttgcagttccaaaggctttgaaacatgctggcatcgaagacatcaattctgttgattactttgaattcaatgaagccttttcggttgtcggtttggtgaacactaagattttgaagctagacccatctaaggttaatgtatatggtggtgctgttgctctaggtcacccattgggttgttctggtgctagagtggttgttacactgctatccatcttacagcaagaaggaggtaagatcggtgttgccgccatttgtaatggtggtggtggtgcttcctctattgtcattgaaaagatatga

SEQ ID NO: 2488 - protein, 398 aa, Saccharomyces cerevisiae
MSQNVYIVSTARTPIGSFQGSLSSKTAVELGAVALKGALAKVPELDASKDFDEIIFGNVLSANLGQAPARQVALAAGLSNHIVASTVNKVCASAMKAIILGAQSIKCGNADVVVAGGCESMTNAPYYMPAARAGAKFGQTVLVDGVERDGLNDAYDGLAMGVHAEKCARDWDITREQQDNFAIESYQKSQKSQKEGKFDNEIVPVTIKGFRGKPDTQVTKDEEPARLHVEKLRSARTVFQKENGTVTAANASPINDGAAAVILVSEKVLKEKNLKPLAIIKGWGEAAHQPADFTWAPSLAVPKALKHAGIEDINSVDYFEFNEAFSVVGLVNTKILKLDPSKVNVYGGAVALGHPLGCSGARVVVTLLSILQQEGGKIGVAAICNGGGGASSIVIEKI

SEQ ID NO: 2489 - DNA, 1332 bp, Arabidopsis thaliana
  CDS (1)..(1332)
atggaaaaagcaacggagagacaaaggatactgcttcgtcatcttcaaccttcgtcatcttccgacgcctctctctctgcctcagcttgcttgtccaaagacagtgctgcatatcaatatggagatgatgttgtcattgtcgcggcacaaaggactgcactttgcaaggcaaaacgtggcagcttcaaggatacatttccagacgagttgcttgcctctgtattgagagcattgatagagaaaactaatgtaaacccaagtgaagttggtgacattgtagtgggtactgttttgggaccaggatctcagagagccagtgaatgcaggatggctgcgttctatgctggtttccccgaaactgttcccatcagaaccgtgaacagacagtgttcatctgggcttcaggctgttgctgatgttgccgctgccataaaagctggtttttatgacattggtattggagctgggctggagtccatgacaactaatccaaggggatggaaaggatcagtcaacccaaatgtgaagaagtttgaacaagctcacaattgccttcttccaatgggtattacttcagaaaatgtagcacaccggtttaatgtttcaagggaggagcaggatcaagctgctgttgattctcacagaaaggctgcttctgctactgcttccggaaagtttaaggatgagataacccctgtaaaaaccaagattgttgacccaaagacaggtgatgagaaacccataacagtttctgtggatgatgggattcgacctaacacaaccctttccggacttgcaaagctgaagccagtgtttaaggaagacggaaccacaactgctgggaattctagccaattaagtgacggtgctggagctgttctccttatgaggagaaatgtcgcaatgcagaaaggccttcccattcttggtgtattcaggacattttctgcagttggtgtggacccagccatcatgggggttgggccagccgttgccattcctgctgcagtcaaggcagctggtttagaactcaatgacgtcgacttgtttgagattaacgaggcatttgcatctcagtttgtttattgtcggaacaagctcgggctagacgcggaaaagatcaatgtcaatggaggagccatagccattggacatcccttgggcgctacaggagccagatgcgttgcgacgctgctgcatgagatgaaacgacgtggtaaagactgtcgttttggcgtagtgtcaatgtgtataggttcgggaatgggagcagccgctgtgtttgagagaggaggcggtgtggatgagctctgtgatgtccggaaagtctaa

SEQ ID NO: 2490 - protein, 443 aa, Arabidopsis thaliana
MEKATERQRILLRHLQPSSSSDASLSASACLSKDSAAYQYGDDVVIVAAQRTALCKAKRGSFKDTFPDELLASVLRALIEKTNVNPSEVGDIVVGTVLGPGSQRASECRMAAFYAGFPETVPIRTVNRQCSSGLQAVADVAAAIKAGFYDIGIGAGLESMTTNPRGWKGSVNPNVKKFEQAHNCLLPMGITSENVAHRFNVSREEQDQAAVDSHRKAASATASGKFKDEITPVKTKIVDPKTGDEKPITVSVDDGIRPNTTLSGLAKLKPVFKEDGTTTAGNSSQLSDGAGAVLLMRRNVAMQKGLPILGVFRTFSAVGVDPAIMGVGPAVAIPAAVKAAGLELNDVDLFEINEAFASQFVYCRNKLGLDAEKINVNGGAIAIGHPLGATGARCVATLLHEMKRRGKDCRFGVVSMCIGSGMGAAAVFERGGGVDELCDVRKV

SEQ ID NO: 2491 - DNA, 1389 bp, Arabidopsis thaliana
  CDS (1)..(1389)
atggagaaagcgatcgagagacaacgcgttcttcttgagcatctccgaccttcttcttcttcttcgcacaattacgaggcttctctatctgcttctgcttgcttggctggggacagtgctgcatatcagaggacctctctctatggagatgatgttgtcattgtcgcggcacataggactccactatgcaagtccaaacgtggcaatttcaaggatacatatcccgatgatttgctcgcacctgttttgagggcattgatagagaagacgaatctaaacccaagtgaagtaggtgacattgttgtgggtactgttttggcacctggatctcagagagccagtgaatgcaggatggctgcgttctatgctggtttccctgaaaccgtggctgtcagaactgtgaatagacagtgctcatctgggcttcaggctgttgctgatgtagccgctgccattaaagcgggattttatgacattggtatcggggctggtttggagtccatgactaccaatccaatggcatgggaagggtcagtcaacccagcggtgaagaagtttgcacaagcgcagaattgtcttcttcctatgggtgttacgtcagaaaatgtagcacaacgctttggtgtctcaaggcaggagcaagatcaagctgctgttgactcgcacagaaaggcagctgctgctactgctgctggtaaattcaaggatgagatcattcctgttaagaccaagcttgttgacccgaagactggtgatgagaaacccattacagtttctgttgatgatggtatccgaccaaccacaactcttgcttctcttgggaagctgaagccagtgtttaagaaggatggcaccactactgctggaaattccagccaagtaagtgatggtgcaggagcggttctcctaatgaagagaagtgttgcaatgcaaaaaggacttcccgttcttggtgtattcaggacatttgctgcagttggtgttgaccctgcaatcatgggtatcggtccagcagttgccattcctgctgcagttaaggcggctggtttagaacttgatgacatcgacttgtttgagatcaatgaggcatttgcatctcagtttgtttattgccgtaacaaattgggacttgacccagagaaaatcaatgtcaacggaggtgcaatggccataggccatcctttgggcgctacaggagcgcgttgtgttgctacattgttgcacgagatgaaacgccgtggtaaagactgccgttttggagtagtgtcaatgtgcattgggacggggatgggtgcagcagctgtgtttgagagaggagatggagttgatgagcttcgcaacgcaaggaaagttgaagcgcaaggtcttttgtccaaggacgctcgctag

SEQ ID NO: 2492 - protein, 462 aa, Arabidopsis thaliana
MEKAIERQRVLLEHLRPSSSSSHNYEASLSASACLAGDSAAYQRTSLYGDDVVIVAAHRTPLCKSKRGNFKDTYPDDLLAPVLRALIEKTNLNPSEVGDIVVGTVLAPGSQRASECRMAAFYAGFPETVAVRTVNRQCSSGLQAVADVAAAIKAGFYDIGIGAGLESMTTNPMAWEGSVNPAVKKFAQAQNCLLPMGVTSENVAQRFGVSRQEQDQAAVDSHRKAAAATAAGKFKDEIIPVKTKLVDPKTGDEKPITVSVDDGIRPTTTLASLGKLKPVFKKDGTTTAGNSSQVSDGAGAVLLMKRSVAMQKGLPVLGVFRTFAAVGVDPAIMGIGPAVAIPAAVKAAGLELDDIDLFEINEAFASQFVYCRNKLGLDPEKINVNGGAMAIGHPLGATGARCVATLLHEMKRRGKDCRFGVVSMCIGTGMGAAAVFERGDGVDELRNARKVEAQGLLSKDAR

SEQ ID NO: 2493 - DNA, 1182 bp, Bacillus halodurans C-125
  CDS (1)..(1182): transl_table=11
ttgagagaagccgttatcgtcgctggtgcgcgaacaccagtgggaaaggcgaaaaatggaacgctcgccaatgttcggccagatgatttaggagcgttaaccgtaaaagaaacgttaaaacgagctggtgactttgatcccgctcgaatcgatgatgtcattattggctgcgctatgccagaagcagagcaaggcatgaatatggcacgaaacattgctgccctcgctggaatgcctcatactgttccggcaattacgatcaatcgttactgttcatcagggctgcaaagtatcgcctacggggcagaacgaattatgctcggccaaggggaagcgattgtcgccggtggagccgaatcgatgagcctcattccgatgggggggcatgtgatcgccccgaacccgacgcttgtggagaaccagcctgaatattacatgggaatgggacatacagccgaggaagtggccagtcgttttggagtctcacgagaagatcaggacgcctttgccgttgagagccataagcgagcggcaaaagcgattgaggaagggaaatttgcagacgaaatcgttccagttgatgtgacgcttcgtcacgtggatgacaaccataaacttgtagaaaaacatgtcacgttctccgtcgatgaaggagttaggcctgaaacgaacatggagaccctttctaccttgcgcccagcattccatgcaaaaggtacggtaacggctggaaatgcttcacaaatgagtgacggagcggccgctgtcttgcttatggatcgagaggttgctgaacgtgaaggcttaacaccagtcgtaaagtttcgttcatttgctgtggctggtgttgcgccagaaattatgggtgttggaccagtagaagcgattccgaaggctgttaaaatggcagggctcgatttatcggatattggtttatttgaattaaatgaagcgtttgcgtcgcaagccattcaagtgatccgtgggttaaatcttgatcatgacaaagtgaatgtcaatggtggagccattgctcttgggcacccactaggatgtacaggaacgaaactaacgctttcacttattcatgaaatgaaacgtcgcggcgaacagtttggcgttgtgacgatgtgtatcggcggcggtatgggcgctgctggtgtatttgaattaatcggttaa

SEQ ID NO: 2494 - protein, 393 aa, Bacillus halodurans C-125
MREAVIVAGARTPVGKAKNGTLANVRPDDLGALTVKETLKRAGDFDPARIDDVIIGCAMPEAEQGMNMARNIAALAGMPHTVPAITINRYCSSGLQSIAYGAERIMLGQGEAIVAGGAESMSLIPMGGHVIAPNPTLVENQPEYYMGMGHTAEEVASRFGVSREDQDAFAVESHKRAAKAIEEGKFADEIVPVDVTLRHVDDNHKLVEKHVTFSVDEGVRPETNMETLSTLRPAFHAKGTVTAGNASQMSDGAAAVLLMDREVAEREGLTPVVKFRSFAVAGVAPEIMGVGPVEAIPKAVKMAGLDLSDIGLFELNEAFASQAIQVIRGLNLDHDKVNVNGGAIALGHPLGCTGTKLTLSLIHEMKRRGEQFGVVTMCIGGGMGAAGVFELIG

SEQ ID NO: 2495 - DNA, 1164 bp, Escherichia coli O157:H7 EDL933
  CDS (1)..(1164): transl_table=11
atggaacaggttgtcattgtcgatgcaattcgcaccccgatgggccgttcgaagggcggtgcttttcgtaacgtgcgtgcagaagatctctccgctcatttaatgcgtagcctgctggcgcgtaacccggcgctggaagcggcggccctcgacgatatttactgggggtgtgtgcagcagacgctggagcagggttttaatatcgcccgtaacgcggcgctgctggcagaagtgccgcactctgtcccggcggttactgtcaatcgcttgtgtggttcatccatgcaggcactgcatgacgcagcacgaatgatcatgaccggcgatgcgcaggcatgtctggttggcggcgtggagcatatgggccatgtgccgatgagtcacggcgtcgattttcaccctggcctgagccgcaatgtcgccaaagcggcgggcatgatgggcttaacggcagaaatgctggcgcgtatgcacggtatcagccgtgaaatgcaggatgcctttgccgcgcggtcacacgcccgcgcctgggccgccacgcagtcgggcgcatttaaaaatgaaatcatcccaactggtggtcacgatgccgacggcgtcctgaagcagtttaattacgacgaagtgattcgcccggaaaccaccgtggaagccctcgccacgctgcgtccggcgtttgatccagtaaacggtacggtaacggcgggcacatcttctgcactttccgatggcgcagctgccatgctggtgatgagtgaaagccgcgcccatgaattaggtcttaagccgcgcgctcgtgtgcgttcgatggcggtcgttggttgtgacccatcgatcatgggttacggcccggttccggcctcgaagctggcgctgaaaaaagcggggctttctgtcagtgatatcggcgtgtttgaaatgaatgaagcctttgccgcgcagatcctgccatgtattaaagatctgggactaattgagcagattgacgagaagatcaacctcaacggtggcgcgatcgcgctgggtcatccgctgggttgttccggtgcgcgtatcagcaccacgctgctgaatctgatggaacacaaagacgttcagtttggtctggcgacgatgtgtatcggtctgggtcagggtattgcgacggtgtttgagcgggtttaa

SEQ ID NO: 2496 - protein, 387 aa, Escherichia coli O157:H7 EDL933
MEQVVIVDAIRTPMGRSKGGAFRNVRAEDLSAHLMRSLLARNPALEAAALDDIYWGCVQQTLEQGFNIARNAALLAEVPHSVPAVTVNRLCGSSMQALHDAARMIMTGDAQACLVGGVEHMGHVPMSHGVDFHPGLSRNVAKAAGMMGLTAEMLARMHGISREMQDAFAARSHARAWAATQSGAFKNEIIPTGGHDADGVLKQFNYDEVIRPETTVEALATLRPAFDPVNGTVTAGTSSALSDGAAAMLVMSESRAHELGLKPRARVRSMAVVGCDPSIMGYGPVPASKLALKKAGLSVSDIGVFEMNEAFAAQILPCIKDLGLIEQIDEKINLNGGAIALGHPLGCSGARISTTLLNLMEHKDVQFGLATMCIGLGQGIATVFERV

SEQ ID NO: 2497 - DNA, 1200 bp, Deinococcus radiodurans R1
  CDS (1)..(1200): transl_table=11
atgtctgaaaaaattgtcatcgtggcggccaagcgcacgcccatcggcagcttcatgggaagcctgaaagacgtgtcggcggtcgacctcggcgtcacggcggcgggcgcagtcctgagcggcgtgagcgacgaagtgaaggccgacattgccgacgtcatcgtgggctgcgtgctccaggcgggccagggcatgaacgtggcgcggcaggtggggcgcggcgccgggctgcccgacgcggtgccgggacagaccatcaaccgcatgtgcggcagtggtttgcagtcggtggtgagcgccattcagggcctcaagtccggcgacggccagatttacctcgcgggcggcaccgagtccatgagccgcgcgccctacctgctccccaaggcccgtgaaggctaccggctggggcacggcgagattctcgacaccatcctgaccgacggcctgaccgacgtgttccacaactaccacatgggcacgaccgccgagaacctcgccgagaaatacggcatttcccgtgaggaccaggacgccttcgcgctcgaatcacaaaagcgcgccgccgccgccatcgaaggcggatacttcggcgacgaagtggtgccggtggaagtcccgacccgcaagggcccggtgaccttcgacaaggacgagcacccccgcgccacgtcgctcgaagcgctcgccaagctgcggcccgccttcaagaaggacggcggcaccgtcacggcaggcaacgccagcggcatcaacgacggcgcggcgatggtgctcgtcaccaccgagagctacgcgcaggaacgcgggctgcctatcctggccgaggtgaagggctactcgaacgtgggcgtggacccggccatcatgggtatcggcccggcctacgcggtgccgctggcggtcaagcgggcggggctgtcgatgagcgacgtggacctcttcgaactcaacgaagccttcgccgcgcagagcctcgccgtgctgcgcgacctggggcagcagggggccgaggtggaccccgcccacgtcaacctgaccggcggcgcgattgcgctgggccaccccatcggcgcgtcgggtgcccgcgtgctgaccacgctgattcaccagttgcgccgcaccggcaaggaaaccggcgtggcgagcctgtgcatcggcggcggcatggggattgcgctggtgttgcaggcccgctga

SEQ ID NO: 2498 - protein, 399 aa, Deinococcus radiodurans R1
MSEKIVIVAAKRTPIGSFMGSLKDVSAVDLGVTAAGAVLSGVSDEVKADIADVIVGCVLQAGQGMNVARQVGRGAGLPDAVPGQTINRMCGSGLQSVVSAIQGLKSGDGQIYLAGGTESMSRAPYLLPKAREGYRLGHGEILDTILTDGLTDVFHNYHMGTTAENLAEKYGISREDQDAFALESQKRAAAAIEGGYFGDEVVPVEVPTRKGPVTFDKDEHPRATSLEALAKLRPAFKKDGGTVTAGNASGINDGAAMVLVTTESYAQERGLPILAEVKGYSNVGVDPAIMGIGPAYAVPLAVKRAGLSMSDVDLFELNEAFAAQSLAVLRDLGQQGAEVDPAHVNLTGGAIALGHPIGASGARVLTTLIHQLRRTGKETGVASLCIGGGMGIALVLQAR

SEQ ID NO: 2499 - DNA, 1209 bp, Agrobacterium tumefaciens str. C58
  CDS (1)..(1209): transl_table=11
atgaccgacgtttacatttacgaccatgtccgcactccgcgcggacgcggcaagaaggatggcagcctgcatgaggtgccttccgttcgcctggccgccaaaacgctggaagccatccgcgatcgtaacgggctcgacacctctgctgtcgatgacatcatcatgggctgcgtcgatcccgtcatggatgccggtgcggtgatcccgaaggctgccgccttcgaggccggttactccaacagggccccgggcatgcagatctcgcgcttctgcgcctcgggtctcgacgccatcaatttcgcggccggcaaggtcaaggcgggctcggacgatatcgtcattgccggtggcgtggaaagcatgtcgcgcgtcggcatgggcatgtcgggcggcgcttggtacatggatccctcggtgaacttccccgccttcttcatgccgcagggcgtttcggctgatctcatcgccaccaaatatggtttctcgcgtgacgacgtcgacgcctatgctgtcgaaagccagaagcgtgcggcgcatgcctgggaaaacggctatttcaacaagtccgtgattccggtgaaggaccagaacgggctgacgatcctcgaccgcgacgagcatatgcgccccggcacggacatgcaggcgttggcttcgctcaacccttccttccagatgccgggcgaaatgggcggtttcgaagccgttggcatcatggcgcatccggaagtggagcgtatcaactacgtgcaccatgcgggcaactcgtccggcatcgtcgatggcgctgccgccgtgctggtcggctccaaggcgggcggcgaggcgatgggcgtgaaaccgcgtgcccgcatcaaggctttcgccaatatcggctccgacccggcgctgatgctgaccggcccggtggatgtgaccgagaagcttctgaaaaagaccggcatgtcgattgccgatatcgatcttttcgaactcaacgaagccttcgccgccgtggtcctgcgttacatgcaggctttcgacatcagccacgaccggatgaacgtcaatggcggcgccatcgccatgggccatccgctgggtgccaccggggcgatgatcctcggcacggtactggatgagctggagcggcgcgatctgaacaccgcgctcgtcacgctctgcatcggcgcgggcatgggcacggcgacggttatcgagcgcgtttga

SEQ ID NO: 2500 - protein, 402 aa, Agrobacterium tumefaciens str. C58
MTDVYIYDHVRTPRGRGKKDGSLHEVPSVRLAAKTLEAIRDRNGLDTSAVDDIIMGCVDPVMDAGAVIPKAAAFEAGYSNRAPGMQISRFCASGLDAINFAAGKVKAGSDDIVIAGGVESMSRVGMGMSGGAWYMDPSVNFPAFFMPQGVSADLIATKYGFSRDDVDAYAVESQKRAAHAWENGYFNKSVIPVKDQNGLTILDRDEHMRPGTDMQALASLNPSFQMPGEMGGFEAVGIMAHPEVERINYVHHAGNSSGIVDGAAAVLVGSKAGGEAMGVKPRARIKAFANIGSDPALMLTGPVDVTEKLLKKTGMSIADIDLFELNEAFAAVVLRYMQAFDISHDRMNVNGGAIAMGHPLGATGAMILGTVLDELERRDLNTALVTLCIGAGMGTATVIERV

SEQ ID NO: 2501 - DNA, 1182 bp, Agrobacterium tumefaciens str. C58
  CDS (1)..(1182): transl_table=11
atgaccctgccttcaatcgtgattgccagcgccgcgcgcaccgccgtcggctctttcaacggccacttcgccaacacgcccgcccacgaacttggtgccaccgtcattagtgcggtgctggaacgtgccggcgtcgcggccaatgaagtggatgaggtcattctcggccaggtgctcatggcaggcgaggggcaaaacccggcgcggcaggcagcaatgaaggccggcattccgcaggaggcaaccgccttcggcatcaatcagctctgcggctctggcttgcgcgccgtggcgctgggcatgcagcagatcgtgacgggggatgcggccatcatcattgccggcggccaggaatccatgtccatggcgccgcattgcgcccatctacggggcggcgtgaagatgggcgacttcaagatgatagacacgatgatgaaggacggtctgaccgacgccttttacggatacccgatgggcatcactgccgaaaacatcgctcgccaatggcagctttcccgcgatgagcaggaccagttcgcagtcgcatcgcagaacaaggccgaagccgcgcagaacgccggtcgcttcactgacgagatcgtggctttcacggtaaagggccgcaaggccgatatcgtcatcgatgcggacgaacatatccgtcatggcgcatcgctcgaaaccatggccaagctgcgtcccgccttcgacaaggaaggcacggtcacggccggtaacgcctccggcctgaatgacggcgcagccgccacgcttctcatgtcggaacagcaagcggcaaagcgcggcatcaaaccgctagcgcgcatagcctcctgggcaacggccggcgttgatccgcagatcatgggcaccggtcccatccccgcctcccgcaaggcgctggccaaggccggctggtcgatcaacgatattggccttgtcgaggccaacgaggcctttgccgcccaatcctgcgcggtcgtgcgcgagctgggccttaaccctgacatcgtcaacgttaatggcggagcgattgccatcggccatccgatcggcgcttccggcgctcgcgtcctgaacacgctgattttcgaaatgcgtcgccgcaacgtatcgaggggtctcgcaacgctctgcatcggcggcggcatgggtgtcgccatgtgcatcgaggcgctctaa

SEQ ID NO: 2502 - protein, 393 aa, Agrobacterium tumefaciens str. C58
MTLPSIVIASAARTAVGSFNGHFANTPAHELGATVISAVLERAGVAANEVDEVILGQVLMAGEGQNPARQAAMKAGIPQEATAFGINQLCGSGLRAVALGMQQIVTGDAAIIIAGGQESMSMAPHCAHLRGGVKMGDFKMIDTMMKDGLTDAFYGYPMGITAENIARQWQLSRDEQDQFAVASQNKAEAAQNAGRFTDEIVAFTVKGRKADIVIDADEHIRHGASLETMAKLRPAFDKEGTVTAGNASGLNDGAAATLLMSEQQAAKRGIKPLARIASWATAGVDPQIMGTGPIPASRKALAKAGWSINDIGLVEANEAFAAQSCAVVRELGLNPDIVNVNGGAIAIGHPIGASGARVLNTLIFEMRRRNVSRGLATLCIGGGMGVAMCIEAL

SEQ ID NO: 2503 - DNA, 1206 bp, Agrobacterium tumefaciens str. C58
  CDS (1)..(1206): transl_table=11
atgaccgaagcctatatctgcgattatatccgcacgcccatcggccgcttcggtggcgcgttgtccccggtgcgggccgacgatctcggcgcgctgccgttgaaggcgctgatggagcgcaacgcttccgtcgattgggaggccgtcgaggatgtgatcttcggctgcgccaaccaggcgggcgaggacaaccgcaacgtcgcgcgcatgtcgctgctgctcgccggcctgccggtttccgtgaccgggacgaccatcaaccggctgtgcggctcgggcatggatgcggttatcgcggctgcgcgcgccatcaaatcgggcgaggcggaactgatgattgccggtggtgtggaaagcatgagccgcgcgcccttcgttttgccgaaggccgaaagcgccttttcgcgcaatgccgaaatctacgataccaccatcggctggcgtttcgtcaacccgctgatgaaggcgcaatatggcgtcgattccatgccggagacgggcgacaatgtcgcggtcgattatcaggtctcgcgtgaggatcaggatgcatttgccgtgcgcagccagcaaaaggcggcggatgcgcagaccaacggccgtctcgccagggaaatcgtcccggtgacgatcccgcagcgtaagggcgacccgcttgttgtcgccaaagacgaacatccgcgcgcgaccagtctcgaagcgctggcgaagctgaagccggtcaacaagcgcgatggcgcaacggtgacggcgggtaacgcgtcgggcgtcaatgacggcgcggccgccctcatcatcgcttcagcggaagcggcgagaaaatacggtctgacaccgattgcccgcattctcggcggtgccgccgccggcgtgccgccgcgcgtcatgggcatcggcccagcgccggcctcggccaagcttctggcacggctcggcttgaatcaggaacagctcgacgtgatcgaactgaacgaggccttcgccagccagggccttgccacactgcgccaactcggtattgccgatgacgatgagcgggtgaatgccaatggcggcgcgatcgcgctcggccatccgctcggcatgtcaggtgcccgcattgccggcacggcggcgctcgaactctcgctgagcggcaaacggcttgcgctcgccaccatgtgcatcggtgtcgggcagggtattgccgtggcgctggagcgggtctga

SEQ ID NO: 2504 - protein, 401 aa, Agrobacterium tumefaciens str. C58
MTEAYICDYIRTPIGRFGGALSPVRADDLGALPLKALMERNASVDWEAVEDVIFGCANQAGEDNRNVARMSLLLAGLPVSVTGTTINRLCGSGMDAVIAAARAIKSGEAELMIAGGVESMSRAPFVLPKAESAFSRNAEIYDTTIGWRFVNPLMKAQYGVDSMPETGDNVAVDYQVSREDQDAFAVRSQQKAADAQTNGRLAREIVPVTIPQRKGDPLVVAKDEHPRATSLEALAKLKPVNKRDGATVTAGNASGVNDGAAALIIASAEAARKYGLTPIARILGGAAAGVPPRVMGIGPAPASAKLLARLGLNQEQLDVIELNEAFASQGLATLRQLGIADDDERVNANGGAIALGHPLGMSGARIAGTAALELSLSGKRLALATMCIGVGQGIAVALERV

SEQ ID NO: 2505 - DNA, 1239 bp, Agrobacterium tumefaciens str. C58
  CDS (1)..(1239): transl_table=11
atggcagtcgcggtctggaggagatcgcgatggtggtcgttttctcaagcgagaggatggccaagggaggtgaatttggctgtgcatgaccctgtcgtgatcgtcggggccgcccgtactgctatgggtgggttccagggcgaattcaaatcggtggccgcgcccgatctcggggccgcggcgatccgtgcggccgtcgaacgggcggctattccggtttctgacattgatgatgtgctgatgggctgtgtgctcacggccgggcaggggcaggctccggccagacaggcggccattgccgccggtgtcccgaattccgtgggcgcaacgaccatcaacaagatgtgtggctcgggcatgaaggcgatcatgctggggcatgaccagatcgcggcgggaagctcttccatcgtgcttgcgggcggcatggaaagcatgagcaatgcgccttatctgctggatcgcgcccggaacggctatcgtctcggccatggcaaggtcatcgaccatatgtttctcgatggtctcgaagatgcctatgacaagggccggttgatgggcactttcgcggaagattgcgctgaagcctaccagttcacccgcgcaatgcaggatgactatgcgctgacctcgcttgaacgggcgcgacgcgccatagcggaaggcgcattccaagcggaaatcgcgcctgttggtgatgttgccgtggacgagcagccgggcaaggcaaagccggaaaaaattccgcagctgaagcccgcctttcgcgatggcggaacggtgacggcggcgaattccagttccatttctgatggtgcggccgctcttgttctcatgcgcagatcggaagcagaacgacggggccgttcaccgctggcaaccattatcggtcaggcctcgcatgccgatgcacctgccggatatccgaccgcgcccatcggcgcgattaaaaagctgttcgaaaaaaacggctgggccgcgaaggacgtcgatctgttcgaaatcaacgaggcctttgcggtcgtggccatggcagcgatgcgcgatctcgatctgccgcatgagaaggtgaatgtgcatggcggcgcctgcgcgcttggccacccgatcggcgcttccggcgcgaggatcgtcgtcaccttgctggcggcccttcaacgccacgggctgaaacggggcgtggccgccgtctgtatcggcggcggtgaagcaaccgcgctcggtatcgagcggcattga

SEQ ID NO: 2506 - protein, 412 aa, Agrobacterium tumefaciens str. C58
MAVAVWRRSRWWSFSQARGWPREVNLAVHDPVVIVGAARTAMGGFQGEFKSVAAPDLGAAAIRAAVERAAIPVSDIDDVLMGCVLTAGQGQAPARQAAIAAGVPNSVGATTINKMCGSGMKAIMLGHDQIAAGSSSIVLAGGMESMSNAPYLLDRARNGYRLGHGKVIDHMFLDGLEDAYDKGRLMGTFAEDCAEAYQFTRAMQDDYALTSLERARRAIAEGAFQAEIAPVGDVAVDEQPGKAKPEKIPQLKPAFRDGGTVTAANSSSISDGAAALVLMRRSEAERRGRSPLATIIGQASHADAPAGYPTAPIGAIKKLFEKNGWAAKDVDLFEINEAFAVVAMAAMRDLDLPHEKVNVHGGACALGHPIGASGARIVVTLLAALQRHGLKRGVAAVCIGGGEATALGIERH

SEQ ID NO: 2507 - DNA, 1176 bp, Bacillus subtilis subsp. subtilis str. 168
  CDS (1)..(1176): transl_table=11
atgaaagaggcagtcattgtgtcaggtgcaagaacaccggttggaaaagcaaaaaaaggatcgttggccaccgttcgcccggatgatttgggagcgatttgtgtaaaagaaacgctgaaacgggcaggcggctacgaaggcaatattgatgacttgattatcggctgtgcaacacctgaagcggagcaggggcttaatatggcgagaaatatcggtgcgctcgcgggcctgccgtacacggttccggcgattacagttaaccgctattgctcttcaggccttcagtctattgcgtatgcagcagaaaaaattatgctgggcgcctacgatacagcgatcgccggcggagcagaatccatgtcgcaagttccgatgatggggcatgttacccgtccgaaccttgctttggcagaaaaggcaccggaatattatatgagcatggggcacacagccgagcaagtcgcgaaaaaatacggcgtctcccgtgaggatcaagacgcgtttgccgttcgcagccatcaaaacgccgctaaagcccttgcagaaggaaaatttaaagatgaaattgtacccgtcgaagtgacggtgacagaaatcggagaagaccataagcctatggaaaaacagtttgtgttttctcaggatgaaggtgttcgcccgcaaacgactgcagacatcttatcgacattgcgcccggccttttccgttgacgggacggtgactgcgggcaattcctcacaaacgagtgacggagcggcggctgtcatgctgatggaccgggaaaaagccgatgctcttggcctggcgccgcttgtgaaattccgctcctttgcggtaggcggcgtgccgccggaagtgatgggaatcggaccggtggaagcgattccgcgcgctttgaagcttgccggacttcagctgcaggacatcggcttgtttgaactgaatgaagcttttgcctcacaggccattcaagtaatcagggaattgggaattgatgaagaaaaagtgaatgtcaacgggggcgcaatcgcgcttggacacccgcttggctgtacgggcacaaagcttacactctcactcatccatgaaatgaaacggagaaacgagcaatttggagtcgtgaccatgtgtatcggcggcggaatgggagcggccggtgtatttgaattatgctaa

SEQ ID NO: 2508 - protein, 391 aa, Bacillus subtilis subsp. subtilis str. 168
MKEAVIVSGARTPVGKAKKGSLATVRPDDLGAICVKETLKRAGGYEGNIDDLIIGCATPEAEQGLNMARNIGALAGLPYTVPAITVNRYCSSGLQSIAYAAEKIMLGAYDTAIAGGAESMSQVPMMGHVTRPNLALAEKAPEYYMSMGHTAEQVAKKYGVSREDQDAFAVRSHQNAAKALAEGKFKDEIVPVEVTVTEIGEDHKPMEKQFVFSQDEGVRPQTTADILSTLRPAFSVDGTVTAGNSSQTSDGAAAVMLMDREKADALGLAPLVKFRSFAVGGVPPEVMGIGPVEAIPRALKLAGLQLQDIGLFELNEAFASQAIQVIRELGIDEEKVNVNGGAIALGHPLGCTGTKLTLSLIHEMKRRNEQFGVVTMCIGGGMGAAGVFELC

SEQ ID NO: 2509 - DNA, 1311 bp, Salmonella enterica subsp. enterica serovar Typhimurium str. LT2
  CDS (1)..(1311): transl_table=11
atgcgtcaggctttaccgttggtcacccgccagggcgatcgcattgctattgtcagtgggttacgaacccccttcgctcgtcaggccactgcatttcatggtattcccgctgttgatctcggcaagatggtggtaggcgagctgctggcgcgcagtgaaattccagccgatgccattgagcaactggtttttggtcaggtagtacaaatgccggaagcccccaatattgcgcgcgaaattgtgctgggtacggggatgaatgttcataccgatgcctatagcgtaagccgcgcctgcgccaccagttttcaggcggtagcgaatgtggcggaaagcctgatggccggcacgatacgcgccggtatcgctggcggcgcagattcgtcgtcggtactgccaataggcgtgagtaaagccctggcgcgggtactggttgatgtcaataaagcccggacgacccgccaacggctgacgcttttttctcgtctgcgcttacgcgacctgctgcccgttcctcccgccgttgctgagtattccaccggtctgcgcatgggcgataccgccgaacagatggcgaaaacgtatggtattacgcgtgaacagcaggacgcgctggcgcatcgttcacatcagcgcgccgcgcaggcatgggcggagggcaaactggcggaagaagtgatgacgacctatgtgccgccgtataaaaacccctttgcagaagacaacaacattcgcggcgcctccacgctggcggactacgctaaactgcgtcccgcttttgaccgaaaacatggctccgtaaccgccgccaacagtacaccgctgaccgacggcgctgccgccgttattctgatgaccgaatcccgcgctaaagagctggggctgcgcccgcttggttatctgcgcacgtacgcctttaccgctattgatgtctggcaggacatgctattggggccggcctggtcaacgccgctggcgctggagcgggccgggttgacgatggccgatctgacgctttttgacatgcatgaagcgtttgccgctcagactctggcgaacttacaactgctgggcagcgaacgatttgcccgtgaggtgcttggttgtgcgcaggcgacaggggaggtggatgacgctaaattcaacgtgctcggcggctcaatcgcctacgggcatccttttgccgcaacgggcgcgcggatgataacccaaacgttgcatgaattacggcgtcggggcggaggttttggcctggtcacggcctgcgcggctggcggtcttggcgcggcgatggttctggaggcggaataa

SEQ ID NO: 2510 - protein, 436 aa, Salmonella enterica subsp. enterica serovar Typhimurium str. LT2
MRQALPLVTRQGDRIAIVSGLRTPFARQATAFHGIPAVDLGKMVVGELLARSEIPADAIEQLVFGQVVQMPEAPNIAREIVLGTGMNVHTDAYSVSRACATSFQAVANVAESLMAGTIRAGIAGGADSSSVLPIGVSKALARVLVDVNKARTTRQRLTLFSRLRLRDLLPVPPAVAEYSTGLRMGDTAEQMAKTYGITREQQDALAHRSHQRAAQAWAEGKLAEEVMTTYVPPYKNPFAEDNNIRGASTLADYAKLRPAFDRKHGSVTAANSTPLTDGAAAVILMTESRAKELGLRPLGYLRTYAFTAIDVWQDMLLGPAWSTPLALERAGLTMADLTLFDMHEAFAAQTLANLQLLGSERFAREVLGCAQATGEVDDAKFNVLGGSIAYGHPFAATGARMITQTLHELRRRGGGFGLVTACAAGGLGAAMVLEAE

SEQ ID NO: 2511 - DNA, 1179 bp, Salmonella enterica subsp. enterica serovar Typhimurium str. LT2
  CDS (1)..(1179): transl_table=11
atgaaagaggttgtgatagtgggggctttacggacacccatcggctgttttcagggaacgctggcccgtcattccgccgtcgagctggggagcatggtcgtaaaagcgttaattgagcgcaccggcgtggacgctaacgctatcgatgaggtcatcctcggtcaggtactgacggctggcgccgggcagaatccggcgcgccagtcagccatcaaaggagggctgccgactaccgtttccgctattaccattaatgacgtttgtggttccggtttaaaagcgttgcacctggcgacgcaggctattcagtgcggcgaagcggacattgttattgcgggcgggcaggagaatatgagccgtgcgccgcatgtcctcaatgacagccgtagcggcgcgttgcctgatgccgacaatctggtggatagtctggtacatgatggcttatgggatgccttcaacgattatcacattggcgtgacggcagaaaacctggcgcgggaatatggcatcagccgcgagttacaggatgcttatgcgctcagttcgcagcaaaaagccagggccgcgattgataccggacgttttaaagatgagattgtccccatcgtcacgcaacgtaatgggcagaccgcaattgtcgatacggatgaacaaccgcgggccgacgccagtgcggaggggttagccctgctgcatccggcgtttgatagtttaggttcggtgacggcgggtaatgcctcctcaatcaacgatggcgccgccgcggtgatgatgatgagcgaggcgaaagcccaggcgctggggctgccggtgctggcgcgcatccgcgcgtttgccagcgtcggcgtcgatcctgcgctaatggggattgcgccggtatatgctacccggcgctgtctggagcgtgccggctggcaactgacggaggtcgaccttatcgaagccaacgaagcgtttgccgcccaggcgttatcggtaggaaaaatgctggaatgggatgagcgacgggtaaacgttaatggcggcgcgattgcgctggggcatcccattggcgcttccggctgtcgaattctggtttcactggtgcacgaaatggttaaacgcgacgcgcgtaaaggcctggcgacgctgtgtatcggtggcggtcagggcgttgctttaaccattgaacgcgactga

SEQ ID NO: 2512 - protein, 392 aa, Salmonella enterica subsp. enterica serovar Typhimurium str. LT2
MKEVVIVGALRTPIGCFQGTLARHSAVELGSMVVKALIERTGVDANAIDEVILGQVLTAGAGQNPARQSAIKGGLPTTVSAITINDVCGSGLKALHLATQAIQCGEADIVIAGGQENMSRAPHVLNDSRSGALPDADNLVDSLVHDGLWDAFNDYHIGVTAENLAREYGISRELQDAYALSSQQKARAAIDTGRFKDEIVPIVTQRNGQTAIVDTDEQPRADASAEGLALLHPAFDSLGSVTAGNASSINDGAAAVMMMSEAKAQALGLPVLARIRAFASVGVDPALMGIAPVYATRRCLERAGWQLTEVDLIEANEAFAAQALSVGKMLEWDERRVNVNGGAIALGHPIGASGCRILVSLVHEMVKRDARKGLATLCIGGGQGVALTIERD

SEQ ID NO: 2513 - DNA, 1164 bp, Salmonella enterica subsp. enterica serovar Typhimurium str. LT2
  CDS (1)..(1164): transl_table=11
atggaacaggttgtcattgtcgatgctattcgcaccccgatgggccgttcgaagggcggcgcgtttcgcaacgtgcgagcagaagatctctccgcccacttaatgcgtagcctgctggcgcgtaatccgtcgcttacagcggcgaccctcgatgatatttactggggctgcgtacaacaaacgctggagcaaggcttcaacattgcccgtaacgccgcgctgctggcagaaattccccattcggtaccggcggtcaccgtcaaccgtctgtgtggttcctcgatgcaggcgttacacgatgcagcgcgaatgatcatgaccggcgatgcgcaggtttgtctggttggcggcgtggagcatatggggcacgtgccgatgagccacggcgtggattttcacccgggtctgagtcgcaacgtcgccaaagcggcagggatgatggggctaacggcggaaatgctctcccgcctgcacggcattagccgggaaatgcaggaccagttcgccgcgcgttctcacgctcgcgcctgggccgccacccagtctggcgcattcaaaacggagattatcccgactggcggtcatgatgcagacggcgtgttgaagcagtttaactacgatgaagtgatccgcccggaaaccacggtcgaagcgctatcaacgctgcgtccggcatttgatccggttagtggcacggtcacggcgggcacctcatccgcgctttccgatggcgcagccgccatgctggtaatgagcgaaagtcgtgcccgtgagctgggtctgaaacctcgcgcccgtattcgctcaatggcagtggtgggttgtgatccgtcaattatgggttacgggccggttccggcgtcaaaactggcgttgaaaaaagcgggactgtcagccagcgatatcgatgtgtttgagatgaacgaagcgtttgccgcacagatcctgccatgcattaaggatctgggattgatggagcagatagacgagaagatcaacctcaacggcggtgcgatcgcgcttggtcatccgctcggctgctccggagcacgtatcagcaccacgcttatcaacctgatggagcgcaaagacgcgcagtttggtctggcgacgatgtgtattggtctgggtcagggcatcgccacggtgtttgagcgggtttaa

SEQ ID NO: 2514 - protein, 387 aa, Salmonella enterica subsp. enterica serovar Typhimurium str. LT2
MEQVVIVDAIRTPMGRSKGGAFRNVRAEDLSAHLMRSLLARNPSLTAATLDDIYWGCVQQTLEQGFNIARNAALLAEIPHSVPAVTVNRLCGSSMQALHDAARMIMTGDAQVCLVGGVEHMGHVPMSHGVDFHPGLSRNVAKAAGMMGLTAEMLSRLHGISREMQDQFAARSHARAWAATQSGAFKTEIIPTGGHDADGVLKQFNYDEVIRPETTVEALSTLRPAFDPVSGTVTAGTSSALSDGAAAMLVMSESRARELGLKPRARIRSMAVVGCDPSIMGYGPVPASKLALKKAGLSASDIDVFEMNEAFAAQILPCIKDLGLMEQIDEKINLNGGAIALGHPLGCSGARISTTLINLMERKDAQFGLATMCIGLGQGIATVFERV

SEQ ID NO: 2515 - DNA, 1185 bp, Caenorhabditis elegans
  CDS (1)..(1185)
atggcaggaaaatgtgtgttcatcgtcggtgccaagcgtacagcattcggaacttttggtggaaagctgaaaggattgagtgcaactgatttgggagtcgtcgcttctcaagcagcgctgaagcacgctaatgttggagcagatgccgtcgatcatgtcatctttggaaacgtggttgccagctctcgtgatggaatttacctgagtcgtcacattggactcaaatctggagttccacaaaacgtcggggccctcactgtcaaccgtctctgtggttcgggattccaagcagtcgtgaatgcagctcaagctatcaagctcggcgagtccaacattgttcttgccggaggaaccgaaaacatgtcaatggtgccattcgctgttcgagatattcgtttcggaactgcacttggaaagaagtacgaattcgaagatatgctctgggattctctcagcgatccgtatgccaagttagccatgggacagactgcagagaagttgggcgcacaatacaaagttaccagacaagaagccgacgaattcgctctgagatctcagaccctgtggaagaaggctcaggaggctggtgtctacaagaatgaaatcgttggaatcactatcaaggggcgcaagggagaagaaagcttcgaaatcgacgagcatccgagagccaccaccgcagaaagccttgccaagctgaagcctgttttccaaaaagacggactagtgaatgcaggaaatgcgtctggaatttctgacggagccgctgctcttgtggttgccggtgaagacagtgtgaagtcgaagaatctgaaaccgttggctcgagttgttgcctattctgctgtcggttgtgatccaaccatcatgggaatcggaccggctccagctattcgggaagttctcaagaagagtgggctcaagattggagatattgatatcttcgaggtaaatgaggcgttcgctccacaagctctcgccgttcaacgtgaactcggaatcccaatggaaaagctgaatgtcaatggtggagccatcgctttgggccatccactcgccgcatctggagccagaatttccacgcatattgtgcacgagcttcaccgccgcaacgtcaagtacggaatcggatcggcttgcattggaggaggacaaggaatcgcaattctcttcgaaaaagtttaa

SEQ ID NO: 2516 - protein, 394 aa, Caenorhabditis elegans
MAGKCVFIVGAKRTAFGTFGGKLKGLSATDLGVVASQAALKHANVGADAVDHVIFGNVVASSRDGIYLSRHIGLKSGVPQNVGALTVNRLCGSGFQAVVNAAQAIKLGESNIVLAGGTENMSMVPFAVRDIRFGTALGKKYEFEDMLWDSLSDPYAKLAMGQTAEKLGAQYKVTRQEADEFALRSQTLWKKAQEAGVYKNEIVGITIKGRKGEESFEIDEHPRATTAESLAKLKPVFQKDGLVNAGNASGISDGAAALVVAGEDSVKSKNLKPLARVVAYSAVGCDPTIMGIGPAPAIREVLKKSGLKIGDIDIFEVNEAFAPQALAVQRELGIPMEKLNVNGGAIALGHPLAASGARISTHIVHELHRRNVKYGIGSACIGGGQGIAILFEKV

SEQ ID NO: 2517 - DNA, 1200 bp, Ralstonia solanacearum GMI1000
  CDS (1)..(1200): transl_table=11
atgaccaagcaactgcaagacgcctacatcgtcgccgccacccgttccccgatcggcaaggcgcccaagggctcgttcaagaacctgcgtccggacgacctgctggcgaccgtgctcaagagcgcggtggcccaggtgccggacctggacccgaagctgatcgaagacgccatcgtcggctgcgcgatccccgaagcgcagcagggcctgaacgtggcgcgcatcggcgcgctgctggccggcctgcccaacaccgtgggcggcgtgaccgtcaaccgcttctgcgcctcgggcctgaccgccgtggccatggccgccgaccgcatccgcgtgggcgaatccgacgtgatgatcgccgccggcgtcgagtcgatgagcatggtgccgatgatgggcaattcgccgtcgatgtcgccggacatcttcacgcgcgacgagaacatcggcatcgcctacggcatgggcctgaccgccgagcgcgtcgcccagcagtggaagatcacgcgcgatgcgcaggatgcgttctcgctggcgtcgcaccagaaggcattggccgcgcagcaggccggcgagttcaaggacgagatcaccccgatcgagatcatcgagaagttccccaacctgggcaccggcgcgatcgacctgaagacgcgcacgctgtcgctcgatgagggcccgcgcgccgacacctcgctcgaaggcctggccaagctgcgcgcggtgttcgccaacaagggcagcgtgacggccggcaacagctcgcagacctcggatggctcgggcgcgctgatcctggtgtcggagaagatcctcaggcagttcaacctgacgccgctggcgcgcttcgtgtcgttcgcggtgcgcggcgtgccgccggagatcatgggcatcggcccgaaggaagcgatcccggccgcgctcagggccgccggcctgacgcaggaccagctcgactggatcgagctgaacgaagcgttcgccgcgcagtcgctggcggtcatccaggacctgggcctggacaccggcaagatcaacccgctgggcggcgcgatcgcgctgggccacccgctgggcgcgaccggtgcgatccgcgcggccacggtcgtgcacggcctgcgccgccgcaacctgaagtacggcatggtgacgatgtgcgtcggcaccggcatgggcgcggcgggcattttcgagcgcgtttga

SEQ ID NO: 2518 - protein, 399 aa, Ralstonia solanacearum GMI1000
MTKQLQDAYIVAATRSPIGKAPKGSFKNLRPDDLLATVLKSAVAQVPDLDPKLIEDAIVGCAIPEAQQGLNVARIGALLAGLPNTVGGVTVNRFCASGLTAVAMAADRIRVGESDVMIAAGVESMSMVPMMGNSPSMSPDIFTRDENIGIAYGMGLTAERVAQQWKITRDAQDAFSLASHQKALAAQQAGEFKDEITPIEIIEKFPNLGTGAIDLKTRTLSLDEGPRADTSLEGLAKLRAVFANKGSVTAGNSSQTSDGSGALILVSEKILRQFNLTPLARFVSFAVRGVPPEIMGIGPKEAIPAALRAAGLTQDQLDWIELNEAFAAQSLAVIQDLGLDTGKINPLGGAIALGHPLGATGAIRAATVVHGLRRRNLKYGMVTMCVGTGMGAAGIFERV

SEQ ID NO: 2519 - DNA, 1212 bp, Arabidopsis thaliana
  CDS (1)..(1212)
atggcccatacatcagaatctgtgaatcctagagatgtttgcattgtgggtgttgcacgtactccaatgggtggctttctcggatctctttcatctttacctgccacaaagcttggatctttagctattgcagctgctttgaagagagcaaatgttgatccagctcttgttcaagaagttgtctttggcaatgttcttagtgctaatttgggtcaagctcctgctcgtcaagctgctttaggtgcaggaatccctaactctgttatctgtactacagttaacaaggtttgtgcatcaggcatgaaagcggtaatgattgctgctcaaagtatccagttagggatcaatgatgtagttgtggcgggtggtatggaaagcatgtctaatacaccaaaatatttggcagaagcaaggaagggatctcgttttggtcatgattctttagtagatggaatgttgaaggatggactatgggatgtctataacgactgtgggatgggaagctgtgcagaattatgcgctgagaagtttcagattacaagggagcagcaagatgactatgcagttcagagttttgagcgtggtattgctgcccaggaagctggcgccttcacatgggaaatcgtcccggttgaagtttctggaggaagaggtaggccatcaaccattgttgacaaggacgaaggtcttgggaagtttgatgctgcaaaattgaggaaactccgtcctagtttcaaagagaatggagggactgttacagctggaaatgcgtctagcataagtgatggtgcagctgcccttgtcctagtgagcggagagaaggctcttcagctaggacttctagtattagcaaaaattaaagggtatggtgacgcagctcaggaaccagagtttttcactactgctcctgctcttgctataccaaaagccattgcacatgctggtttggaatcttctcaagttgattactatgagatcaatgaagcatttgcagttgtagcacttgcaaatcaaaagctactcgggattgctccagagaaagtgaacgtaaatggaggagctgtctccttaggacaccctctaggctgcagtggcgcccgtattctaatcacgttgcttgggatactaaagaagagaaacggaaagtacggtgtgggaggagtgtgcaacggaggaggaggtgcttctgctctagttcttgagctcctttga

SEQ ID NO: 2520 - protein, 403 aa, Arabidopsis thaliana
MAHTSESVNPRDVCIVGVARTPMGGFLGSLSSLPATKLGSLAIAAALKRANVDPALVQEVVFGNVLSANLGQAPARQAALGAGIPNSVICTTVNKVCASGMKAVMIAAQSIQLGINDVVVAGGMESMSNTPKYLAEARKGSRFGHDSLVDGMLKDGLWDVYNDCGMGSCAELCAEKFQITREQQDDYAVQSFERGIAAQEAGAFTWEIVPVEVSGGRGRPSTIVDKDEGLGKFDAAKLRKLRPSFKENGGTVTAGNASSISDGAAALVLVSGEKALQLGLLVLAKIKGYGDAAQEPEFFTTAPALAIPKAIAHAGLESSQVDYYEINEAFAVVALANQKLLGIAPEKVNVNGGAVSLGHPLGCSGARILITLLGILKKRNGKYGVGGVCNGGGGASALVLELL

SEQ ID NO: 2521 - DNA, 1374 bp, Arabidopsis thaliana
  CDS (1)..(1374)
atggagagagctatggaaagacaaaagatattgcttcgtcatctcaatccagtttcttcttctaattcttctcttaaacatgaaccttctcttctgtctcctgtgaattgtgtttctgaagtttccccaatggctgcttttggagatgacattgtgattgtagcggcatatcgtaccgccatttgcaaagcgagacgtggaggtttcaaagacactcttcctgatgatcttcttgcttctgttcttaaggctgtagtggaaagaacatctttggatccaagtgaagttggtgatatcgttgttggtaccgtgatagcgcctggttctcagagagcaatggagtgtagagttgcagcttattttgctggttttcctgactccgtgccagttagaactgtcaatagacaatgctcatcaggactacaagcagttgctgatgttgctgcttccattagagctggttattacgacattggtattggtgctggagtggaatcaatgtcaactgatcatattcctggaggcggctttcatggctctaatccaagagcacaggatttcccaaaagcccgtgattgtttgcttccaatgggaattacttctgaaaacgttgcagaaaggttcggtgtcacaagagaagagcaagatatggctgcggtggagtctcacaaacgcgctgcagctgcaatcgcgtctggtaaactcaaggatgaaatcattcctgttgctactaagattgtggaccctgagactaaagcagagaaggcaatcgtcgtatctgttgatgacggtgtacgtccaaactcaaacatggcagatttggcaaagctgaagactgtctttaaacagaacggttccaccacagctggcaatgctagtcagatcagtgatggtgctggagcagtactgctaatgaagagaagtttggctatgaagaagggacttcccattcttggagtattcaggagttttgctgttactggtgtggaaccatctgtaatgggtattggtccagctgttgccattcccgctgcaactaagctcgcagggctcaacgtcagcgatattgatctattcgagatcaatgaggcatttgcatctcagtatgtgtactcttgcaagaagttagagctggatatggaaaaggtcaatgttaatggaggagccattgctattggccatcccctgggtgctacaggagctcgatgtgttgcgacattgttgcacgagatgaagcggagaggaaaagattgccgctttggagtaatctcaatgtgcataggcactggaatgggagctgcagctgtttttgagaggggagactctgttgataacttgtccaacgctcgtgtggctaacggggatagtcattag

SEQ ID NO: 2522 - protein, 457 aa, Arabidopsis thaliana
MERAMERQKILLRHLNPVSSSNSSLKHEPSLLSPVNCVSEVSPMAAFGDDIVIVAAYRTAICKARRGGFKDTLPDDLLASVLKAVVERTSLDPSEVGDIVVGTVIAPGSQRAMECRVAAYFAGFPDSVPVRTVNRQCSSGLQAVADVAASIRAGYYDIGIGAGVESMSTDHIPGGGFHGSNPRAQDFPKARDCLLPMGITSENVAERFGVTREEQDMAAVESHKRAAAAIASGKLKDEIIPVATKIVDPETKAEKAIVVSVDDGVRPNSNMADLAKLKTVFKQNGSTTAGNASQISDGAGAVLLMKRSLAMKKGLPILGVFRSFAVTGVEPSVMGIGPAVAIPAATKLAGLNVSDIDLFEINEAFASQYVYSCKKLELDMEKVNVNGGAIAIGHPLGATGARCVATLLHEMKRRGKDCRFGVISMCIGTGMGAAAVFERGDSVDNLSNARVANGDSH

SEQ ID NO: 2523 - DNA, 1176 bp, Encephalitozoon cuniculi GB-M1
  CDS (1)..(1176)
atgatatcccatgaggacgttgttgttgtaggagcactccgaacacccattggaagggcgacgagagggaagctcagaagccttaggaacgatgagctggttaccgctgctatccggggcatcattgagaagactgggattgaccctcgtcttatcgaagaagtcatcctcggccattgtctttcttcaatggaagggaatgtggctgcaagaatgggtgttttgagggctggagtgccggtcgagacaccagttatgatcataaacagattgtgcgggtctgggctagagtctgttgggcttattgctgagaagattagatcgggtaggatagagatagggcttgctggaggatttgagtctatgacatcctatggactgcccaaggaatacaccctgagcaggggcggtgcatgcgaagatgccgaggattgcatgctgacattaggggaggtttcggagatgctaggcaagacccacggtgtaacacgcagtgaggctgatgagtatgcagtgacaagccaaaagagggctcttgaagccaccaagaagggccattttcttgcggagatcattcccatgagggtgggagatgagactgttgagcgtgatgaagggataagggagacgtctctgggtactatcgagagtctgaagcctgtattcaggcaggatggggtttgcacgtcggccaactcctcacagctgtctgatggagcgtctgccgtgcttctgatgaaaaggagaagagctgatgagctaggtttgcctgtggttgcagagtttattgatttcattgctgtaggacttaagcccagagacatggggctgggtcctgttgttgccatcgagaaactactaaagaggaatggacttgagaaagaccagatctcgtacttcgagataaacgaagcatttgcatcccaggttctttgctgccttcggaagcttcagatcggtgaagacagggtcaataggtatggaggatccatagctcttggacacccgatcggggcttctggagcaaggattgtctgcacactgctgagtgttatgaaaaacgaggcactggaaggatatggagtggcgtctctatgtgtgggtgctgggcatggagtggctgcactgttcagaagagccgctggatccaaaccgcaagacattaaaaacacctaa

SEQ ID NO: 2524 - protein, 391 aa, Encephalitozoon cuniculi GB-M1
MISHEDVVVVGALRTPIGRATRGKLRSLRNDELVTAAIRGIIEKTGIDPRLIEEVILGHCLSSMEGNVAARMGVLRAGVPVETPVMIINRLCGSGLESVGLIAEKIRSGRIEIGLAGGFESMTSYGLPKEYTLSRGGACEDAEDCMLTLGEVSEMLGKTHGVTRSEADEYAVTSQKRALEATKKGHFLAEIIPMRVGDETVERDEGIRETSLGTIESLKPVFRQDGVCTSANSSQLSDGASAVLLMKRRRADELGLPVVAEFIDFIAVGLKPRDMGLGPVVAIEKLLKRNGLEKDQISYFEINEAFASQVLCCLRKLQIGEDRVNRYGGSIALGHPIGASGARIVCTLLSVMKNEALEGYGVASLCVGAGHGVAALFRRAAGSKPQDIKNT

SEQ ID NO: 2525 - DNA, 1188 bp, Schizosaccharomyces pombe
  CDS (1)..(1188)
atggttaacacagaggtttacattgtgtctgctgttcgcacacccatgggcagctttggcggcagtttcgcttctcttcctgccaccaaattaggctctattgccatcaagggcgctcttgaaagggtcaatattaagccttctgatgttgatgaggtgtttatgggtaatgtcgtctcagccaatcttggccaaaaccctgctcgtcaatgcgccttaggtgctggactccctcgttccatcgtttgtactactgttaacaaggtttgtgcctctggtatgaaggcaacaattctcggtgctcaaactatcatgactggaaatgctgagattgtcgttgctggtggtaccgagagcatgtcaaatgctccttactatgccccaaagaaccgttttggtgccaaatacggtaacgttgagttggttgacggtctcttacgtgatggtttatctgatgcatatgatggacttcccatgggtaatgctgccgagctttgcgctgaggaacacagcattgaccgtgccagtcaagacgcctttgccatttcttcttacaaacgtgctcaaaacgctcaagctacaaaggcatttgaacaagaaatcgtccccgtcgaggtccctgttggtcgtggtaagcccaacaagcttgttactgaggacgaggagcccaagaaccttaacgaagacaaactcaaatccgtacgtgctgtcttcaagagtaacggtaccgtcactgctgctaatgcttctaccttgaacgatggtgctagcgctcttgttctcatgtcggctgccaaagtgaaagaacttggtcttaagcctcttgctaaaattattggttggggtgaagccgctcaagatcctgagcgttttaccacttctccttcccttgctattcccaaagctctcaagcatgcaggtattgaagcttcccaagttgactattacgagatcaatgaagcctttagtgttgttgctgttgccaacaccaaaattcttggattagatcccgagcgtgttaacattaacggaggtggtgttgccatgggtcatcccttgggtagcagtggttctcgtatcatttgtactttggcatatattcttgctcagaaggatgccaagattggtgtagctgctgtttgcaatggtggtggtggtgcttcatccattgttatcgaaagagtttag

SEQ ID NO: 2526 - protein, 395 aa, Schizosaccharomyces pombe
MVNTEVYIVSAVRTPMGSFGGSFASLPATKLGSIAIKGALERVNIKPSDVDEVFMGNVVSANLGQNPARQCALGAGLPRSIVCTTVNKVCASGMKATILGAQTIMTGNAEIVVAGGTESMSNAPYYAPKNRFGAKYGNVELVDGLLRDGLSDAYDGLPMGNAAELCAEEHSIDRASQDAFAISSYKRAQNAQATKAFEQEIVPVEVPVGRGKPNKLVTEDEEPKNLNEDKLKSVRAVFKSNGTVTAANASTLNDGASALVLMSAAKVKELGLKPLAKIIGWGEAAQDPERFTTSPSLAIPKALKHAGIEASQVDYYEINEAFSVVAVANTKILGLDPERVNINGGGVAMGHPLGSSGSRIICTLAYILAQKDAKIGVAAVCNGGGGASSIVIERV

SEQ ID NO: 2527 - DNA, 1227 bp, Corynebacterium glutamicum ATCC 13032
  CDS (1)..(1227): transl_table=11
atgaaccctcaagatattgtcatctgttccccattgcgcaccccagttggtgcttacggcggatccttcaccggcgtccctgttgaagaattggccaccaccgtgatcaacgcgatcgttgaggcaaccggcatcaccggcgacgatgtggacgatctgatcctcggccaggcatcccccaacggtgcggctccagcactgggccgtgttgttgctctagattccaagcttggccaaaacgttccaggcatgcagcttgatcgccgctgtggttccggcctgcaggcaatcgtcaccgctgctgcacacgttgcatccggcgctgctgatctgatcatcgcaggtggcgcagaatccatgagccgcgttgagtacaccgtgtccggcgatatccgttggggtgtcaagggcggcgacatgcagcttcgtgaccgccttgcagaagcacgcgaaaccgctggcggacgcaaccacccgatccctggtggcatgatcgagaccgctgagaacctgcgtcgcgaatacggcatctcccgcgaggagcaggacaagatctccgcagcgtcccagcagcgttggggcaaggctgctgatgcggggcttttcgacgacgagatcgtgccagtcaccgtccctgccaagaagcgcggccaggagccaaccatcgtttctcgagacgagcatggtcgaccaggaacaaccgtcgaaaagcttgctgctttgcgccccatcatgggccgccaggatgcggaagcaaccgtcaccgctggcaacgcgtccggccaaaatgatggcgctgctgccgtcatcgtgaccactcgcgccaaggccgaggagaagggcctgcgcccagtcatgcgtttggctggctggtctgtggctgctgttcccccagagaccatgggtattggacctgttcctgccaccaagaaggtcctggatcgtttgggccttaccctggaggacatcggcgcgatcgaactcaacgaagctttcgcagctcaggcactgtctgtgctgaaggaatggaacatttcttgggaagatgagcgcgtcaacccactgggttccggtatttccatgggacacccagtcggtgccaccggtgctcgcatggcagtaaccttggctcaccgcatgcagcgtgaaaacactcagtacggactggccaccatgtgcatcggtggcggccagggtcttgcagctgtctttgaaaaggagaactaa

SEQ ID NO: 2528 - protein, 408 aa, Corynebacterium glutamicum ATCC 13032
MNPQDIVICSPLRTPVGAYGGSFTGVPVEELATTVINAIVEATGITGDDVDDLILGQASPNGAAPALGRVVALDSKLGQNVPGMQLDRRCGSGLQAIVTAAAHVASGAADLIIAGGAESMSRVEYTVSGDIRWGVKGGDMQLRDRLAEARETAGGRNHPIPGGMIETAENLRREYGISREEQDKISAASQQRWGKAADAGLFDDEIVPVTVPAKKRGQEPTIVSRDEHGRPGTTVEKLAALRPIMGRQDAEATVTAGNASGQNDGAAAVIVTTRAKAEEKGLRPVMRLAGWSVAAVPPETMGIGPVPATKKVLDRLGLTLEDIGAIELNEAFAAQALSVLKEWNISWEDERVNPLGSGISMGHPVGATGARMAVTLAHRMQRENTQYGLATMCIGGGQGLAAVFEKEN

SEQ ID NO: 2529 - DNA, 1179 bp, Drosophila melanogaster
  CDS (1)..(1179)
atgtctgacgtgttcatcgtgtccgccgcccgcacgcccattggtagcttcaatggaacgctttctaaactgaaggcctccgacctgggcagcgtggtcatccaggaggtactccggcgggcgaatgtggagggccaggaggtcaacgaagtcatcttgggccaggctctaagcgccggtcagggtcagaatccagcacgtcaggcttcactcaaggcgggtctgcccattcaggtgccagcctacggcataaacatgctatgtggttccggcttaaaaactgtagcgctgggttaccaggccatccgctcgggagacgcacagattgttgtggcaggaggtcaggagagcatgtccctggctccacacgtcatgcatctgcggcagggcgtcaaaatgggtccgggcactatggtggactcgatgatccacgacggcctaaccgatgccatggagaacatacacatgggcatcactgccgagaatctggccgataagtataacatcagtcgtgaggcccaggatgcctatgccgtgctgtcgcaaaatcgagccgaggaggcccaaaaaaagggttacttcgacaaggagattgtgcccgtggagatcaaggatcgcaagggtacgaccacattcagcaaggatgagtacatcaaggcgggcagcaccgtcgagggtatacagaagctcagggcagccttcaaagagggcggctctataaccgctggcaatgcctcaggcgtcaacgactccgctgctgccgtactactgatgtccggcgaggaggtggccaggaagggtcttaagccgctggctaggattgtgggctggactcagagtggcattgagccaaaggtgatgggactgggaccagtcacagctgtggaagcattgcttcaaaagattaactggaagcgtgaggaagtggatctttacgagctgaacgaagcattcgccgcccaatcactggctgtcctgcaggacctgcagctggatgctcagaaagtaaatgtcaatggcggtgccattgccctgggccacccgattggagcttcaggtgcccgtgtcttggtcactttgctctatgcgctggagcgcaccggtggaagaaagggaatcgcatcgctctgcatcggtggcggcatgggaatcgccctggccgtggagcgcctcagctag

SEQ ID NO: 2530 - protein, 392 aa, Drosophila melanogaster
MSDVFIVSAARTPIGSFNGTLSKLKASDLGSVVIQEVLRRANVEGQEVNEVILGQALSAGQGQNPARQASLKAGLPIQVPAYGINMLCGSGLKTVALGYQAIRSGDAQIVVAGGQESMSLAPHVMHLRQGVKMGPGTMVDSMIHDGLTDAMENIHMGITAENLADKYNISREAQDAYAVLSQNRAEEAQKKGYFDKEIVPVEIKDRKGTTTFSKDEYIKAGSTVEGIQKLRAAFKEGGSITAGNASGVNDSAAAVLLMSGEEVARKGLKPLARIVGWTQSGIEPKVMGLGPVTAVEALLQKINWKREEVDLYELNEAFAAQSLAVLQDLQLDAQKVNVNGGAIALGHPIGASGARVLVTLLYALERTGGRKGIASLCIGGGMGIALAVERLS

SEQ ID NO: 2531 - DNA, 1170 bp, Streptomyces coelicolor A3(2)
  CDS (1)..(1170): transl_table=11
atgcgtgacgcagtcgtcgtggaagccgtacgcacccccatcggcaaggggaagccgaacggcgccctcgcccacgtccatcccgtggaactcctcgcgcacaccctgcgcaccctcgtcgagcggtccggggtggacccggcgctgatcgacgacgtcatcggcggcacggtggaccaggtcggcgaacaggcgatgaacaccacccgctacgccctgctctcggcgggcttccccgagtccgtccccgctaccaccgtggaccggcagtgcggctcctcccagcaggccgtccacttcgccgcgcagggcgtcatggccggggcgtacgacctcgtcgtcgcctgcggggtcgagtccatgagccgggtgccgatgtggtcgaacgtgccgcccggcgccgaccccttcggtcccggcgtcgccgcccgctacccgcaggggctcgtcccgcagggcatcagcgccgaactgatcgccgcgaagtggtcactgagccgggagcgcatggacgccttcgccgtctcctcgcaccagaaggccgccaccgcccacgccgccggccgcttcgacgccgagatcgcgccgctggacggggtgtcgcacgacgagtgcgtccgcccggacagcagcgtcgaggtcctcgccggactgcggcccgcctaccacgacccggccttcgccgaacggttcccgcagatcgggtggaacgtcaccgcgggcaacgccagcccggtcaacgacggtgcctcggccgtgctgatcacctcgggcgacaccgccgcccgcctcggactgcggcccctcgcgcggctgcacagcttcgccgtgaccggctccgacccgctgctcatgctcaccggcgtcgtcccggccaccgagaaggtgctgcgccgggcgtcgctctccctcggcgacatcgacctcttcgaggtcaacgaggccttcgcgagcgtcgtactggcctggcagcgggagaccggagccgacttggccaaggtcaacgtgcacggcggcgccatcgcgctcggccaccccctcggcgcgagcggcacccgtctgaccaccaccctcgtccacgccctgcacgaacgcggcgcccgctacggcctgcagaccatgtgcgaggcgggcggtctcgccaacgccatgatcctggaagcggtgtaa

SEQ ID NO: 2532 - protein, 389 aa, Streptomyces coelicolor A3(2)
MRDAVVVEAVRTPIGKGKPNGALAHVHPVELLAHTLRTLVERSGVDPALIDDVIGGTVDQVGEQAMNTTRYALLSAGFPESVPATTVDRQCGSSQQAVHFAAQGVMAGAYDLVVACGVESMSRVPMWSNVPPGADPFGPGVAARYPQGLVPQGISAELIAAKWSLSRERMDAFAVSSHQKAATAHAAGRFDAEIAPLDGVSHDECVRPDSSVEVLAGLRPAYHDPAFAERFPQIGWNVTAGNASPVNDGASAVLITSGDTAARLGLRPLARLHSFAVTGSDPLLMLTGVVPATEKVLRRASLSLGDIDLFEVNEAFASVVLAWQRETGADLAKVNVHGGAIALGHPLGASGTRLTTTLVHALHERGARYGLQTMCEAGGLANAMILEAV

SEQ ID NO: 2533 - DNA, 1221 bp, Streptomyces coelicolor A3(2)
  CDS (1)..(1221): transl_table=11
atgcccgaagccgtgatcgtctctgccgcccgttcccccatcggccgcgccttcaagggctccctgaaggacctgcgcgccgacgacctggccgccacgatcatccaggcggccctcgcgaaggtgcccgagctggacccgcgggacatcgacgacctgatgctcggctgcggcctgcccggcggcgagcagggcaacaacctcggccggatcgtcgccgtcgagatgggcatggaccacctgccgggctgcaccgtcacccggtactgctcctcgtccctgcagacctcccgcatggccctgcacgccatcaaggccggtgagggcgacgtcttcatctcggccggcgtcgagatggtctcccggttcgccaagggcaactccgacagcctcccggacacccgcaacccgctcttcgccgaggccgaggcccgcaccgcggaggtcgcccagcaggagggcaccacctggcacgacccgcgcgaggacggcctcgtccccgacccgtacatcgcgatgggccagaccgccgagaacctcgcccgcgccaagggcatcacccggcaggacatggacgagttcggcgtccggtcccagaacctcgccgaggaagccatcaagaacggcttctgggagcgcgagatcaccccggtgaccctgcccgacggcacggtcgtcagcaaggacgacggcccccgggccggcgtcaccctggagggcgtccagggcctcaagccggtcttccgccccgacggcctggtcaccgccggcaactgctgcccgctcaacgacggcgccgccgccctcgtgatcatgagcgacaccaaggcccgcgagctgggcctgaccccgctggcccgcatcgtctccaccggcgtctccggcctctcccccgagatcatgggcctgggcccggtcgaggccagcaagcaggccctgtcccgggccgggctgggcgtcggcgacatcgacctggtcgagatcaacgaggcgttcgccgcgcaggtcatcccctcctaccgcgacctcggcatcccgctggagaagctgaacgtcaacggcggcgccatcgccgtcggccaccccttcggcatgaccggcgcccgcatcacgggcacgctgatcaactccctgcggacgcacgacaagcagttcggcctggagaccatgtgcgtcggcggcggccagggcatggccatggtgatcgagcgcctgagctga

SEQ ID NO: 2534 - protein, 406 aa, Streptomyces coelicolor A3(2)
MPEAVIVSAARSPIGRAFKGSLKDLRADDLAATIIQAALAKVPELDPRDIDDLMLGCGLPGGEQGNNLGRIVAVEMGMDHLPGCTVTRYCSSSLQTSRMALHAIKAGEGDVFISAGVEMVSRFAKGNSDSLPDTRNPLFAEAEARTAEVAQQEGTTWHDPREDGLVPDPYIAMGQTAENLARAKGITRQDMDEFGVRSQNLAEEAIKNGFWEREITPVTLPDGTVVSKDDGPRAGVTLEGVQGLKPVFRPDGLVTAGNCCPLNDGAAALVIMSDTKARELGLTPLARIVSTGVSGLSPEIMGLGPVEASKQALSRAGLGVGDIDLVEINEAFAAQVIPSYRDLGIPLEKLNVNGGAIAVGHPFGMTGARITGTLINSLRTHDKQFGLETMCVGGGQGMAMVIERLS

SEQ ID NO: 2535 - DNA, 1206 bp, Streptomyces coelicolor A3(2)
  CDS (1)..(1206): transl_table=11
atgtcttctgcatcgaacggcacgacttccgtcatcgtcgcgggtgcccgcaccccgatggggcggctgctcggctccctcaagtccttctccggggccgacctcggcagcttcgcgatcaaggccgccctcggccgcgccgggatcggcggcgaccaggtccagtacgtgatcatggggcaggtgctccaggccggcgccgggcagatccccgcccgccaggccgccgtcaaggccggcatccccatgagcgtccccgcgctcacgatcaacaaggtctgcctctccggcctcgacgccatcgcactcgccgaccagctcattcgcgcgggtgaattcgacgtgatcgtcgcgggcggccaggagtccatgaccaacgccccgcacctgctccccaagtcccgcgagggctacaagtacggtgcggtccagatgatcgacgccatggcctacgacggcctgaccgactccttcgaggacatcgccatgggcgagtccacggagaagcacaacacccggctcggcatcgagcgcgccgcccaggacgagatcgccgccctgtcccaccagcgcgccgccgccgctcagaagaacggcgtcttcgacgcggagatcaccccggtcgagatcccgcagcgcaagggcgacccggtgctgttcgccaaggacgagggcatccgcggcgacaccaccgccgagtcgctcggcaagctgcgtccggccttcgccaaggacggcaccatcaccgccggctcctcctcccagatctccgacggcgcggcggccgtggtcgtgatgagccgggccaaggccgaggagctgggcctggagtggatcgcggagatcggcgcgcacggcaatgtcgcgggccccgacaactctttgcagtcgcagccgtcgaacgccatccggcacgccctcaagaaggagggcctggaggtcgccgacctcgacctcgtcgagatcaacgaggccttcgcggccgtggccgtgcagtcaatgaaggacctcggcgtgtccaccgaaaaggtgaacgtcaacggtggtgccatcgccctcggtcacccgatcggcatgtccggcgcccggctggtgctgcacctcgccctggaactgaagcggcgcggcggcggtgtgggcgcggccgcgctgtgcggcggcggcggtcagggcgacgcgctgatcgtgcgggtgcccggggcctga

SEQ ID NO: 2536 - protein, 401 aa, Streptomyces coelicolor A3(2)
MSSASNGTTSVIVAGARTPMGRLLGSLKSFSGADLGSFAIKAALGRAGIGGDQVQYVIMGQVLQAGAGQIPARQAAVKAGIPMSVPALTINKVCLSGLDAIALADQLIRAGEFDVIVAGGQESMTNAPHLLPKSREGYKYGAVQMIDAMAYDGLTDSFEDIAMGESTEKHNTRLGIERAAQDEIAALSHQRAAAAQKNGVFDAEITPVEIPQRKGDPVLFAKDEGIRGDTTAESLGKLRPAFAKDGTITAGSSSQISDGAAAVVVMSRAKAEELGLEWIAEIGAHGNVAGPDNSLQSQPSNAIRHALKKEGLEVADLDLVEINEAFAAVAVQSMKDLGVSTEKVNVNGGAIALGHPIGMSGARLVLHLALELKRRGGGVGAAALCGGGGQGDALIVRVPGA

SEQ ID NO: 2537 - DNA, 1218 bp, Streptomyces coelicolor A3(2)
  CDS (1)..(1218): transl_table=11
gtgcctcgtaccgtcagggacgtcgtcttcgtcgacggcgtccgcaccccgttcggcaaggcgggcccgaagggcgtctaccacgagacccgcgccgacgacctggtcgtgaaggcgatccgggagctgctgcgccgcaaccccggtctcgaccccaagaagatcgacgaggtcgccgtcgccgcgaccacgcagatcggcgaccagggcctgaccatcggccgcaccgccggcattctggcgggcctgcccacctcggtcccgggctactccatcgaccgcatgtgcgcgggcgccctgaccgccgtcacctcggtggccggctcggtcgccttcggcgcgtacgacgtcgcgatcgcgggcggtgtcgagcacatgggccgccacccgatgggcgagggcgtcgacccgaacccgcggttcgtcagcgagaagctggtcgacgagtccgccctgttcatgggcatgaccgcggagaacctgcacgaccgctacccgtcgatcaccaagcagcgcgccgacgagtacgcggtgcgctcccaggagaaggccgccaaggcctacgccaacggccagatccaggccgacctggtgccggtctcggtgcgccgcaccaacgaggaggcgggcgagacgggctggggcctggtcacggccgacgagccgatgcgtccgggcaccacgctggagaacctggcgggcctgaagacgccgttccgcgtgcacggccgggtcaccgcgggcaacgcggccggtctgaacgacggcgcgaccgcctccctcatcgcgagcgaggacttcgcccgcgagcacaacctccccgtgaagatgcgcctggtcgcgtactccttcgcgggcgtcgagccggaggtcatgggctacggcccgatcccggccaccgagaaggccctcgcgcaggcgggtctgtccatctcggacatcggcctgttcgagatcaacgaggccttcgccgtccaggtcctcgcgttcctggagcactacggcatcgccgacgacgacgcgcgcgtcaaccagtacggcggcgccatcgccttcggccacccgctggcctcctccggcgtccggctgatgacgcagctggcccgtcagttcgaggagcagccgcacgtccgctacggcctgaccaccatgtgcgtcggcttcggcatgggcgcgacggtcatctgggagaacccgcacttcgagggggacaagtga

SEQ ID NO: 2538 - protein, 405 aa, Streptomyces coelicolor A3(2)
MPRTVRDVVFVDGVRTPFGKAGPKGVYHETRADDLVVKAIRELLRRNPGLDPKKIDEVAVAATTQIGDQGLTIGRTAGILAGLPTSVPGYSIDRMCAGALTAVTSVAGSVAFGAYDVAIAGGVEHMGRHPMGEGVDPNPRFVSEKLVDESALFMGMTAENLHDRYPSITKQRADEYAVRSQEKAAKAYANGQIQADLVPVSVRRTNEEAGETGWGLVTADEPMRPGTTLENLAGLKTPFRVHGRVTAGNAAGLNDGATASLIASEDFAREHNLPVKMRLVAYSFAGVEPEVMGYGPIPATEKALAQAGLSISDIGLFEINEAFAVQVLAFLEHYGIADDDARVNQYGGAIAFGHPLASSGVRLMTQLARQFEEQPHVRYGLTTMCVGFGMGATVIWENPHFEGDK

SEQ ID NO: 2539 - DNA, 1203 bp, Streptomyces coelicolor A3(2)
  CDS (1)..(1203): transl_table=11
gtgaaggacgtctacctcgtcgacgcggtgcgcaccccgttcggcaagtacaacgggggcctgtcgggcgtacgcccggacgacctggccgcgcacgcgatccgtgaactcctgggccgtacgcccggcctggacccgtcccggatcgacgacgtgtacttcggcaacgccaacggcgccggcgaggagaaccgcaacgtcgcccgcatggccgccctgctggccggcctgcccaccaccgtccccggcgtcacggtgaaccggctgtgcgcctccggcctcgaagcggtgatccaggccgcccgtgccatcgcggtcggcgacgcctcggtcgcactcgcgggcggcgtggagtcgatgacccgggccccgtacgtgctgcccaagccggaccggcccttccccgccgggcacaccgagatgtactcgaccaccctgggctggcgcatggtcaacccggcgatggacccgcagtggacgatcccgctcggcgagtcggcggagctgatcgcggacaagcacgggatcacccgcgagcagcaggacgagtacgccctcgcctcccaccgcaaagccgcccgcgcccaggccgacggcctgttcgacgccgagctggcgcccgtgccggtgccgcgccgcaagggcgacccggtcgacttcgccgccgacgagtgcgtccgcccggacgcctccctggaggcgatggccaaactcaagccgtccttcaggaagaccgacggcaccgtgaccgcgggaaacgcctcgccgctcaacgacggcgccgccgcgctgctcctggtcgacgaggagggactgaaggccaccggacgcgagccgctcgcccgggtctcggccaccggggtctcggcgaccgacccgcagtacttcggtctcgcccccgtggaggcggtgaaccgggcgctcgcccgggccggacgggacttcgccgacctggacgtgctcgaactcaacgaagccttcgccgcccaggtgctgggctgcgtcgccgagtggccggagttcgacccggcggtcctcaacccgcagggcggggccatcgccctcggccacccgctcggcgcgtccggcgcccggctcgccggcaccgtcgcccaccagctcgcccgcaggggaagcggcaccggcatcgccaccctctgcatcggcgtcggccagggcctcgccctggtcctcgaccgctag

SEQ ID NO: 2540 - protein, 400 aa, Streptomyces coelicolor A3(2)
MKDVYLVDAVRTPFGKYNGGLSGVRPDDLAAHAIRELLGRTPGLDPSRIDDVYFGNANGAGEENRNVARMAALLAGLPTTVPGVTVNRLCASGLEAVIQAARAIAVGDASVALAGGVESMTRAPYVLPKPDRPFPAGHTEMYSTTLGWRMVNPAMDPQWTIPLGESAELIADKHGITREQQDEYALASHRKAARAQADGLFDAELAPVPVPRRKGDPVDFAADECVRPDASLEAMAKLKPSFRKTDGTVTAGNASPLNDGAAALLLVDEEGLKATGREPLARVSATGVSATDPQYFGLAPVEAVNRALARAGRDFADLDVLELNEAFAAQVLGCVAEWPEFDPAVLNPQGGAIALGHPLGASGARLAGTVAHQLARRGSGTGIATLCIGVGQGLALVLDR

SEQ ID NO: 2541 - DNA, 1188 bp, Streptomyces coelicolor A3(2)
  CDS (1)..(1188): transl_table=11
gtgcgtcccgtccacttcgcggccgcccgccgcaccccgatcggcaagctgcgcggcgcgctgtccaccgtgcggccggacgacctcgccgccgccgtgctccgcggcctggtcgccgacgtgcccgcgctggacccggcccgggtcgacgacgtgtactggggcgccgccaaccaggcgggcgaggacaaccgcaacgtcgcccgcatggccgcgctgctcgcgggcctgcccgagaccgtgcccggcgccaccgtcaaccggctgtgcgcctccggcctcgaagccgtcaccaccgccgcacgcaccatcgccgcgggcgaggccgacatcgtcctcgcgggcggctccgagtccatgagccgcgcccccttcgtgctgccccgccccgacgaggcgctgccgcaccgcatcgagaccgccgacacccggctcggctggcgcctggtcaacccggcgatgaaggacctgcacggcctgctcgccatgggggagacggccgaggaggtcgccgagcggtacggcgtcccgcgcgagcgtcaggacgcgttcgccctgcgcagccaccgcctggccgccgaggcccggaagaacggccgcttcgacgacgagatcctccccgtcgagcgccccgacggcgtggtcgtcgacaccgacgagtgcgtccgcgaggacacctccctggagaagctgggcagcctcaagcccgtcttccgccccggcggcacggtcaccgcgggcaacgcctccccgatgaacgacggcgccgcgggcctcctcctggtcagcgaggaggcgctgaacgacctcggcctggagtcgctgggccgctacgtcgcgggcggctcggccggcgtccaccccgacgtcatgggcatcggcccggtccccgccacccgcaaggtgctggcccgggcgggctggggcatcggcgacatcaccgaggccgagttcaacgaggcgttcgccgcccaggccctcgcctgcgtcgaccaactcggcatcgaccccgacctggtcaacccgaccggcggcgccatcgcgctgggccacccgctcggctgctcgggcgcccgcatcctcaccaccctgctccaccgcatgcgccgtacgggggccggccgcgggctggccacgatgtgcgtcggcgtggggcagggcagcgcggtcctcgtcgaacgtcactag

SEQ ID NO: 2542 - protein, 395 aa, Streptomyces coelicolor A3(2)
MRPVHFAAARRTPIGKLRGALSTVRPDDLAAAVLRGLVADVPALDPARVDDVYWGAANQAGEDNRNVARMAALLAGLPETVPGATVNRLCASGLEAVTTAARTIAAGEADIVLAGGSESMSRAPFVLPRPDEALPHRIETADTRLGWRLVNPAMKDLHGLLAMGETAEEVAERYGVPRERQDAFALRSHRLAAEARKNGRFDDEILPVERPDGVVVDTDECVREDTSLEKLGSLKPVFRPGGTVTAGNASPMNDGAAGLLLVSEEALNDLGLESLGRYVAGGSAGVHPDVMGIGPVPATRKVLARAGWGIGDITEAEFNEAFAAQALACVDQLGIDPDLVNPTGGAIALGHPLGCSGARILTTLLHRMRRTGAGRGLATMCVGVGQGSAVLVERH

SEQ ID NO: 2543 - DNA, 1206 bp, Xanthomonas axonopodis pv. citri str. 306
  CDS (1)..(1206): transl_table=11
atgagcaaacagattcaagaagcctacatcgtcgccgccacacgtacgccggtaggcaaggcgccgaagggcgtgttccgcaacacccgccccgacgacatgctggcgcacgtgctgcgcgccgtggtcgcgcaggcgccgggcatcgatacctcgcgcatcgacgacgccatcatcggctgcgcgatgcccgaaggcgagcaaggcatgaacgtggcgcgcattggcgtgctgctggcgggcctgcccaattcggtggccggtcagaccatcaaccgcttctgttcgtccggcatccaggccatcgccatggcggccgatcagattcgtctgggcaatgccgacctgatgctggccggcggcactgagtcgatgtcgatggtgccgatgatgggcaacaaggtggcgatgtcgccaagcgtgttcgccgacgaccatgtggccattgcgtacggcatgggcatcactgccgagaaggtcgcagaagagtggaaggtgtcgcgcgaagaccaggatgcgttcgcgctggcctcgcaccagaaagcgatcgcggcgattgcggccggcgagttccgcgacgaaatcagcccgtacgaaatccactcgcaccagcccgacttggccggcaacgtcatcaccttgcgcaagaagctggtcgatacggacgaaggtccgcgtccggacagctcgctcgagggcctggccaagctgcgcccggtgttccgcaacggccagttcggcggcagcgtcaccgccggcaattcgtcgcagatgagcgatggtgccggcgcggtgctgctggcctccgagcaggcgatcagggattacggcctgactccgctggcccgcttcgtcagcttctcggtcgctggcgtgcgcccggaagtcatgggtatcggaccgatcgccgccattcccaaggcgctcaagcaggccggcctgaccaaggaccagctggactggatcgagctcaacgaagccttcgcggcacaggcgttggcggtcatccgcgacagcgagctggatccatccaaggtcaacccactgggcggcgcaatcgcccttggccacccgctgggcgccaccggcgcgatccgtgcggccacgctggtgcatggcctgcgccgtcgtcagcagaagtacggcatggtcaccatgtgcatcgggaccggcatgggcgctgcgggcatcatcgaagcgctgtaa

SEQ ID NO: 2544 - protein, 401 aa, Xanthomonas axonopodis pv. citri str. 306
MSKQIQEAYIVAATRTPVGKAPKGVFRNTRPDDMLAHVLRAVVAQAPGIDTSRIDDAIIGCAMPEGEQGMNVARIGVLLAGLPNSVAGQTINRFCSSGIQAIAMAADQIRLGNADLMLAGGTESMSMVPMMGNKVAMSPSVFADDHVAIAYGMGITAEKVAEEWKVSREDQDAFALASHQKAIAAIAAGEFRDEISPYEIHSHQPDLAGNVITLRKKLVDTDEGPRPDSSLEGLAKLRPVFRNGQFGGSVTAGNSSQMSDGAGAVLLASEQAIRDYGLTPLARFVSFSVAGVRPEVMGIGPIAAIPKALKQAGLTKDQLDWIELNEAFAAQALAVIRDSELDPSKVNPLGGAIALGHPLGATGAIRAATLVHGLRRRQQKYGMVTMCIGTGMGAAGIIEAL

SEQ ID NO: 2545 - DNA, 1203 bp, Pseudomonas putida KT2440
  CDS (1)..(1203): transl_table=11
atgcacgacgtattcatctgtgacgccatccgtaccccgatcggccgcttcggcggcgccctggccagcgtgcgggccgacgacctggccgccgtgccgctgaaggcgctgatcgagcgcaaccctggcgtgcagtgggaccaggtagacgaagtgttcttcggctgcgccaaccaggccggtgaagacaaccgcaacgtggcccgcatggcactgctgctggccggcctgccggaaagcatcccgggcgtcaccctgaaccgtctgtgcgcgtcgggcatggatgccgtcggcaccgcgttccgcgccatcgccagcggcgagatggagctggtgattgccggtggcgtcgagtcgatgtcgcgcgccccgttcgtcatgggcaaggctgaaagcgcctattcgcgcaacatgaagctggaagacaccaccattggctggcgtttcatcaacccgctgatgaagagccagtacggtgtggattccatgccggaaaccgccgacaacgtggccgacgactatcaggtttcgcgtgctgatcaggacgctttcgccctgcgcagccagcagaaggctgccgctgcgcaggctgccggcttctttgccgaagaaatcgtgccggtgcgtatcgctcacaagaagggcgaaatcatcgtcgaacgtgacgaacacctgcgcccggaaaccacgctggaggcgctgaccaagctcaaaccggtcaacggcccggacaagacggtcaccgccggcaacgcctcgggcgtgaacgacggtgctgcggcgatgatcctggcctcggccgcagcggtgaagaaacacggcctgactccgcgtgcccgcgttctgggcatggccagcggcggcgttgcgccacgtgtcatgggcattggcccggtgccggcggtgcgcaaactgaccgagcgtctggggatagcggtaagtgatttcgacgtgatcgagcttaacgaagcgtttgccagccaaggcctggcggtgctgcgtgagctgggtgtggctgacgatgcgccccaggtaaaccctaatggcggtgccattgccctgggccaccccctgggcatgagcggtgcacgcctggtactgactgcgttgcaccagctggagaagagtggcggtcgcaagggcctggcgaccatgtgtgtgggtgtcggccaaggtctggcgttggccatcgagcgggtttga

SEQ ID NO: 2546 - protein, 400 aa, Pseudomonas putida KT2440
MHDVFICDAIRTPIGRFGGALASVRADDLAAVPLKALIERNPGVQWDQVDEVFFGCANQAGEDNRNVARMALLLAGLPESIPGVTLNRLCASGMDAVGTAFRAIASGEMELVIAGGVESMSRAPFVMGKAESAYSRNMKLEDTTIGWRFINPLMKSQYGVDSMPETADNVADDYQVSRADQDAFALRSQQKAAAAQAAGFFAEEIVPVRIAHKKGEIIVERDEHLRPETTLEALTKLKPVNGPDKTVTAGNASGVNDGAAAMILASAAAVKKHGLTPRARVLGMASGGVAPRVMGIGPVPAVRKLTERLGIAVSDFDVIELNEAFASQGLAVLRELGVADDAPQVNPNGGAIALGHPLGMSGARLVLTALHQLEKSGGRKGLATMCVGVGQGLALAIERV

SEQ ID NO: 2547 - DNA, 1185 bp, Pseudomonas putida KT2440
  CDS (1)..(1185): transl_table=11
atgaaagatgccgtgatcgtcgccactgctcgcacccctatcggcaaagccatgcgtggcgccttcaacgacctgaaaacccccagcatgacggctgtcgctatccgcgccgcagtagaacgtgctggcatcgaaccggcgcaggtcgatgacctggtgctggggactgccatgcagagcggcactgccgcgatcaacccgggtcggctgtcggcgctggccgccggcctgccccaatcggtcagcggtcagaccgtcgaccgccagtgtgcttcaggcctgatggccattgccacggcggcgaagcagatcatggttgatggcatgcaggtgaccattggcgcaggtcaggagcagatcagcctggtgcagcaggtgcacaaccagctggccagtgaggcttatgaccccgcggtattgcgcatgagcgagcatgcctacatgccgatgctgcaaacggccgaacgggtggcccggcgttatggcataagccgcgaagcacaggacgtctacgccctgcagtcgcagcagcgcacggcggcggcgcaggcggcggggttgttcgccgctgaaatcgtgccggtgatcgcacgcaagaaggtggtggacaagctgacaggtgtcgtcagccatgaagaggtgcgccttacccaggacgaagggaaccggccggcgacgaccctggccgatctgcaggggctcaagcccgtggtcgaaggcggttgtgtcacggccggcaatgccagtcagctgtccgatggcgccagtgcctgcgtgctgatggaaggtgcgctggcggcgcgctcgggcatcgcggccctggggctttaccgcggtatcgccgtggctggcctggcccccgaggaaatgggcatcggcccggtgttggcggtgcccaagctactgcgccagcagggcctgacggtagacgatatcgggctatgggagctgaatgaggcgtttgcctgccaggtgctgtattgcgcccagcagttgcagatcgacccggcgaaactgaacgtcaacggcggcgccattgctatcggccacccctatggcatgagcggcgcgcggatggtcggccatgccttgctggagggcaagcgacgtaaggtgaagtacgtggtcgtgacgatgtgcgtgggcggcggcatgggcgcagcgggcctgttcgaagtgctctag

SEQ ID NO: 2548 - protein, 394 aa, Pseudomonas putida KT2440
MKDAVIVATARTPIGKAMRGAFNDLKTPSMTAVAIRAAVERAGIEPAQVDDLVLGTAMQSGTAAINPGRLSALAAGLPQSVSGQTVDRQCASGLMAIATAAKQIMVDGMQVTIGAGQEQISLVQQVHNQLASEAYDPAVLRMSEHAYMPMLQTAERVARRYGISREAQDVYALQSQQRTAAAQAAGLFAAEIVPVIARKKVVDKLTGVVSHEEVRLTQDEGNRPATTLADLQGLKPVVEGGCVTAGNASQLSDGASACVLMEGALAARSGIAALGLYRGIAVAGLAPEEMGIGPVLAVPKLLRQQGLTVDDIGLWELNEAFACQVLYCAQQLQIDPAKLNVNGGAIAIGHPYGMSGARMVGHALLEGKRRKVKYVVVTMCVGGGMGAAGLFEVL

SEQ ID NO: 2549 - DNA, 1176 bp, Pseudomonas putida KT2440
  CDS (1)..(1176): transl_table=11
atgagcctgaatccaagagacgtggtgattgtcgacttcggtcgcacgccaatgggccgctccaagggtggcatgcaccgcaacacccgcgccgaagacatgtcggcgcacctgatcagcaagctgctggaacgcaacggcaaggtcgacccgaaagaagtcgaggacgtgatctggggctgcgtcaaccagaccctggagcagggctggaacatcgcccgcatggcttcgctgatgaccccgatcccgcacacctctgcggcgcagaccgtcagccgcctgtgcggctcgtccatgagcgcgctgcacacggccgcccaggcgatcatgaccggtaacggtgatgtgttcgtggtcggtggcgtggagcacatgggccacgtcagcatgatgcatggcgtagaccccaacccgcacctgtccttgcatgccgccaaggcttccgggatgatgggcctgactgcagaaatgctcggcaagatgcacggcatcacccgtgagcagcaggacctgttcggcttgcgttcgcaccagctggcccacaaggccacggtcgaaggcaagttcaaggacgagatcatcccgatgcagggctacgacgagaacggcttcctgaaggtgttcgatttcgacgaaaccattcgcccggaaaccaccctcgaaggcctggcatcgctcaagcctgcgttcaacccgaaaggcggtacggtcacggccggtacctcgtcgcagatcaccgacggcgcctcgtgcatgatcgtcatgtccggtcagcgtgccatggacctcggtatccagccattggcggtgatccgttcgatggcagtggccggtgtcgacccggcaatcatgggctacggcccggtgccatcgacccagaaagccctcaagcgtgcgggcttgaccatggccgatatcgacttcatcgagctcaacgaagccttcgctgcgcaggccctgcccgtgctgaaagacttgaaagtgctcgacaagatggatgagaaggttaacctgcacggcggcgccattgctttgggccacccgttcggttgctccggggcgcggatttccggcaccctgctcaacgtcatgaagcaaaatggcggtacgctgggtgttgcgaccatgtgcgtcggcctgggccaaggtatcaccactgtcttcgaacgcgtctga

SEQ ID NO: 2550 - protein, 391 aa, Pseudomonas putida KT2440
MSLNPRDVVIVDFGRTPMGRSKGGMHRNTRAEDMSAHLISKLLERNGKVDPKEVEDVIWGCVNQTLEQGWNIARMASLMTPIPHTSAAQTVSRLCGSSMSALHTAAQAIMTGNGDVFVVGGVEHMGHVSMMHGVDPNPHLSLHAAKASGMMGLTAEMLGKMHGITREQQDLFGLRSHQLAHKATVEGKFKDEIIPMQGYDENGFLKVFDFDETIRPETTLEGLASLKPAFNPKGGTVTAGTSSQITDGASCMIVMSGQRAMDLGIQPLAVIRSMAVAGVDPAIMGYGPVPSTQKALKRAGLTMADIDFIELNEAFAAQALPVLKDLKVLDKMDEKVNLHGGAIALGHPFGCSGARISGTLLNVMKQNGGTLGVATMCVGLGQGITTVFERV

SEQ ID NO: 2551 - DNA, 1194 bp, Pseudomonas putida KT2440
  CDS (1)..(1194): transl_table=11
atgaccctcgccaatgaccccatcgttatcgtcagcgccgtgcgcacgcccatgggcgggttgcagggcgacctcaagagcctgactgcgccgcaactgggcagcgccgccattcgtgctgccgtggaacgggccggcatcgatgccgccggtgtcgagcaggtactgttcggctgcgtgctgccggccggccagggccaggcaccggcacgccaggccgcgctgggcgccgggctggacaagcacaccacctgcaccaccctgaacaagatgtgcggctcgggtatgcaagccgcgatcatggcccatgacctgctgctggccggcaccgcagacgtggtagtggcgggtggcatggaaagcatgaccaacgcgccgtacctgctggacaaagcccgtggcggctaccgcatgggccacggcaagatcatcgaccacatgttcatggacggtctcgaagacgcctacgacaaaggccgcctgatgggtacctttgccgaggactgtgcccaggccaatgccttcagccgcgaggcccaggaccagttcgccatcgcctcgctgacccgagcgcaggaagccatcagcagcggccgttttgccgccgagatcgtgccggtggaagtcaccgagggcaaggaaaagcgcgtcatcaaggatgacgagcagccgcccaaggcgcgtctggacaagattgcgcagctcaaaccggcgtttcgtgaaggcggcaccgtgacggcggccaacgccagttcgatttccgacggcgctgcggcgctggtactgatgcgccgctccgaggccgacaaacgtggcctcaagccattggccgtcatccacggccacgccgcctttgccgacaccccggcgctgttcccgaccgccccgatcggcgcgatcgacaaactgatgaaacgcaccggctggaacctggccgaagtcgacctgttcgagatcaacgaggccttcgccgtggtcaccctggcggccatgaaacacctcgacctgccacacgacaaggtcaatatccacggcggcgcctgcgccctcggtcacccgatcggcgcttctggcgcacgtattctggtcaccctgttgtcggccttgcgccagaacaatctgcgtcggggtgtggcggccatctgcatcggcggtggcgaggccacggccatggctgttgaatgcctgtactga

SEQ ID NO: 2552 - protein, 397 aa, Pseudomonas putida KT2440
MTLANDPIVIVSAVRTPMGGLQGDLKSLTAPQLGSAAIRAAVERAGIDAAGVEQVLFGCVLPAGQGQAPARQAALGAGLDKHTTCTTLNKMCGSGMQAAIMAHDLLLAGTADVVVAGGMESMTNAPYLLDKARGGYRMGHGKIIDHMFMDGLEDAYDKGRLMGTFAEDCAQANAFSREAQDQFAIASLTRAQEAISSGRFAAEIVPVEVTEGKEKRVIKDDEQPPKARLDKIAQLKPAFREGGTVTAANASSISDGAAALVLMRRSEADKRGLKPLAVIHGHAAFADTPALFPTAPIGAIDKLMKRTGWNLAEVDLFEINEAFAVVTLAAMKHLDLPHDKVNIHGGACALGHPIGASGARILVTLLSALRQNNLRRGVAAICIGGGEATAMAVECLY

SEQ ID NO: 2553 - DNA, 1221 bp, Pseudomonas putida KT2440
  CDS (1)..(1221): transl_table=11
atgaatgaaccgacccacgccgatgccttgatcatcgacgccgtgcgcacgcccattggccgctatgccggggccctgagcagcgtgcgcgccgacgacctggcggccatcccgctcaaagccttgatccagcgtcaccccgaactggactggaaagccattgatgacgttatcttcggctgtgccaaccaggctggcgaagacaaccgcaacgtggcccacatggcgagcctgctggccgggctgccactcgaagtaccagggaccacgatcaaccgcctgtgcggttccggtctggatgccatcggtaatgcggcacgtgccctgcgctgcggtgaagcggggctcatgctggccggtggtgtggagtccatgtcgcgtgcaccgtttgtgatgggtaagtcggagcaggcattcgggcgtgcggccgagctgttcgacaccaccatcggctggcgtttcgtcaacccgctgatgaaggccgcctacggcatcgattcgatgccggaaacggctgaaaacgtggccgaacagttcggcatctcgcgcgccgaccaggatgcctttgccctgcgcagccagcacaaagccgcagcagctcaggcccgcggccgcctggcgcgggaaatcgtgccggtcgaaatcccgcaacgcaaaggcccagccaaagtggtcgagcatgacgagcacccgcgcggcgacacgaccctggagcagctggctcggctcgggacgccgtttcgtgaaggcggcagcgtaacggcgggtaatgcctccggcgtgaatgacggcgcttgcgccctgctgctggccagcagcgccgcggcccgccgccatgggttgaaggcccgcggccgcatcgtcggcatggcggtggccggggttgagcccaggctgatgggcattggtccggtgcctgcgacccgcaaggtgctggcgctcaccggcctggcactggctgacctggatgtcatcgaactcaatgaggcctttgccgcccaagggctggccgtgttgcgcgagctgggcctggccgacgacgacccgcgagtcaaccgcaacggcggcgccatcgccctgggccatcccctgggcatgagcggtgcccggttggtgaccactgccttgcacgagcttgaagaaacggccggccgctacgccctgtgcaccatgtgcatcggcgtaggccaaggcattgccatgatcatcgagcgcctctga

SEQ ID NO: 2554 - protein, 406 aa, Pseudomonas putida KT2440
MNEPTHADALIIDAVRTPIGRYAGALSSVRADDLAAIPLKALIQRHPELDWKAIDDVIFGCANQAGEDNRNVAHMASLLAGLPLEVPGTTINRLCGSGLDAIGNAARALRCGEAGLMLAGGVESMSRAPFVMGKSEQAFGRAAELFDTTIGWRFVNPLMKAAYGIDSMPETAENVAEQFGISRADQDAFALRSQHKAAAAQARGRLAREIVPVEIPQRKGPAKVVEHDEHPRGDTTLEQLARLGTPFREGGSVTAGNASGVNDGACALLLASSAAARRHGLKARGRIVGMAVAGVEPRLMGIGPVPATRKVLALTGLALADLDVIELNEAFAAQGLAVLRELGLADDDPRVNRNGGAIALGHPLGMSGARLVTTALHELEETAGRYALCTMCIGVGQGIAMIIERL

SEQ ID NO: 2555 - DNA, 1185 bp, Pseudomonas putida KT2440
  CDS (1)..(1185): transl_table=11
atgagcagcgcagaaatctacgtcgtcagtgccgtccgttcagccattggtggctttggcggttccctcaaggacctgccgctggccgacctggccagcgccgtgacccgcgccgccatcgagcgttcgggcctggccgccgagcaagtcggccacatggtgatgggcacggtaatccccaccgaaccgcgtgacgcctacctggcacgggtagcggcaatgaacgctggcatccccaaggaaacgccggcattcaacgtcaaccgcctgtgcgggtctggcctgcaggctattgtctctgcggcccagggcctgttgctgggcgacaccgatgtggccgtcgcggccggcgccgagtccatgagccgtggcccttacctgctgccacaggcgcgctggggtgcacgcatgggtgacctgcaaggcatcgactataccgtcggcgtgctgcaggacccgttccagcacttccacatgggcatcactgccgagaacgtttcggccaagtacggcattacccgcgaaatgcaggacgaactggcactgaccagccagcgccgcgccgctcgtgcgattgccgagggccgcttcgccagccagatcgttgcgctggagctgaaaacccgcaagggcagcgtgcagttcagtgtcgacgagcatgtgcgcgctgatgtgaccgccgaacaactggccggcatgaagccggtgttcaagaaagacggcaccgtcactgccggcaacgccagcggtatcaacgatggcgccgccggcctggtgttggccaccggtgacgcggtgcgccgcctgggcctgaagccactggcacgcctggtgggctatgcccatgccggggtggaacctgagctgatgggccttgggccgatcccggccacccgcaaagtgctggaaaaaaccggcctgaacctgcaagacctggatgtgatcgagtccaacgaagccttcgctgcccaggcctgcgccgttgcccgcgagctgggcttcgacccggaaaaggtcaaccccaacggttcgggcatttccctgggccacccggtgggtgccaccggtgcgatcatcgccaccaaggccatccatgagctgcagcgcatccagggccgctacgccctggccacgatgtgtatcggcggtggccaaggcatcgccgtcgtgttcgagcgcgtctga

SEQ ID NO: 2556 - protein, 394 aa, Pseudomonas putida KT2440
MSSAEIYVVSAVRSAIGGFGGSLKDLPLADLASAVTRAAIERSGLAAEQVGHMVMGTVIPTEPRDAYLARVAAMNAGIPKETPAFNVNRLCGSGLQAIVSAAQGLLLGDTDVAVAAGAESMSRGPYLLPQARWGARMGDLQGIDYTVGVLQDPFQHFHMGITAENVSAKYGITREMQDELALTSQRRAARAIAEGRFASQIVALELKTRKGSVQFSVDEHVRADVTAEQLAGMKPVFKKDGTVTAGNASGINDGAAGLVLATGDAVRRLGLKPLARLVGYAHAGVEPELMGLGPIPATRKVLEKTGLNLQDLDVIESNEAFAAQACAVARELGFDPEKVNPNGSGISLGHPVGATGAIIATKAIHELQRIQGRYALATMCIGGGQGIAVVFERV

SEQ ID NO: 2557 - DNA, 1179 bp, Pseudomonas putida KT2440
  CDS (1)..(1179): transl_table=11
atgaacgacgtggtgatcgtcgccgcaacccgtaccgccatcggcagcttccagggcgccttggccacagtgcctgcggttgacctcggcgccgccgtgatcaagcaactgctgaaacaaaccgggctggacccggcgcaggtcgacgaagtcatcctcggccaagtgctcactgccggtgccggtcagaacccggcacgccaggcagcgatcaaggctggcctacccttcagcgtaccggccctgaccctgaacaaggtctgcggctcgggcctcaaggccctgcaccttgccgcccaggcgatccgctgtggcgatgccgaggtggtgattgccggtggccaggagaacatgagccttgccccctacgtgatgccctcggcccgcaccggccagcgcatgggccatggccaactgatcgatagcatgatcacggacggcctgtgggatgccttcaatgactaccacatgggcatcactgccgaaaacctggtggacaagtacggcctcagccgtgagcagcaggatgcctttgctgccgaatcgcagcgcaaggcagtggcagcgatcgaggccggccgtttcgacgctgaaatcacccccatcgtgctgccgcagaaaaagggcgagcccaaggtttttgcccgtgacgagcaaccacgcccggacaccaccgccgagtccctggccaaactgcgcccggccttcaagaaggacggcagcgtcaccgcaggcaatgcctccagcctgaacgacggcgccgccgccgtgcttttgatgagcgcagcgaaggccgaggcgttgggcctgccggtgctggcgaagatcgccgcctacgccagtgccggggtagaccccgcgatcatgggcattggtccggtttcggcgacccagcgttgcctggacaaggccggttggcaactggccgaactggacctgatcgaagccaacgaagcctttgccgcccaggcgctggccgtgggcaatgcgctggcatgggatgccgcgcgggttaacgtcaatggaggagcgattgccctgggccacccgattggtgcttccgggtgcagggtgctggtgaccctgttgcacgagatgatcaaacgggatgtcaagaaaggcctggcgaccttgtgcattggtggtggacaaggggtggcgctggccatcgagcgctga

SEQ ID NO: 2558 - protein, 392 aa, Pseudomonas putida KT2440
MNDVVIVAATRTAIGSFQGALATVPAVDLGAAVIKQLLKQTGLDPAQVDEVILGQVLTAGAGQNPARQAAIKAGLPFSVPALTLNKVCGSGLKALHLAAQAIRCGDAEVVIAGGQENMSLAPYVMPSARTGQRMGHGQLIDSMITDGLWDAFNDYHMGITAENLVDKYGLSREQQDAFAAESQRKAVAAIEAGRFDAEITPIVLPQKKGEPKVFARDEQPRPDTTAESLAKLRPAFKKDGSVTAGNASSLNDGAAAVLLMSAAKAEALGLPVLAKIAAYASAGVDPAIMGIGPVSATQRCLDKAGWQLAELDLIEANEAFAAQALAVGNALAWDAARVNVNGGAIALGHPIGASGCRVLVTLLHEMIKRDVKKGLATLCIGGGQGVALAIER

SEQ ID NO: 2559 - DNA, 1176 bp, Clostridium tetani E88
  CDS (1)..(1176): transl_table=11
atgaaagaagttgttattgttagtgcagttagaactgccatgggtaaatttggaggaactttaaaagatgtacctgcagttgaattaggtgctacagttattaaagaagcaataaacagagcgggaattaaacctgaaattatagacgaagttataatgggaaatgttatccaagcaggacttggacaaagtccaggaagacaagcagctgtaaaagctggaatacctgttgaagtaccagcatttactttaaataaggtttgcggatcaggattaagagcagttgggctagcagctcaaatgataaaagctggagatgctgatgtagtaatagctggtggaatggaaaacatgtctgcagcaccatatgttttaccaaacgctagatggggacaaagaatgtttgatggtaaaatggtagatactatggtaaaggatggtttatgggaatcattcaatgattatcatatgggaatgacagcagaaaacatagcagagaaatgggaattaacaagagaaatgcaagatgagtttgcatgtgcttcacaaaataaagctgaaaaagctattaaagaaggaaagtttaaagacgaaatcgttccagtagttataaaaactagaaaaggtgaagttgtatttgatacagatgagttcccaagatttggtgctactgtagaatcattagcaaagttaaaaccagcatttaaaaaagatggaacagttacagcaggaaatgcatcaggtataaatgatggtgcagctgcgttagttataatgagtgcagaaaaagctgaagaactaggattaaaaccattagctaagatagcttcctatggttcaaaaggattagacccagcttatatgggatatggaccagtaggtgcaacaaaagttgctcttgaaaaagctggatggaaagtagaagacttagatttaatcgaagctaatgaagcttttgcgtcacaaagtttagctgttgctaaagatctaggatttgatatggaaaaagtaaatgttaatggtggagctatagcacttggacatccagtgggatgctctggagcaagaatattagttacattactacatgaaatgcaaagaagagattctaaaaaaggtttagctactctttgcataggtggaggaatgggaacagctcttcttgtagaaagataa

SEQ ID NO: 2560 - protein, 391 aa, Clostridium tetani E88
MKEVVIVSAVRTAMGKFGGTLKDVPAVELGATVIKEAINRAGIKPEIIDEVIMGNVIQAGLGQSPGRQAAVKAGIPVEVPAFTLNKVCGSGLRAVGLAAQMIKAGDADVVIAGGMENMSAAPYVLPNARWGQRMFDGKMVDTMVKDGLWESFNDYHMGMTAENIAEKWELTREMQDEFACASQNKAEKAIKEGKFKDEIVPVVIKTRKGEVVFDTDEFPRFGATVESLAKLKPAFKKDGTVTAGNASGINDGAAALVIMSAEKAEELGLKPLAKIASYGSKGLDPAYMGYGPVGATKVALEKAGWKVEDLDLIEANEAFASQSLAVAKDLGFDMEKVNVNGGAIALGHPVGCSGARILVTLLHEMQRRDSKKGLATLCIGGGMGTALLVER

SEQ ID NO: 2561 - DNA, 1200 bp, Streptomyces avermitilis MA-4680
  CDS (1)..(1200): transl_table=11
atgagggaagcagtcatcgtttcgacggcacggacgccgatcggaaaggcctaccggggcgcgttcaacgacacccaggcgcaggaacttgccgcccatgccctttcgcacgcggtgcggcgcgccgggctcgagggaggtgaggtcgaggatgtgatcttcggctgcgccgtgcagcagggatcctccggtggcaacgtggcgcgtcaggccgctctccgtgccggacttccggacaccgtgtcgggcatgacggtcgaccggcagtgctcgtcgggcctgatggccattgcgacggccgccaagcagattgtcacggacggcatgcaggtcgctgtcggcggcggtgtcgagtcgatctccttggtgcagaacgaccgcatgaacacccaccgcatggcggatccctggctggtcgagcacaagccgagtatctacatgccgatgttgcagacggcggagatcgtcgccgaacgttacggcgtgagccgggaacgccaggacgagttcgcgctggtgtcacagcagcgcaccgcggcggcgcaggaggccggccggttcgaccgcgagatcgtggcgctcggcagcgtcaagaaggtcctcgacaagcagaccggcgaggtgcgggacgaggaggtcaccctgacccgggacgagggcaaccgcgcgtcgacgacgctcgaaggtctggccgggctggcgccggtgcttccggacggtcaggtgagcgcgcattccagcgtgacggcgggcaactcctcgcagttgtcggacggggcttcggcgtcggtactgatggagtcgaaggaggccgagcgccgcggactggaaccgctgggcgtctaccggggtatgaccgttgccggttgtgggccggacgagatgggcatcggtccggtgttcgccattccgaaactgctgaagcagcacgacctcaccatggacgacatcggcctgtgggaactcaacgaggcgttcgcttcccaggcgttgtactgccgtgacgaactgcatatcgacccggagcggttcaacgtcgacggcggcgcgatctcggtcggtcatccgtacggaatgaccggtgcccggctggtggggcatgccctcatcgagggcaagcgccgaggtgtccggtatgtggtggtctcgatgtgcgtcggcggcggcatgggcgcggccggactgttcgaggtcgtctga

SEQ ID NO: 2562 - protein, 399 aa, Streptomyces avermitilis MA-4680
MREAVIVSTARTPIGKAYRGAFNDTQAQELAAHALSHAVRRAGLEGGEVEDVIFGCAVQQGSSGGNVARQAALRAGLPDTVSGMTVDRQCSSGLMAIATAAKQIVTDGMQVAVGGGVESISLVQNDRMNTHRMADPWLVEHKPSIYMPMLQTAEIVAERYGVSRERQDEFALVSQQRTAAAQEAGRFDREIVALGSVKKVLDKQTGEVRDEEVTLTRDEGNRASTTLEGLAGLAPVLPDGQVSAHSSVTAGNSSQLSDGASASVLMESKEAERRGLEPLGVYRGMTVAGCGPDEMGIGPVFAIPKLLKQHDLTMDDIGLWELNEAFASQALYCRDELHIDPERFNVDGGAISVGHPYGMTGARLVGHALIEGKRRGVRYVVVSMCVGGGMGAAGLFEVV

SEQ ID NO: 2563 - DNA, 1173 bp, Bacillus cereus ATCC 14579
  CDS (1)..(1173): transl_table=11
atgagagaagctgtcattgttgcgggagcaagaacaccaattggaaaggcaaagaggggttcattaaaaacagttcgtcctgacgatctaggggcgttagtagtaaaggaaacgttaaagcgtgcgaattatgaaggaccaatcgatgatttaattttcggttgtgcgatgccagaagcagagcaaggtttaaatatggctcgtaatatcggcggattagcaggactttcttacgatgttccagctattacgattaaccgttactgttcttcaggtttacaaagtatcgcttacggagcagagcgtattatgcttggtcactctgaagctgtattatcaggcggagcagaatcaatgagtttagttccaatgatgggacacgttgttcgtccgaatagtcgccttgtagaagcggctccagaatattatatgggtatgggacatacagcagagcaagttgctgtgaaatatggaatttctcgtgaagagcaagatgcatttgcagtaagaagtcatcaacgtgctgcgaaagcattagctgcaggaaactttgctgatgaaacagtacctgtagatgtgacgttacgctcggttggatcaaacaataaactgcaagaagaaacaatcactttcgcacaagacgaaggtgtaagagcagagacgacgctagacattttagggaaattacgtccagcatttaacgttcgcggttctgtaacagctggtaattcttcacaaatgagtgacggtgcagcatctgtactattaatggatcgcgaaaaagcagtgagcgatggcatgaagccacttgcgaaattccgttcatttgcagtagctggcgtaccaccagaagtaatgggaatcggcccaatcgctgcaattccaaaagcgctaaaactagctggcttagagctatctgatattggcttatttgaactaaatgaagcattcgcttctcaatcaattcaagttattcgtgaacttggtttagatgaagaaaaagtaaacgtaaacggtggtgcaatcgcacttggacatccacttggctgtacaggggcaaaactaacactatctcttattcacgaaatgaaacgccgcaacgaacaattcggtatcgtaacaatgtgtatcggcggcggaatgggagcagcgggagtatttgaattactttaa

SEQ ID NO: 2564 - protein, 390 aa, Bacillus cereus ATCC 14579
MREAVIVAGARTPIGKAKRGSLKTVRPDDLGALVVKETLKRANYEGPIDDLIFGCAMPEAEQGLNMARNIGGLAGLSYDVPAITINRYCSSGLQSIAYGAERIMLGHSEAVLSGGAESMSLVPMMGHVVRPNSRLVEAAPEYYMGMGHTAEQVAVKYGISREEQDAFAVRSHQRAAKALAAGNFADETVPVDVTLRSVGSNNKLQEETITFAQDEGVRAETTLDILGKLRPAFNVRGSVTAGNSSQMSDGAASVLLMDREKAVSDGMKPLAKFRSFAVAGVPPEVMGIGPIAAIPKALKLAGLELSDIGLFELNEAFASQSIQVIRELGLDEEKVNVNGGAIALGHPLGCTGAKLTLSLIHEMKRRNEQFGIVTMCIGGGMGAAGVFELL

SEQ ID NO: 2565 - DNA, 1197 bp, Arabidopsis thaliana
  CDS (1)..(1197)
atgaatgttgatgaatcagatgtttgcattgtgggtgttgcacgtactccaatgggtggctttctcggatctctttcatctttacctgccacaaagcttggatctttagctattgcagctgctttgaagagagcaaatgttgatccagctcttgttcaagaagttgtctttggcaatgttcttagtgctaatttgggtcaagctcctgctcgtcaagctgctttaggtgcaggaatccctaactctgttatctgtactacagttaacaaggtttgtgcatcaggcatgaaagcggtaatgattgctgctcaaagtatccagttagggatcaatgatgtagttgtggcgggtggtatggaaagcatgtctaatacaccaaaatatttggcagaagcaaggaagggatctcgttttggtcatgattctttagtagatggaatgttgaaggatggactatgggatgtctataacgactgtgggatgggaagctgtgcagaattatgcgctgagaagtttcagattacaagggagcagcaagatgactatgcagttcagagttttgagcgtggtattgctgcccaggaagctggcgccttcacatgggaaatcgtcccggttgaagtttctggaggaagaggtaggccatcaaccattgttgacaaggacgaaggtcttgggaagtttgatgctgcaaaattgaggaaactccgtcctagtttcaaagagaatggagggactgttacagctggaaatgcgtctagcataagtgatggtgcagctgcccttgtcctagtgagcggagagaaggctcttcagctaggacttctagtattagcaaaaattaaagggtatggtgacgcagctcaggaaccagagtttttcactactgctcctgctcttgctataccaaaagccattgcacatgctggtttggaatcttctcaagttgattactatgagatcaatgaagcatttgcagttgtagcacttgcaaatcaaaagctactcgggattgctccagagaaagtgaacgtaaatggaggagctgtctccttaggacaccctctaggctgcagtggcgcccgtattctaatcacgttgcttgggatactaaagaagagaaacggaaagtacggtgtgggaggagtgtgcaacggaggaggaggtgcttctgctctagttcttgagctcctttga

SEQ ID NO: 2566 - protein, 398 aa, Arabidopsis thaliana
MNVDESDVCIVGVARTPMGGFLGSLSSLPATKLGSLAIAAALKRANVDPALVQEVVFGNVLSANLGQAPARQAALGAGIPNSVICTTVNKVCASGMKAVMIAAQSIQLGINDVVVAGGMESMSNTPKYLAEARKGSRFGHDSLVDGMLKDGLWDVYNDCGMGSCAELCAEKFQITREQQDDYAVQSFERGIAAQEAGAFTWEIVPVEVSGGRGRPSTIVDKDEGLGKFDAAKLRKLRPSFKENGGTVTAGNASSISDGAAALVLVSGEKALQLGLLVLAKIKGYGDAAQEPEFFTTAPALAIPKAIAHAGLESSQVDYYEINEAFAVVALANQKLLGIAPEKVNVNGGAVSLGHPLGCSGARILITLLGILKKRNGKYGVGGVCNGGGGASALVLELL

SEQ ID NO: 2567 - DNA, 1245 bp, Arabidopsis thaliana
  CDS (1)..(1245)
atggctgcttttggagatgacattgtgattgtagcggcatatcgtaccgccatttgcaaagcgagacgtggaggtttcaaagacactcttcctgatgatcttcttgcttctgttcttaaggctgtagtggaaagaacatctttggatccaagtgaagttggtgatatcgttgttggtaccgtgatagcgcctggttctcagagagcaatggagtgtagagttgcagcttattttgctggttttcctgactccgtgccagttagaactgtcaatagacaatgctcatcaggactacaagcagttgctgatgttgctgcttccattagagctggttattacgacattggtattggtgctggagtggaatcaatgtcaactgatcatattcctggaggcggctttcatggctctaatccaagagcacaggatttcccaaaagcccgtgattgtttgcttccaatgggaattacttctgaaaacgttgcagaaaggttcggtgtcacaagagaagagcaagatatggctgcggtggagtctcacaaacgcgctgcagctgcaatcgcgtctggtaaactcaaggatgaaatcattcctgttgctactaagattgtggaccctgagactaaagcagagaaggcaatcgtcgtatctgttgatgacggtgtacgtccaaactcaaacatggcagatttggcaaagctgaagactgtctttaaacagaacggttccaccacagctggcaatgctagtcagatcagtgatggtgctggagcagtactgctaatgaagagaagtttggctatgaagaagggacttcccattcttggagtattcaggagttttgctgttactggtgtggaaccatctgtaatgggtattggtccagctgttgccattcccgctgcaactaagctcgcagggctcaacgtcagcgatattgatctattcgagatcaatgaggcatttgcatctcagtatgtgtactcttgcaagaagttagagctggatatggaaaaggtcaatgttaatggaggagccattgctattggccatcccctgggtgctacaggagctcgatgtgttgcgacattgttgcacgagatgaagcggagaggaaaagattgccgctttggagtaatctcaatgtgcataggcactggaatgggagctgcagctgtttttgagaggggagactctgttgataacttgtccaacgctcgtgtggctaacggggatagtcattag

SEQ ID NO: 2568 - protein, 414 aa, Arabidopsis thaliana
MAAFGDDIVIVAAYRTAICKARRGGFKDTLPDDLLASVLKAVVERTSLDPSEVGDIVVGTVIAPGSQRAMECRVAAYFAGFPDSVPVRTVNRQCSSGLQAVADVAASIRAGYYDIGIGAGVESMSTDHIPGGGFHGSNPRAQDFPKARDCLLPMGITSENVAERFGVTREEQDMAAVESHKRAAAAIASGKLKDEIIPVATKIVDPETKAEKAIVVSVDDGVRPNSNMADLAKLKTVFKQNGSTTAGNASQISDGAGAVLLMKRSLAMKKGLPILGVFRSFAVTGVEPSVMGIGPAVAIPAATKLAGLNVSDIDLFEINEAFASQYVYSCKKLELDMEKVNVNGGAIAIGHPLGATGARCVATLLHEMKRRGKDCRFGVISMCIGTGMGAAAVFERGDSVDNLSNARVANGDSH

SEQ ID NO: 2569 - DNA, 1185 bp, Bordetella bronchiseptica RB50
  CDS (1)..(1185): transl_table=11
atgagcgacgacatcgtcatcgtatcgaccgcgcgcacgcccatcggcaaggcctatcggggcgccttcaacaatacccatggcgccaccctgggcgggcacgccgtcgagcacgcggtgcggcgcgccgggatcgagccggccgaggtcgatgacctcatcatggggtgcggccgcccggaaggaacggcgggcgagaacatcgcgcgccaggccgccttgcgcgccggcctgccggtcgaggtgcccggcgtcacggtgaaccggctttgctcgtccgggctgcaggccatcgccatgggcgcccagtccatcctgtgcggcagcgccgatatcgtggtggcgggcgggctggattcgatttcctgcgtgcagaacgaacacatgaatcaccacatggaacaggacccctggctggcgcggcacctgccggagattttcctgcccatgatcgataccgccgaagtggtcgcccggcgctacggcatttcgcgccagcgccaggacgagtacgcggcgcgcagccagcagcgcgccgcgcaggcgcgcgcggccggccgcatgcgcgacgaaatcgcgcccatgcgtgtgagccacctggcggccgacccgcacggcgcgccgcccgttgaaaccgaaatgctggtggccgaggacgaaggcgtgcgccccgggacgacttccgaaaagctggccgcgctcaagagcgtgcgcgagggcggctgcattacggcgggcaatgccagccagctttcggacggcgcctcggcctgcgtgctgatgcgcgcggctgccgcgcgggcgcgtggcctgcggcccctgggccgcttccgcggcttcgcggtggcgggctgccgtcccgatgaaatgggcatcggcccggtgcaggccgtgccccgcctgctggcgcgcgccggcctggcgatcggcgacatcggcctgtgggagttgaacgaggcgttcgccgtgcaggtaatctattgccgtgaccgcctgggcctgcccgatgaacgcctgaacgtgaacggcggcgccatcgcgctgggccatccctatggcatgtccggcgcgcggctggtggggcatgcgctgctggaagggcgcgcccggggcgtgcgttatgtggtggtgaccatgtgcgtgggcggcggcatgggcgccgcgggactattcgaggtgctatga

SEQ ID NO: 2570 - protein, 394 aa, Bordetella bronchiseptica RB50
MSDDIVIVSTARTPIGKAYRGAFNNTHGATLGGHAVEHAVRRAGIEPAEVDDLIMGCGRPEGTAGENIARQAALRAGLPVEVPGVTVNRLCSSGLQAIAMGAQSILCGSADIVVAGGLDSISCVQNEHMNHHMEQDPWLARHLPEIFLPMIDTAEVVARRYGISRQRQDEYAARSQQRAAQARAAGRMRDEIAPMRVSHLAADPHGAPPVETEMLVAEDEGVRPGTTSEKLAALKSVREGGCITAGNASQLSDGASACVLMRAAAARARGLRPLGRFRGFAVAGCRPDEMGIGPVQAVPRLLARAGLAIGDIGLWELNEAFAVQVIYCRDRLGLPDERLNVNGGAIALGHPYGMSGARLVGHALLEGRARGVRYVVVTMCVGGGMGAAGLFEVL

SEQ ID NO: 2571 - DNA, 1179 bp, Chromobacterium violaceum ATCC 12472
  CDS (1)..(1179): transl_table=11
atggaagtagcaatcgtagccgcgcagcgcaccgccatcggcagcttcggcggcggcttggccaagattccggcgccggagctgggcgccactgtgatcaaggcgttgctggagaagaccggcgtcaaaccggaagacgtcagcgaagtgatcctgggccaggtgctgaccgccggcagcggccagaacccggcccgccaggcgctgatcaaggccggcctgccggtcaccactccggccaccacgctgaacgtggtgtgcggctccggcctgcgcgccgtgcatctggcggcccaggccatcctggccggcgacgccgacatcgtcatcgccggcggccaggaaagcatgtcgctgtccccgcacatcctgccgggctcgcgcgacggtttccgcatgggcaacgcccaactggtggacaccatggtcaacgacggcctgaccgacgcctacaacgcctaccacatgggcatcaccgctgagaacgtggcggccaaatacggcatcggccgcgaagagcaggacgccttctcgctgcagtcgcagcagcgcgccgccgccgcccagaaggccggcaaattccgggacgagatcgttccggtgctggtgccgcagcgcaagggcgatccgctggccttcgacgccgacgagttcatcaagcacgacgccagcgccgacggcctggccaagctgcgcccggccttcaagaaggacggcacggtcaccgccggcaacgcctccggcatcaacgacggcgccgccgctgtgctgctgatgtccacgcaaaaggccgatcagctgggcctgaagccgctggccatcatcaagggctacgcgctgaccggctgcgagccggaaatcatgggcatcggcccggtatccgccacccgcaaggcgctgtccaaggccggctggacggtggaagacctggacctggtggaggccaacgaggccttcgccgctcaggcgctgggcgtggccaaggagctgggctggggctcggacaaggtcaacgtcaacggcggcgccatcgcgctgggccacccgatcggcgcctccggctgccgcgtgctggtgaccctgctgcacgaaatgcagcgccgcggcgccaagaagggcctggccacgctgtgcatcggcggcggcatgggcgtggcgctggcggtcgagcgtccgtaa

SEQ ID NO: 2572 - protein, 392 aa, Chromobacterium violaceum ATCC 12472
MEVAIVAAQRTAIGSFGGGLAKIPAPELGATVIKALLEKTGVKPEDVSEVILGQVLTAGSGQNPARQALIKAGLPVTTPATTLNVVCGSGLRAVHLAAQAILAGDADIVIAGGQESMSLSPHILPGSRDGFRMGNAQLVDTMVNDGLTDAYNAYHMGITAENVAAKYGIGREEQDAFSLQSQQRAAAAQKAGKFRDEIVPVLVPQRKGDPLAFDADEFIKHDASADGLAKLRPAFKKDGTVTAGNASGINDGAAAVLLMSTQKADQLGLKPLAIIKGYALTGCEPEIMGIGPVSATRKALSKAGWTVEDLDLVEANEAFAAQALGVAKELGWGSDKVNVNGGAIALGHPIGASGCRVLVTLLHEMQRRGAKKGLATLCIGGGMGVALAVERP

SEQ ID NO: 2573 - DNA, 1248 bp, Arabidopsis thaliana
  CDS (1)..(1248)
atggctccgcctgtctctgatgattccctacagcctcgagatgtttgtgttgtgggagtggcgcgaacgcctataggggacttccttggctccctctcgtctttgactgctacaagacttgggtccatagccatccaagccgcacttaagagagcacatgttgatccggcccttgtggaagaggtcttctttggcaatgtcttaactgccaatcttgggcaagcaccagcaagacaggctgcacttggtgctgggattccctattctgtgatctgcaccactatcaacaaagtttgtgctgcaggaatgaaatctgtaatgctagcgtctcaaagtatccagctcggcttgaatgatattgttgttgctggtgggatggagagcatgtcaaacgtacctaagtacctcccggacgcaagaaggggttctcgattaggtcatgatactgttgttgatggtatgatgaaagatggactttgggatgtctataatgactttggaatgggagtttgtggagaaatatgcgctgaccagtaccgtattacaagagaagaacaggatgcttatgctatccagagctttgagcgtggtattgctgcgcaaaacactcagttgttcgcttgggaaattgttccggtcgaagtttccactggaagagggaggccttcagttgttattgacaaggatgaaggattggggaagtttgatgcagccaagttaaaaaagcttagaccaagtttcaaggaggatgggggatcagtcactgctggaaatgcatcaagcataagtgatggtgcggcagcgttagtgctagtgagtggagagaaggctcttgagcttggactgcatgttatcgctaagattagaggatacgctgatgctgctcaggcaccagagttattcacaaccacgccagctcttgctattcctaaagctataaagcgggctggtttggatgcatctcaagtggattattatgaaataaacgaagcattttctgtggtagctctagccaatcagaaactactgggattagatcctgaacggctcaatgcgcatggaggggctgtttcactgggacatccattgggctgtagcggtgctcgtatcttggtcacattattgggggtgttgagagcaaagaagggaaagtatggagtggcatcaatatgcaacggaggaggaggagcatcagcacttgtccttgagttcatgtcggagaagacaatcggatattcggcactctga

SEQ ID NO: 2574 - protein, 415 aa, Arabidopsis thaliana
MAPPVSDDSLQPRDVCVVGVARTPIGDFLGSLSSLTATRLGSIAIQAALKRAHVDPALVEEVFFGNVLTANLGQAPARQAALGAGIPYSVICTTINKVCAAGMKSVMLASQSIQLGLNDIVVAGGMESMSNVPKYLPDARRGSRLGHDTVVDGMMKDGLWDVYNDFGMGVCGEICADQYRITREEQDAYAIQSFERGIAAQNTQLFAWEIVPVEVSTGRGRPSVVIDKDEGLGKFDAAKLKKLRPSFKEDGGSVTAGNASSISDGAAALVLVSGEKALELGLHVIAKIRGYADAAQAPELFTTTPALAIPKAIKRAGLDASQVDYYEINEAFSVVALANQKLLGLDPERLNAHGGAVSLGHPLGCSGARILVTLLGVLRAKKGKYGVASICNGGGGASALVLEFMSEKTIGYSAL

SEQ ID NO: 2575 - DNA, 1173 bp, Bacillus cereus ATCC 10987
  CDS (1)..(1173): transl_table=11
atgagagaagctgtcattgttgcgggagcaagaacaccaattggaaaagcaaagaggggttcattaaaaacagttcgtcctgacgatttaggggcgttagtagtaaaagaaacgttaaagcgtgcgaattatgaaggaccaatcgatgatttaattttcggttgtgcgatgccagaagcagagcaaggtttaaatatggctcgtaatatcggcggattagcaggactttcttacgatgttccagctattacaattaaccgttactgttcttcaggtttacaaagtatcgcttacggagcagagcgcattatgcttggtcactcagaagctgtattatcaggcggagcggaatcaatgagtttagttccaatgatgggacacgttgttcgtccaaatagccgccttgtagaagcagctccagaatattatatgggtatgggacatacagcagagcaagttgctgtgaaatatggaatttctcgtgaagagcaagatgcatttgcagtacgaagtcatcaacgtgctgcgaaagcattagctgcaggaaactttgctgatgaaacagtacctgtagatgtaacgttacgtactgttggatcaaataacaaactgcaagaagaaacaatcactttcacgcaagacgaaggtgtaagagcagaaacgacgatagacattttaggtaaattacgtccagcatttaacgttcgcggttctgtaacagctggtaactcttcacaaatgagtgatggtgcagcatctgtattattaatggaccgtgaaaaagcagtaagcgatggtatgaagccacttgcgaaattccgttcatttgcagtagcgggtgtaccaccagaagtaatgggaattggcccaatcgcagcaattcctaaagcattaaaactagctggcttagagctatctgatattggcttattcgaactaaatgaagcattcgcttctcaatcgattcaagttattcgtgaacttggtttagatgaagaaaaagtaaacgtaaacggcggtgcaatcgcacttggacatccacttggctgtacaggagcaaaactaacactatctcttattcacgaaatgaaacgccgcaacgaacaattcggtatcgtaacaatgtgtatcggcggcggaatgggagcagcgggagtgtttgaattactataa

SEQ ID NO: 2576 - protein, 390 aa, Bacillus cereus ATCC 10987
MREAVIVAGARTPIGKAKRGSLKTVRPDDLGALVVKETLKRANYEGPIDDLIFGCAMPEAEQGLNMARNIGGLAGLSYDVPAITINRYCSSGLQSIAYGAERIMLGHSEAVLSGGAESMSLVPMMGHVVRPNSRLVEAAPEYYMGMGHTAEQVAVKYGISREEQDAFAVRSHQRAAKALAAGNFADETVPVDVTLRTVGSNNKLQEETITFTQDEGVRAETTIDILGKLRPAFNVRGSVTAGNSSQMSDGAASVLLMDREKAVSDGMKPLAKFRSFAVAGVPPEVMGIGPIAAIPKALKLAGLELSDIGLFELNEAFASQSIQVIRELGLDEEKVNVNGGAIALGHPLGCTGAKLTLSLIHEMKRRNEQFGIVTMCIGGGMGAAGVFELL

SEQ ID NO: 2577 - DNA, 1212 bp, Ashbya gossypii ATCC 10895
  CDS (1)..(1212)
atgtcgagcagattgaacaacatcaaggaccacgtcacaggccagtcgcaggccaccgtcaagggcacaagccctgacgacgtggtgatcgtggcagcataccgtactgccatcgccaaggcattcaagggggggttccacgagatgcccagcgaccagctgctctacgagttcttggtcaagttcttcgagaaggtggatgtggacaagaagctgatccaggaggtcacatgcggtaacgtgttgaacctgggcgcgggcgctaacgagcaccgcgctgcctgcctggccgcgggcgtgcccttcaacgtgccattcatggcgattaatagacagtgttcctcggggttgactgcggtaaacgacattgccaacaagatcaaggtcgggcagatcaatgtcgggcttgcgcttggcgtggagtccatgtcggtcaactacccacgcatgaacttcgaccacacctcgccagacctacaggagaacaaggaggcgcgcaagtgctacattcctatgggaatcacgaacgagaacgttgcgaaggccttcaagatcccccgcgctgtccaggacgagtttgctgcggattcttacaagaaggctgaggcggcggtcaagggcggtctgttccaggaggagattttgccaatcaccaatccagatgggaaggtgatcaacaccgacgagggcccaagaaagggcgtgaccgccgagagcctcggcaagttgcgtcctgccttcatcccagagaagggtgtcaccactgctggtaacgcatcccaggtttcggacggtgccgcgggtgttctgctagccagaagatctgttgccgagaaattgggtctgcctatcctaggcaaatatgtcgcattccaggctgtcggtgtgcctccagagatcatgggtgttggtcctgcctacgcaattcctgccgtgttggagcagaccggcttgcaggtcggcgacgtcgacatcttcgagatcaatgaggcttttgcaggccaggccttgtactgtgttgagaagttgggtatcgacaagacgaagctaaacccacgcggtggtgccattgcccttggccacccacttggttgcactggtgcgcgccagattgctactattatgcgggaactacagcctggtcagattggtctaaccagtatgtgtatcggtagtggtatgggtgccgctgccatttttgttaaggaatga

SEQ ID NO: 2578 - protein, 403 aa, Ashbya gossypii ATCC 10895
MSSRLNNIKDHVTGQSQATVKGTSPDDVVIVAAYRTAIAKAFKGGFHEMPSDQLLYEFLVKFFEKVDVDKKLIQEVTCGNVLNLGAGANEHRAACLAAGVPFNVPFMAINRQCSSGLTAVNDIANKIKVGQINVGLALGVESMSVNYPRMNFDHTSPDLQENKEARKCYIPMGITNENVAKAFKIPRAVQDEFAADSYKKAEAAVKGGLFQEEILPITNPDGKVINTDEGPRKGVTAESLGKLRPAFIPEKGVTTAGNASQVSDGAAGVLLARRSVAEKLGLPILGKYVAFQAVGVPPEIMGVGPAYAIPAVLEQTGLQVGDVDIFEINEAFAGQALYCVEKLGIDKTKLNPRGGAIALGHPLGCTGARQIATIMRELQPGQIGLTSMCIGSGMGAAAIFVKE

SEQ ID NO: 2579 - DNA, 1185 bp, Strongylocentrotus purpuratus
  CDS (1)..(1185)
atgtctgatccagttgtcatcgtttctgccgttcgcactgcaattggtagtctgaatggagtattgtcaactgtagcagcccatgatctgggaaccatagtcatcaaggaagccctgcaaaggtcaggggtcagtagcagtgatgtgtcagaggtcatcatgggtcaggtgtatacggcaggtcaaggccagaaccctgccagacaggccagtgtgaatgcagggataccagttgaggtaccagcaactaacgtcaacatgctgtgtggttccggcctgaggacaatagtactaggagcacaggcgatcatgtgtggggactcttccattgtggttgcagggggtcaggaaagcatgagccaggcgccccatgcagcccatcttcgtagcggtctgtccttcggtgacaagcctttggtggatctgttagtaaatgatggccttatggatgcattcaataattaccacatgggaattacagctgaaaacctggccaagaaatgggaaatcacacgtgaacagcaggaccagtttgctctggggtcgcagctcaaggccgagaaggcccagacagaaggcatctttgctacagagatcgtcactgtgccgattaagagccgcaaggccacggtagaggtcaacgttgacgagtacccaaggaaggggtcaaccatcgaggggatgactaaactcagatcgtgctttatcaaggatgcaacgggaacggttactgctggcaacgcatctggtatcaacgacggagcagcagcagtggttctcatgaagctctccgaggctcagaagaggggcgtggcacctctagcaaggatagtctcatggggccaggctggggtggatccagctatcatggggtctggtcctattcctgctatcaagaaagctcttgagaaagcaggctggagccttggtgatgttgacctgtttgaactgaatgaggcgtttgcagcgcagtctctcacagtcaccaaggagcttggtattgacacctcaaaggtcaatatctacggaggagccatagccctgggccaccccttagccgtgtcgggcacccgcatcatcgtcaccctactcaacgccatgaagaggaccaatgccaagaagggcttggctgcactctgtatcgggggagggatgggcattgccatgtgtgtagaaacttcatag

SEQ ID NO: 2580 - protein, 394 aa, Strongylocentrotus purpuratus
MSDPVVIVSAVRTAIGSLNGVLSTVAAHDLGTIVIKEALQRSGVSSSDVSEVIMGQVYTAGQGQNPARQASVNAGIPVEVPATNVNMLCGSGLRTIVLGAQAIMCGDSSIVVAGGQESMSQAPHAAHLRSGLSFGDKPLVDLLVNDGLMDAFNNYHMGITAENLAKKWEITREQQDQFALGSQLKAEKAQTEGIFATEIVTVPIKSRKATVEVNVDEYPRKGSTIEGMTKLRSCFIKDATGTVTAGNASGINDGAAAVVLMKLSEAQKRGVAPLARIVSWGQAGVDPAIMGSGPIPAIKKALEKAGWSLGDVDLFELNEAFAAQSLTVTKELGIDTSKVNIYGGAIALGHPLAVSGTRIIVTLLNAMKRTNAKKGLAALCIGGGMGIAMCVETS

SEQ ID NO: 2581 - DNA, 1266 bp, Aspergillus terreus NIH2624
  CDS (1)..(1266)
atgtcttctcctcagcaacggttgtcctccattgcgaaccagctctcgggccccggttctgccgctgcgaagcaacagattctgtccaagaaccccgacgacatcgtcatcactcttgccgtccgcacacctctcaccaaggcccggaagggtggcctgaaggatactccgctggatgacctcctcgtttctctgttgacgagcatccgtgagcgctccaaccttgaccccaacctcgtggaggatgtctgcgtcggaaacgtccttgcccccggtgccgcctatattgctcgctccgctgtgttggccgctggcttccccgtgactgccgccgcctcgatcgccaatcgtttctgctcctctggcttgttggccatccagaacattgccaaccagattaccgccggttcgattgatgtgggtattgcggtgggagccgagagcatgagcaccaacgccgatggtggtgctccggagatgtctcccagcgtcctggcccaccccattgcctcccagaacatgcagcccatgggccagacctcggagaatgttgctggccagttcagcatctcccgtgagatgcacgaccagtttgctgcgaagagctaccagaaggccgagcgtgcccagaaggccggctggttcgacgatgagatcgtccccgtcaagactcagattaaggatcccaagaccggcgaagtgaaggacattgtggtctcccgtgacgatggtatccgttacggcaccactgctgagtctcttggcaagattcgcgctgctttccctcagtggaagcccagcgctaccactggcggaaacgccagtcagatcactgatggtgccgctggtgtcatcctcatgaagcgctctcgcgctgaggcgttgggtcagcccattctggccaagttctgcggtgctaccgttattggtcttgagcccagaatcatgggtattggtccctccatcgccatccccaagatcctctccaagttcaacctgaccaaggatgacattgatattttcgagatcaacgaggcctttgcctctatgggcacctactgtgtgcagaagctgggcctggatgagtccaaggtgaaccctcgtggtggagctattgccttcggtcatcccttgggctgcacgggagcccgccaggttgtgactgcgctttccgagctccgtcggcagaacaagcgcgtggctgtcacctccatgtgtgttggaactggcatgggtatggccggtctctttgtttcggagcactaa

SEQ ID NO: 2582 - protein, 421 aa, Aspergillus terreus NIH2624
MSSPQQRLSSIANQLSGPGSAAAKQQILSKNPDDIVITLAVRTPLTKARKGGLKDTPLDDLLVSLLTSIRERSNLDPNLVEDVCVGNVLAPGAAYIARSAVLAAGFPVTAAASIANRFCSSGLLAIQNIANQITAGSIDVGIAVGAESMSTNADGGAPEMSPSVLAHPIASQNMQPMGQTSENVAGQFSISREMHDQFAAKSYQKAERAQKAGWFDDEIVPVKTQIKDPKTGEVKDIVVSRDDGIRYGTTAESLGKIRAAFPQWKPSATTGGNASQITDGAAGVILMKRSRAEALGQPILAKFCGATVIGLEPRIMGIGPSIAIPKILSKFNLTKDDIDIFEINEAFASMGTYCVQKLGLDESKVNPRGGAIAFGHPLGCTGARQVVTALSELRRQNKRVAVTSMCVGTGMGMAGLFVSEH

SEQ ID NO: 2583 - DNA, 1254 bp, Aspergillus terreus NIH2624
  CDS (1)..(1254)
atggcctcggaacgcttgagctccattctcagtcacctgagaggtaacagcagcggtgtctccgcgatcacccagaagaaccccgacgatgtggtcatcacgcttgcgctgcgcacgcccctcaccaaggccttcaagggcggattcaaggacaccgagctggactacatggtctatgcgttgctgaaggagctcctggccaagtccaagatcgaccccgctctgatcgaggacgtctgcatgggaaatgtcggcgacggcaaggcggcgtacctcgtgcgcgccgcatccctggccgcgggcatcccgcacaccgccggcgcgtcgtcggtgaaccggttctgctcgtccgggctgaaggcggtgcaggacatcgcgaaccagatcgcactgggagccatcgacgtgggcgtggcggtgggcgcggagctgatgtcgtacaacggcgaccggctggcgcgcccgttcaacgaggaggtgctgcgcaaccaggaggcggccgactgcatgcagcccatgggccagacgtcggagaacgtcggcgccgacttcaacatctcccgcgaggcccaggaccgcttcgccgccgagtcgtaccgccgcgccgagcacgcccagaaggccggctggttcgacgacgaaatcgtccccatcaccaccaaggtcaaggaccccaagaccggcgagctcaaggaggtcaccctctcccgcgacgacggcatccgctacggcaccacccccgagagcctcgcgaagattcgcccggcgttcccgcagttcgggaaccgcagcaccggtggcaactccagtcaagtgacggatggagctgccgcgatcctgctcatgcgccgctccaaggccatcgaactcaaccagcccatcctggccaagttctgcggcgccaccgtcgccggtgtgccgccgcgcgtcatgggcatcggtcccaccgccgccatccccaagctgctgtcgcagttcaagctgaccaaggaggacattgacatcttcgagatcaacgaggcctttgcctctatggccgtgtactgtctgcagaacctgggcctggaccacgccaagctgaacccgcgcggcggcgccatcgccctcggccacccgctgggcgccacgggcgcgcgccagatctgcaccatcctcagcgaggcccggcgcacgaagaagaagatccttgtgacgagtatgtgcattggcacggggcagggcatggcgggtctgtttgtcaacgagcaagactaa

SEQ ID NO: 2584 - protein, 417 aa, Aspergillus terreus NIH2624
MASERLSSILSHLRGNSSGVSAITQKNPDDVVITLALRTPLTKAFKGGFKDTELDYMVYALLKELLAKSKIDPALIEDVCMGNVGDGKAAYLVRAASLAAGIPHTAGASSVNRFCSSGLKAVQDIANQIALGAIDVGVAVGAELMSYNGDRLARPFNEEVLRNQEAADCMQPMGQTSENVGADFNISREAQDRFAAESYRRAEHAQKAGWFDDEIVPITTKVKDPKTGELKEVTLSRDDGIRYGTTPESLAKIRPAFPQFGNRSTGGNSSQVTDGAAAILLMRRSKAIELNQPILAKFCGATVAGVPPRVMGIGPTAAIPKLLSQFKLTKEDIDIFEINEAFASMAVYCLQNLGLDHAKLNPRGGAIALGHPLGATGARQICTILSEARRTKKKILVTSMCIGTGQGMAGLFVNEQD

SEQ ID NO: 2585 - DNA, 1260 bp, Aspergillus terreus NIH2624
  CDS (1)..(1260)
atgtcttctgcccagcaacgtctcactcaggtcgcctcccacttcggcgcgggcggcaagaagggtgtcgccgccatcaccgagaagcaccccaatgatattgttgtgacttgtgccctgcgtactgccctcaccaagggcggtaagggtggcttcaaggacactgccgctgcggatctgctcgccggtgtcttcaagggcgtcatcgagcgcagtggaattgaccccaagctcgtcgatgatgttgccgtcggttccgtccttgcccctggtggcggtgccaccgagttccgtgctgctgctctcgtggctggtttccccgagactacagccgtcaagagtctgaaccgtcagtgctccagtggtctgcaggctattgttgacattgccaacgccatcaactctggtatgatcgatgtcggtatcggtgctggtgttgagagcatgtcctctcagtatggccctggtgccgtcaccgagttctccgagctcctcgaaaaccacatggaggccgccaactgcaaggtgcccatgggtgtcctgtccgagcagatggccaaggaccgcaacgtcacccgcgctgcccaggatgctttcgccgctgcttcctaccaaaaggccgtcaaggcccagaaggctggtctcttcaacgaggagatctacccccttcaggtcaagtggaccgatcccaagtccggcgaggagaagactattaccgtgaaggccgacgatggcatccgtgacggcatcacccccgagtctctgggcaagatccgtcccgcgttcgccaaggatggctccatccacgctggtaacgcttctcagatctccgacggcgcggccgcggtcctcctgatgaagcgttccactgctgagcgtctcggccagaagatcctgggcaagtacgttgccgccagtgtggtcggcgtgaagccccttctcatgggtattggtccctggaaggccatcccggtggccctcgagaaggccggcatcaccaaggacgacgttgacatctacgagatcaacgaggcctttgcctcccagtgcgtgtggtgtgtcaacgagctgggcctgccccaggagaagatcaaccccaagggcggagccatcgccttcggtcaccctctcggttgcaccggagcccgtcaaatcagcacgctgatgacggagctgcagcgcaccaacaagaagattggtgtgactagcatgtgcgtgggtaccggtatgggcatggctgccgtctgggttcgcgagtag

SEQ ID NO: 2586 - protein, 419 aa, Aspergillus terreus NIH2624
MSSAQQRLTQVASHFGAGGKKGVAAITEKHPNDIVVTCALRTALTKGGKGGFKDTAAADLLAGVFKGVIERSGIDPKLVDDVAVGSVLAPGGGATEFRAAALVAGFPETTAVKSLNRQCSSGLQAIVDIANAINSGMIDVGIGAGVESMSSQYGPGAVTEFSELLENHMEAANCKVPMGVLSEQMAKDRNVTRAAQDAFAAASYQKAVKAQKAGLFNEEIYPLQVKWTDPKSGEEKTITVKADDGIRDGITPESLGKIRPAFAKDGSIHAGNASQISDGAAAVLLMKRSTAERLGQKILGKYVAASVVGVKPLLMGIGPWKAIPVALEKAGITKDDVDIYEINEAFASQCVWCVNELGLPQEKINPKGGAIAFGHPLGCTGARQISTLMTELQRTNKKIGVTSMCVGTGMGMAAVWVRE

SEQ ID NO: 2587 - DNA, 1161 bp, Aspergillus terreus NIH2624
  CDS (1)..(1161)
atggcctctcctgtcccccgcggtatccgtcaggtccttcagaagtccccctcggacattgtcatcctctcctcgcttcgtacgcccgtcacccgtgcgaagaagggtggcttcaaggatgcctaccccgaagagctcctcgcccacgagctgggtggcgcaaaggctggccgtatggctcagatccacgccggtttccctcacaccgttcctttccacactatcaaccggcagtgctcgtctggtctggccgccatcacggccatcgccaacggcatccgtgccggtgccatcaacgtcggtatcggtggtggtatggagtccatgacgcgcaactacggctctcgcgccatcccaacggtcctctggccggagctgaaggagtccccgtcccaggactcccgcgactgcatcatgcccatgggcatcacctcggagaacgttgcctctcgctacggcatcaaccgcgccgaccaggacgccttcgccgctgagtcccacaagaaggccaccgccgcccagaacgccggtctgttcgatgcggagatcgtccccgtcacgaccaagtccttcgaccccgaaaaccccgaggcgccgcccaaggagatcaccgtgaccaaggatgacggtgtgcgccccaacatctccgtggagaagatggccagcctgaagcccgccttctcgcccaccggcagcagcaccgctggaaacagctcgcaagtcagcgacggtgcggcggcgacgcttctgatgcgtcgttccaccgccactgagctcggcctgacctcgtctatcaagggtcgctgggtcggcaccgccgtggccggctgcgctcccgatgagatgggtgtcggtcctgcggtggccatccccaagctgctccagctcctggacgtcaacgtgtctgatgtcggtatctgggaaatcaacgaggcgttcgcttctcaggcgctctactcggtccgcaaactcggcattgatgaggccaaggtcaaccccaagggtggtgcgattgccatcggccaccctctgggagccactggtgcccgtcagctcgccactctgctccctgagatggagcgtactggccaagaagtcggagttgtgagtatgtgtattggaactggtatgggcatggctggcatgtttgttcgggagtaa

SEQ ID NO: 2588 - protein, 386 aa, Aspergillus terreus NIH2624
MASPVPRGIRQVLQKSPSDIVILSSLRTPVTRAKKGGFKDAYPEELLAHELGGAKAGRMAQIHAGFPHTVPFHTINRQCSSGLAAITAIANGIRAGAINVGIGGGMESMTRNYGSRAIPTVLWPELKESPSQDSRDCIMPMGITSENVASRYGINRADQDAFAAESHKKATAAQNAGLFDAEIVPVTTKSFDPENPEAPPKEITVTKDDGVRPNISVEKMASLKPAFSPTGSSTAGNSSQVSDGAAATLLMRRSTATELGLTSSIKGRWVGTAVAGCAPDEMGVGPAVAIPKLLQLLDVNVSDVGIWEINEAFASQALYSVRKLGIDEAKVNPKGGAIAIGHPLGATGARQLATLLPEMERTGQEVGVVSMCIGTGMGMAGMFVRE

SEQ ID NO: 2589 - DNA, 1248 bp, Chaetomium globosum CBS 148.51
  CDS (1)..(1248)
atggctgtcgaacgcctcggatccattctcaagcacctctccccgagcagctcgctctctcacatcacctccaagaatgccgacgatatcgtcattactctcgccctccgaacccccctgacgaaggcgaggaagggtgggttgaaggacagcagtctcgaatacatctctttcgcgctcctcgatgaagtgaggaaacggagcaatatcgaccctgcactggttgaagacatctgccttggaaatgtttccgacggcaaggccgcctacaagctgcgggcctcggccctagccgccggtttccccaacaccacgtcctgctcgagcttgaaccgtttctgctcctctggcctcaaggctgttgccgatgtcgcccacgctatcagcagtggatccatcgaggttggcattgccatcggtgtagagcaaatgacgatcggcggagacgctcttgagaagcccttcgatgagaaggtcactagccggtcgcaagaggccgccgactgcatgcagcccatgggctggacgagtgagaacgtcagccgcgacttcggcatcacccgcgaggagatggataaatacgccgccgagagtttccgccgcgccgagcaagcgcaaaaggacggcctgttcgacgacgagatcgtgcccatcaagaccaccgtccagggccccgatggtgagtggaaggaaatcaccgtttccaaggacgacggtatccggcccggcaccaccgccgaaagcctttccaagatccgcgttgccttcccgcaatggggtcccaccaccaccggcggcaacgccagccaggttaccgatggagcggcggccgttctcctcatgaagcgatccatggccatcaagctgggccagcccatcatggcgaagtacgtcggctcgaccgtggccggcctggcgccgcgcatcatgggcatcggcccgaccgtggccatccccaagctgctcgcgcagcacggcatcacgctcgccgacatcgacgtcgtcgaggtcaacgaggccttcgctagcatggccgtctactgccgggacaccctcggcctggactgggccaagatgaacccgcgcggcggtgcgattgccttgggtcacccgctcggcgccaccggcgcccgccagattgtcacgggtctgagcgagtgccggaagaacggcaagaagctcttgttgacgagcatgtgcatcggcacggggatgggcatggctggtctatttgtgaacgaacaatga

SEQ ID NO: 2590 - protein, 415 aa, Chaetomium globosum CBS 148.51
MAVERLGSILKHLSPSSSLSHITSKNADDIVITLALRTPLTKARKGGLKDSSLEYISFALLDEVRKRSNIDPALVEDICLGNVSDGKAAYKLRASALAAGFPNTTSCSSLNRFCSSGLKAVADVAHAISSGSIEVGIAIGVEQMTIGGDALEKPFDEKVTSRSQEAADCMQPMGWTSENVSRDFGITREEMDKYAAESFRRAEQAQKDGLFDDEIVPIKTTVQGPDGEWKEITVSKDDGIRPGTTAESLSKIRVAFPQWGPTTTGGNASQVTDGAAAVLLMKRSMAIKLGQPIMAKYVGSTVAGLAPRIMGIGPTVAIPKLLAQHGITLADIDVVEVNEAFASMAVYCRDTLGLDWAKMNPRGGAIALGHPLGATGARQIVTGLSECRKNGKKLLLTSMCIGTGMGMAGLFVNEQ

SEQ ID NO: 2591 - DNA, 1260 bp, Chaetomium globosum CBS 148.51
  CDS (1)..(1260)
atggccgccctccccaaaggcctcaaggccgtcctgaccaaagcccccaccgacgtcgtgatcctctcttccctccgcacccccatctgccgctcctaccgcggccagctcaaggacgcctacccggaagagctcctctccgtcgtcctgcgcgccaccctcgacaagaacccgcaactcgacccctccgccatcgacgacgtcgccgtcggcgtggtcctcaacgagctcggcggctccaaggccgcccgcatggccatgaaccacgtcggcttccccacctccacctccctctacaccgccaaccgcgcctgcgcctcctccctccagaccatcgccctcgtcgccgcccagatccgcaccaccatgatcgacgtcggcatcggcgccggcatggagagcatgacccgcaactacgcctccaaggccatccccgtcgacgcctggcccgccctgcgccagagcgccgtccaggacgccgtcgactgcgtcatgcccatgggcctgaccagcgagaacgtggccagccgctatggcgtgtcccgcgcggaccaggacgccttcgcggtggaatcgcatgcgcgggcggcgcgcgcgaggcaggccggcgcgtttgatgaggagattgtgcccgtcacgacgcggtttcaggaggtggataggaagggggagaaggtgggtgaggagcggatggtgacggtgacgagggatgatgggattagggagggggcgtccgtcgaggcgctggctaagctgaagcccgcgtttaaggaggatggcgcgagcaccgcggggaattcgagccaggttagtgatggtgcggcggcgacgttgttgatgcgccggagcacggctacgcagttggggttggcggatagcattatggggaagtttgtggccgcgtcggtggtggggtgcaagccggatgagatgggcgtggggccggcgctggcgattcccaaggtgctgggccagctgggcctgagcaatgcggatgtggatcggtgggagatcaatgaggcgtttgcgagccaggcgatctactgcgtgcgggagctggggttggagaaggcgttggtggatgggaaggttaacccggatggcggtgccattgcgctgggccacccgctgggcgcgacgggtgcgcgtatggtgagcacgctgatgcacgggctgggcaggactggtggggaggtgggtgtggtgagtatgtgtattgggacgggcatggggatggcgggcgtgtttgtgagggagtaa

SEQ ID NO: 2592 - protein, 419 aa, Chaetomium globosum CBS 148.51
MAALPKGLKAVLTKAPTDVVILSSLRTPICRSYRGQLKDAYPEELLSVVLRATLDKNPQLDPSAIDDVAVGVVLNELGGSKAARMAMNHVGFPTSTSLYTANRACASSLQTIALVAAQIRTTMIDVGIGAGMESMTRNYASKAIPVDAWPALRQSAVQDAVDCVMPMGLTSENVASRYGVSRADQDAFAVESHARAARARQAGAFDEEIVPVTTRFQEVDRKGEKVGEERMVTVTRDDGIREGASVEALAKLKPAFKEDGASTAGNSSQVSDGAAATLLMRRSTATQLGLADSIMGKFVAASVVGCKPDEMGVGPALAIPKVLGQLGLSNADVDRWEINEAFASQAIYCVRELGLEKALVDGKVNPDGGAIALGHPLGATGARMVSTLMHGLGRTGGEVGVVSMCIGTGMGMAGVFVRE

SEQ ID NO: 2593 - DNA, 1263 bp, Coccidioides immitis RS
  CDS (1)..(1263)
atggctcttgagagattaaatgctgtcctccagcagttgaaacccggcacgggtggaagcagtgttgttgataaactttgcgagaagaaccccgacgatgttgtcattaccgtcgcagttcgaagcgccatgacgaagggtttcaagggtggattcaaggatacagaccttgatatgcttgtctacgctctcatcaaggaagtgttggctcgctctaaaatagaccccagcttgatcgaggatgtatgcttgggaaatgctctcaatggaaaggcatcctatcttacccgtaccgctgctctcgctgctggcatcccacacactgctggcgccgctgccgttagcagattttgctcatccggcttgaaagccatccaggatgttgcctaccagatctcccaaggttccatcgacgtcggtatcgccctcggcggagagtcgatgtctctttctcccgacagaggcttccagcctgttgataacgaggttatgaagtgccaggaggcgcaggactgcacacagcccatgggtcagacatcagagaatgtcggtgatgatttcaacatcacccgtgagatgcaggaccgctactctgtggagtccttcagaagagcggaggtcgcccagaagtcaggttggttcgacgatgaaattgttcccattacgacaactgtcaaggatccaaagactggagaagtcaagcaaatcgtcgtctctcgggacgagggtcctcgctacggcaccacctacgagggcttgagcaagatccgtcctgcattcccccagtttggaaataagaccactggtggtaatgccagtcagatcagcgacggagtcgctgctgttctccttatgaagcgttccaaggccattgaactcggtcagcccatccttgccaaattcgttggagccaccgttgctggtgttcctccaagaattatgggtatcggtcctaccgctgccatccccaagctcctctccaagttcaacctccgcaaggacgatgttgacatcttcgaaatcaacgaggcttttgcctccatggctgtgtattgcgttgacacacttggcctcgaccacgctaaggtgaatcctcgtggtggtgccattgccttgggtcatcctcttggatgcacgggtgcaagacaggttgttaccattttgagcgaggcaaagagaaccaaggcaaaggtccttgtgacaagtatgtgtattggaactggccagggcatggctggtttgtttataaatgagcagaattaa

SEQ ID NO: 2594 - protein, 420 aa, Coccidioides immitis RS
MALERLNAVLQQLKPGTGGSSVVDKLCEKNPDDVVITVAVRSAMTKGFKGGFKDTDLDMLVYALIKEVLARSKIDPSLIEDVCLGNALNGKASYLTRTAALAAGIPHTAGAAAVSRFCSSGLKAIQDVAYQISQGSIDVGIALGGESMSLSPDRGFQPVDNEVMKCQEAQDCTQPMGQTSENVGDDFNITREMQDRYSVESFRRAEVAQKSGWFDDEIVPITTTVKDPKTGEVKQIVVSRDEGPRYGTTYEGLSKIRPAFPQFGNKTTGGNASQISDGVAAVLLMKRSKAIELGQPILAKFVGATVAGVPPRIMGIGPTAAIPKLLSKFNLRKDDVDIFEINEAFASMAVYCVDTLGLDHAKVNPRGGAIALGHPLGCTGARQVVTILSEAKRTKAKVLVTSMCIGTGQGMAGLFINEQN

SEQ ID NO: 2595 - DNA, 1242 bp, Coccidioides immitis RS
  CDS (1)..(1242)
atggccggctccgtcccgcgaggtctcaagcagatcctccaaaaatctccctccgacatcgtcatcctctcatccctccgtaccgcagtgacccgcgccaaaaagggcgggttcaaagacgcctatcccgaggagctcctcgcccatgtcctccgtgccacactagccgccaacccaaatcttgatctagccctcatagaagatgtctgcatcggcagcgtgctgcaggagctcggtggcgcgaaggcgggccgcatggctcagattcacgctggcttctcgcacacggtccctttccacacgattaaccggcagtgcagttccggcctggctgcgatctcgacgattgcccattctatctctgtgggagcgatctctgtgggtatcggcggcggtatggagtctatgacgcggaactatgggtcgagagcgattcctacggtcttatggcctgagttgaaggagtctgagctgcaggatgcgagggattgtatcatgccgatgggtatcacgtcggagaacgttgcgtcgaggtatggaattaatagacatgatcaagacgcgttttcggccaagtctcatcagaaggctgccgctgcgcagaagaatggcctgtttgataaggagattgtcgccgttacgacgaagactatacccaccgataagccggatggtccagctgaggagattactgtcacgaaggatgatggtattcgacctacggtatccttagagaagttggctaccttgaaacccgctttctcaccgacgggatcttccactgcaggaaacagctcgcaggtcagcgacggtgccgctgcggcccttctcatgcgccgttcaaccgccacagagcttggcttgacctccagcatcattggaaaatgggtctctactcaggttgccggatgtgcgccagatgagatgggtatcggcccggccgttgctattccaaaggtcctcaagcacaccggcctcgaggtgtctgacgttggcatttgggagattaacgaggcattcgctagtcaggctctgtactgcgttcggaaattgggcattaacgaggataaggtcaaccccaagggtggtgccattgctatcggacatcctcttggtgctaccggtgccagacagttggctactttgcttcctgaactggaaagacagggtgagcaagtcggtgttgtgagcatgtgtattggtactggcatgggaatggcgtcagtctttgtaagggagtaa

SEQ ID NO: 2596 - protein, 413 aa, Coccidioides immitis RS
MAGSVPRGLKQILQKSPSDIVILSSLRTAVTRAKKGGFKDAYPEELLAHVLRATLAANPNLDLALIEDVCIGSVLQELGGAKAGRMAQIHAGFSHTVPFHTINRQCSSGLAAISTIAHSISVGAISVGIGGGMESMTRNYGSRAIPTVLWPELKESELQDARDCIMPMGITSENVASRYGINRHDQDAFSAKSHQKAAAAQKNGLFDKEIVAVTTKTIPTDKPDGPAEEITVTKDDGIRPTVSLEKLATLKPAFSPTGSSTAGNSSQVSDGAAAALLMRRSTATELGLTSSIIGKWVSTQVAGCAPDEMGIGPAVAIPKVLKHTGLEVSDVGIWEINEAFASQALYCVRKLGINEDKVNPKGGAIAIGHPLGATGARQLATLLPELERQGEQVGVVSMCIGTGMGMASVFVRE

SEQ ID NO: 2597 - DNA, 1263 bp, Neosartorya fischeri NRRL 181
  CDS (1)..(1263)
atgtctacgccacagcaacggttgtcctcgatcgctaaccaggtcgctggttcgaatgtgtcggcgaagagcaagctgttggccaagaatcccgatgatatcgtaatcacgcttgctgttcggacccctctcacaaaggccagaaaaggtggtctgaaagacaccacaatagataatctcctaatttcattgcttacatctatccgcgaaaaatccaacctcgaccccaaccttgttgaagatgtctgtgtcggtaacgtgcttgcgcctggttccgcatacgtcgcccgctccgcggtgcttgcagctggcttccctgtgacggccgccgcctccattgccaaccgattctgttcttctggattgctggcgattcagaacgtcgctaaccagatcatggccgggtctatcgatatcggtatcgctgtcggggccgagagcatgagcaccaacgccgatggaggggccccagagatgtcggctcagatcatgtcgcatcctattgcctcccagaacatccaacccatgggccagacctcagagaacgtcgctgcccaattcaacatttcccgagagcaacacgatcagtttgccgccaagagttatcagaaggctgagcgcgcgcaaaagtccggttggactgccgacgagattgtacccgtcaaggctcaagtcaaagatcccaagacaggtgaggtaaaggacgtcgtcgttgatcgtgacgatggcattcgttatggcaccactgttgagtccctcggcaagattcgctctgcattccctcaatggaagcccagtgccacaaccggtgggaatgccagtcagatcacggatggcgccgccggtgtcattcttatgaagcggtctcgtgcccaggaactcggacagcccatcattggcaagttttgcggagctacagttgcgggtttggagcctagaatcatgggtattggcccttccattgctatccccaagatcttgtccaagttcaacctgagcaaggatgatgtcgatattttcgagattaacgaagcatttgcgtccatgggcgtctactgtgttagcaagctgggtcttgatgagagcaaggtcaatcccagaggtggagcgatcgcactgggtcatccgttgggctgcaccggcgctcgccaggtcgttactgctctgtctgagctgcgccgtcagaacaagagaatcgctgtcacctcgatgtgtgtcggaactggcatgggcatggccggaatttttgtttcggagcattaa

SEQ ID NO: 2598 - protein, 420 aa, Neosartorya fischeri NRRL 181
MSTPQQRLSSIANQVAGSNVSAKSKLLAKNPDDIVITLAVRTPLTKARKGGLKDTTIDNLLISLLTSIREKSNLDPNLVEDVCVGNVLAPGSAYVARSAVLAAGFPVTAAASIANRFCSSGLLAIQNVANQIMAGSIDIGIAVGAESMSTNADGGAPEMSAQIMSHPIASQNIQPMGQTSENVAAQFNISREQHDQFAAKSYQKAERAQKSGWTADEIVPVKAQVKDPKTGEVKDVVVDRDDGIRYGTTVESLGKIRSAFPQWKPSATTGGNASQITDGAAGVILMKRSRAQELGQPIIGKFCGATVAGLEPRIMGIGPSIAIPKILSKFNLSKDDVDIFEINEAFASMGVYCVSKLGLDESKVNPRGGAIALGHPLGCTGARQVVTALSELRRQNKRIAVTSMCVGTGMGMAGIFVSEH

SEQ ID NO: 2599 - DNA, 1242 bp, Neosartorya fischeri NRRL 181
  CDS (1)..(1242)
atggcttctcctattccccgaggccttcgccaggtcctccaaaagtccccttcagatatcgtcattctctccgcacttcgtacgccagtaactcgcgcgaagaagggtggattcaaggatgcctatcccgaagagcttctcacccacgtcctcaaagcaactctcgaggcgaacccaaatcttgacccagctctgattgacgatgtcgctatcggctcggtcctccaggaactaggcggtgccaaagcagggcgcatggctcagatccacgctggcttcccccactcggtgcctttccacacaatcaacagacaatgctcgtctggcctggccgctatcacagccattggtaatggaattcgggcaggtgcactgaacgtcggcgttggtggtggtatggagtctatgacccggaactacgggtcccgtgccatcccgacagttttatggcctgaattgaaagagtcgccatccaaggatgctagagactgcattatgcccatgggaattacttctgagaacgtcgccgcccggtacggtatctcgagggcggaccaggatgcgttcgcagccgagtcacacaagaaggcttcagctgcccaaaatgctggtctgtttgataccgaaatcgtaccagtcaagaccctttcctttgacccggagaatcctgatgcggcgcccaaggagattaccgtgacaaaagacgacggtatccgtcataacatttctgctgagaagatggcaactttgaagcctgccttcaaggcagatggcactagcactgctggaaacagctcgcaggtcagcgatggtgccgctgctgctttgttgatgcgccgttctaccgctacggagcttggcttgactgcttcaatccaggctcgctgggttgcaaccgctgtggctggatgtgctcccgatgagatgggtgtgggacccgcagttgccatccccaagcttcttgaactcgtcggcatgaacgtttccgacgtcggtatttgggagatcaacgaggctttcgcatcgcaggctctttactctgtgcgtaagcttggaattgacgaggccaaggttaatcccaagggtggtgccattgcgattggtcaccccttgggtgctactggtgccaggcagctcgccactttgctacctgagctccaacgcactggacaggatgttggtgtaatcagtatgtgcatcggcactggcatgggtatggccggtatgtttgttcgggagtaa

SEQ ID NO: 2600 - protein, 413 aa, Neosartorya fischeri NRRL 181
MASPIPRGLRQVLQKSPSDIVILSALRTPVTRAKKGGFKDAYPEELLTHVLKATLEANPNLDPALIDDVAIGSVLQELGGAKAGRMAQIHAGFPHSVPFHTINRQCSSGLAAITAIGNGIRAGALNVGVGGGMESMTRNYGSRAIPTVLWPELKESPSKDARDCIMPMGITSENVAARYGISRADQDAFAAESHKKASAAQNAGLFDTEIVPVKTLSFDPENPDAAPKEITVTKDDGIRHNISAEKMATLKPAFKADGTSTAGNSSQVSDGAAAALLMRRSTATELGLTASIQARWVATAVAGCAPDEMGVGPAVAIPKLLELVGMNVSDVGIWEINEAFASQALYSVRKLGIDEAKVNPKGGAIAIGHPLGATGARQLATLLPELQRTGQDVGVISMCIGTGMGMAGMFVRE

SEQ ID NO: 2601 - DNA, 1308 bp, Neosartorya fischeri NRRL 181
  CDS (1)..(1308)
atggccgcagatcgcctaagctcacttctgaaccaccttcgcccctccgggggaagcggagtctccgccatgtatgcttcatccttggcccaaccgcggttcatcatactgaccaacgccagcacacagaagaaccccgatgacgttgtcatcacccttgcgttgcggacgccacttaccaaggccgccaagggcggcttcaaggacaccgagctggactacatgatctacgctctactgaaggaggtagtgcagaagtcgaagctcgatcctgcactcatcgaggacgtctgtctgggcaatgtcaacgacggcaaagccgcctacctcgtgcgcgcggccgccctcgccgccggcatcccccacacagccggcgcgtcgtcggtcaaccggttctgctcttctggtctgaaggccgtgcaagacatcgcgaaccagatccagctgggcgcgatcgacgtgggcgttgcggtcggcgcggagctgatgtctgcaggcggcgaccggctgccgcggccgttcaacgaggaggtgctcaagaaccaggaggcggcggactgcatgcagccgatgggccagacgtcggagaacgtgggcgcggacttcaacatcacgcgcgagatgcaggatacgtacgcggcggagtcgttccggcgggccgaggcggcgcagaaggcgggctggttcgatgatgagatcgtccctatcacgactaaggtgaaggatcccaagactggggaggtcaagactgtgactcttacgcgcgacgagggcattcggtatggtaccactgttgaagcgctgaacaagatccggcctgcgttcccgcagtttggaaaccggacgacgggcggtaatgccagtcaggttactgatggagctgctgctatcctactcatgcgccgctccaaggccatcgagctcaaccagcccatcctggccaagttctgcggcgcgactgtcgccggtgtgccgccgcgcgtgatgggcatcggtcccaccgcggcgatccccaagttgctgtccaagttcaacctcagcaaggacgacattgacatctacgagatcaacgaggcctttgcctcgatggctgtgtactgcctgaagaacctcggtctgaaccatgccaaggtcaacccgcgcggtggtgcgattgcgctcggccacccgttgggcgcgacgggtgcccgtcagatctgcacgattctcagcgaagcgcggcggacgaagagcaagatcctcgttacgagtatgtgcatcggcactggccagggaatggctggtttgtttgtgaacgagcagatttaa

SEQ ID NO: 2602 - protein, 435 aa, Neosartorya fischeri NRRL 181
MAADRLSSLLNHLRPSGGSGVSAMYASSLAQPRFIILTNASTQKNPDDVVITLALRTPLTKAAKGGFKDTELDYMIYALLKEVVQKSKLDPALIEDVCLGNVNDGKAAYLVRAAALAAGIPHTAGASSVNRFCSSGLKAVQDIANQIQLGAIDVGVAVGAELMSAGGDRLPRPFNEEVLKNQEAADCMQPMGQTSENVGADFNITREMQDTYAAESFRRAEAAQKAGWFDDEIVPITTKVKDPKTGEVKTVTLTRDEGIRYGTTVEALNKIRPAFPQFGNRTTGGNASQVTDGAAAILLMRRSKAIELNQPILAKFCGATVAGVPPRVMGIGPTAAIPKLLSKFNLSKDDIDIYEINEAFASMAVYCLKNLGLNHAKVNPRGGAIALGHPLGATGARQICTILSEARRTKSKILVTSMCIGTGQGMAGLFVNEQI

SEQ ID NO: 2603 - DNA, 1260 bp, Neosartorya fischeri NRRL 181
  CDS (1)..(1260)
atgtcttctgctcaacagcgtctttctcaagtctcctcccacttcacgtcgggaggcaagaagggtgtcgccgccatcaccgagaagcatcccgatgatatcgttgtcacatgtgccctgcgtactgccctgaccaagggtggaaagggtggtttcaaggataccgctgccgctgatctgttggccggtgttttcaagggcgtcatcgaccgcagtggcatcgaccccaaggtggtggaagatgttgctgttggttccgtccttgcccctggtggcggtgccaccgagttccgtgctgctgcccttgttgccggcttccccgagtcgactgctgtcaagagcttgaacagacagtgctccagtggtcttcaggccattgtggacatggccaacgcgatcaagtccggcatgattgaagttggtattggtgcaggtgtggagagcatgtcctctcagtacggacctggtgccgttaccgagttctctgagctcctcgagagccaccccgagtccgccaactgcaaggtccccatgggtgtcttgtcagaacagatggctaaggaccgtaacatctctcgcgccgtccaagatgctttcgctgcctcttcataccagaaggctgtcaaggctcagaaggccggtctcttcaacgaggagattgttcctctccaggtcaagtggactgatcccaagaccggcgaggagaagaccattaccgtcaaggccgacgatggcatccgtgacggcatcacccccgagtctctcggcaagatccgtcccgctttcgccaaggatggttccatccacgccggtaacgcctctcagatctccgacggtgctgccgccgtgctgctgatgaagcgttccaccgctgagcgcctcggccagaagatcatcggcaagtatgttgccgccagcgttgtcggtgtcaagccactgctcatgggtatcggcccctggaaggccatccccgtcgcccttgagaaggctggcatcaccaaggacgaggttgacatctatgagatcaacgaggcctttgcttcccagtgtgtgtggtgtgtcaacgagcttggcctgccccacgagaagatcaaccccaagggaggtgctatcgcctttggccaccctctcggctgcaccggtgctaggcagatcagcacccttctgacagagctgaagcgcaccaacaagaaggtcggtgtcaccagcatgtgtgtgggtacgggtatgggtatggccgctgtctgggtcgccgaataa

SEQ ID NO: 2604 - protein, 419 aa, Neosartorya fischeri NRRL 181
MSSAQQRLSQVSSHFTSGGKKGVAAITEKHPDDIVVTCALRTALTKGGKGGFKDTAAADLLAGVFKGVIDRSGIDPKVVEDVAVGSVLAPGGGATEFRAAALVAGFPESTAVKSLNRQCSSGLQAIVDMANAIKSGMIEVGIGAGVESMSSQYGPGAVTEFSELLESHPESANCKVPMGVLSEQMAKDRNISRAVQDAFAASSYQKAVKAQKAGLFNEEIVPLQVKWTDPKTGEEKTITVKADDGIRDGITPESLGKIRPAFAKDGSIHAGNASQISDGAAAVLLMKRSTAERLGQKIIGKYVAASVVGVKPLLMGIGPWKAIPVALEKAGITKDEVDIYEINEAFASQCVWCVNELGLPHEKINPKGGAIAFGHPLGCTGARQISTLLTELKRTNKKVGVTSMCVGTGMGMAAVWVAE

SEQ ID NO: 2605 - DNA, 1257 bp, Aspergillus clavatus NRRL 1
  CDS (1)..(1257)
atggccgcagaccgtctaaactcgctactcagccacctccgcccctcaggaagcagcggagtcgctgccatcacacagaaaaaccccgatgacgtggtcatcacccttgcgctgcggacgccgctcaccaaggccgtcaagggcggctttaaggacacggaactggactacatgatctacgcgctgctgaaggagctggtgcagaagtccaaactggacccgacactcatcgaggatgtttgtctgggcaacgttaacgacggtaaggctgcgtacctcgtccgcgccgcggccctcgccgcgggtatcccccacacggccggcgcctcgtcggtgaaccggttctgctcgtccgggctcaaggcggtccaggacatcgcgaaccagatccagctgggggcgatcgacatcggcgtggctgtgggggcggagctgatgtcggcgggcggcgaccggatgcccaagccgttcaacgcggaagtgctcaagagccaggaagcggcggactgcatgcagccgatggggcagacgtcggagaacgtgggggcggactttgggatcacgcgcgcgatgcaggacacgtacgcggcggagtcgttccggcgggccgaggcggcgcagaaggccggctggttcgacgacgagatcgtgccgatcacgacgacggtgaaggatcccaagaccggggagacgcgcaccgtcacgctcacgcgcgacgagggcatccgctacggcacgacggccgaggcgctgggcaagatccggccggcgttcccgcagttcggcgaccgcaccaccggcggcaacgccagccaggtcacggacggggcggccgcggtgctgctcatgcgccgctccaaggccatcgagctcaaccagcccatcctggccaagttcgtgggcgcgacggtggccggcgtgccgccgcgcatcatgggcatcggccccaccgccgccatccccaagctgctggccaagttccacctcgccaaggacgaggtcgacatctacgagatcaacgaggcctttgcctccatggccgtctactgcctcggcaacctcggcctcgaccacgccaaggtcaacccgcgcggcggcgccatcgccctgggccatccgctgggcgccaccggtgcccgccagatctgcacgatcctcagcgaggctcgccgcaccaaggccaaggtcctggtgacgagtatgtgcattggcacgggccagggcatggccggcttgctggtgaacgagcaggtttaa

SEQ ID NO: 2606 - protein, 418 aa, Aspergillus clavatus NRRL 1
MAADRLNSLLSHLRPSGSSGVAAITQKNPDDVVITLALRTPLTKAVKGGFKDTELDYMIYALLKELVQKSKLDPTLIEDVCLGNVNDGKAAYLVRAAALAAGIPHTAGASSVNRFCSSGLKAVQDIANQIQLGAIDIGVAVGAELMSAGGDRMPKPFNAEVLKSQEAADCMQPMGQTSENVGADFGITRAMQDTYAAESFRRAEAAQKAGWFDDEIVPITTTVKDPKTGETRTVTLTRDEGIRYGTTAEALGKIRPAFPQFGDRTTGGNASQVTDGAAAVLLMRRSKAIELNQPILAKFVGATVAGVPPRIMGIGPTAAIPKLLAKFHLAKDEVDIYEINEAFASMAVYCLGNLGLDHAKVNPRGGAIALGHPLGATGARQICTILSEARRTKAKVLVTSMCIGTGQGMAGLLVNEQV

SEQ ID NO: 2607 - DNA, 1260 bp, Aspergillus clavatus NRRL 1
  CDS (1)..(1260)
atgtcttctgctcaacagcgtctgtctcaggtctcctcccacttcactgcgggaggcaagaagggtgccgccgccctcaccgagaagcatcccgatgatatcgtcgtcacatgtgccctgcgcacggctctgaccaagggtggaaagggtggcttcaaggacaccgctgccgctgatttgcttgctggtgtcttcaagggtctcatcgatcgcagcggcatcgaccccaaggccgttgaggatgttgctgtcggctctgtccttgctcctggtggcggtgccactgagttccgtgctgctgcccttgttgccggtttctccgagtcgaccgccgtcaagagcttgaacagacagtgctcgagtggtcttcaggccatcgttgatattgccaatgctatcaagtccggcatgattgaggttggtgtcggtgccggtgtggagagcatgtcctctcagtacggccccggtgccgttaccgagttctccgagcttctcgagagccaccccgagtccgccaactgcaaggtccccatgggtgtcctgtcggagcagatggcgaaggaccgcaacatctctcgtgctgttcaggatgctttcgccgcttcctcttaccagaaggccgtcacggcccagaaggccggtctcttcaacgaggagatccttcccctgcaggtcaagtggaccgaccccaagagcggggaggagaagaccatcaccgtcaaggccgatgatggcattcgggatggcatcaccgccgagtccctcggcaagatccgccctgctttcgccaaggacggctctatccacgccggtaacgcctctcagatctccgacggtgctgccgccgttctgctgatgaagcggtccaccgccgagcgcctgggccagaagatcatcggcaagtacgttgctgccagcgttgtcggtgtcaagcccctgcttatgggtatcggcccctgggccgccattcccgtcgccctcgagaaggccggcatcaccaaggatgaagtcgacatctatgagatcaacgaggcctttgcctcccagtgcgtgtggtgtgtcaacgagctcggcatccctcaagagaagatcaacccgaagggtggtgcgattgcattcggacatcccctcggctgcaccggtgccagacagattagcaccctcttcaccgagctgaagcgcaccaacaagaaagttggtgtgacgagcatgtgcgttggtaccggtatgggtatggccgcggtctgggttgccgaataa

SEQ ID NO: 2608 - protein, 419 aa, Aspergillus clavatus NRRL 1
MSSAQQRLSQVSSHFTAGGKKGAAALTEKHPDDIVVTCALRTALTKGGKGGFKDTAAADLLAGVFKGLIDRSGIDPKAVEDVAVGSVLAPGGGATEFRAAALVAGFSESTAVKSLNRQCSSGLQAIVDIANAIKSGMIEVGVGAGVESMSSQYGPGAVTEFSELLESHPESANCKVPMGVLSEQMAKDRNISRAVQDAFAASSYQKAVTAQKAGLFNEEILPLQVKWTDPKSGEEKTITVKADDGIRDGITAESLGKIRPAFAKDGSIHAGNASQISDGAAAVLLMKRSTAERLGQKIIGKYVAASVVGVKPLLMGIGPWAAIPVALEKAGITKDEVDIYEINEAFASQCVWCVNELGIPQEKINPKGGAIAFGHPLGCTGARQISTLFTELKRTNKKVGVTSMCVGTGMGMAAVWVAE

SEQ ID NO: 2609 - DNA, 1242 bp, Aspergillus clavatus NRRL 1
  CDS (1)..(1242)
atggcttctcccgttccccgtggccttcgtcaggtcctccagaagtctccttcggacatcgttattctttcggcacttcgtacgccagtaactcgagcaaagaagggtggcttcaaggatgcttatcccgaagaactccttgcaaatgttctcaaggcgacccttgaggtaaacccgaacttggatcctgctctgatcgaggaagtcgctattggatctgtgctccaggagcttggtggtgcgaaagcaggacgtatggctcagattcacgctggcttcccccacaccgttcctttccacacgatcaacaggcaatgttcatctggtctcgccgcgattactgccattggtaatggaatccgtgccggtgccctgaatgtcggtgtcggtggtggaatggaatccatgactcgtaactacggttctcgggctatccccactgtcctctggcccgagctgaaggactcgccgtcgaaggatgccagggattgcatcatgcctatgggactcacctctgagaatgtcgcgtccagatacggtatctcgagagcggatcaggatgtatttgctgccgagtcgcacaagaaggccgcagctgctcaacaagccggcctattcgacgctgagattgtgcccgtgaagactctctctttcgaccgtgagaaccctgatgcccctcccaaggagatcactgtcgcgaaggacgatggcattcgccacaatatctccgctgagaagatggccacattgaagcctgccttcgcagcagatggcgccagtaccgctggcaacagctcgcaagtcagtgacggcgctgctgctgctctgttgatgcgccgctctaccgccaccgaacttggcctgacttcatcaatccaggctcgctgggtcgctaccgctatcgctggatgcgctcccgacgagatgggcgttggacccgcggtcgctatccccaggctccttgagatggttggcatgaacgtttcggatgtcggaatttgggaaatcaacgaggcgtttgcttctcaggctctgtacagtgtacgcaagctcggaatcgacgaggccaaggtgaaccctaagggtggtgctattgccattggtcacccattgggtgctactggtgctagacaactcgccactctgcttcctgagcttcagcgcactggccaggacgttggtgtggtcagcatgtgcattggaactggaatgggcatggctggtatgttcgttcgggagtaa

SEQ ID NO: 2610 - protein, 413 aa, Aspergillus clavatus NRRL 1
MASPVPRGLRQVLQKSPSDIVILSALRTPVTRAKKGGFKDAYPEELLANVLKATLEVNPNLDPALIEEVAIGSVLQELGGAKAGRMAQIHAGFPHTVPFHTINRQCSSGLAAITAIGNGIRAGALNVGVGGGMESMTRNYGSRAIPTVLWPELKDSPSKDARDCIMPMGLTSENVASRYGISRADQDVFAAESHKKAAAAQQAGLFDAEIVPVKTLSFDRENPDAPPKEITVAKDDGIRHNISAEKMATLKPAFAADGASTAGNSSQVSDGAAAALLMRRSTATELGLTSSIQARWVATAIAGCAPDEMGVGPAVAIPRLLEMVGMNVSDVGIWEINEAFASQALYSVRKLGIDEAKVNPKGGAIAIGHPLGATGARQLATLLPELQRTGQDVGVVSMCIGTGMGMAGMFVRE

SEQ ID NO: 2611 - DNA, 1263 bp, Aspergillus clavatus NRRL 1
  CDS (1)..(1263)
atgtctaccccacagcagcggttgtcctccatcgcgagccaggttgctggttccggtgtgtctgcgaagagcaagctcctggctaagaaccctgatgatattgtaatcacactcgctgttcgcactcctctcacaaaagccagaaagggtggcctgaaggataccacgatcgataacctcctcgtttcgttgctcacatccatccgggagaagtccaacctcgaccctagcctcgttgaagatgtctgcgtcggtaacgtgctcgcgcccggctcggcctatgttgctcgttccgctgtcctcgcagctggcttcccggtgaccgctgctgcctccattgcgaaccgtttctgctcatctggattgctggcaatccagaatatcgccaaccagatcatggctggctccatcgatgttggtatcgccgtcggagcagagagtatgagcaccaacgccgacggtggcgcccccgacatgtccgctcagatcctatcgcaccccattgcctcccagaacacccagcccatgggccagacctccgaaaacgttgcggctcagttcaacatctcccgcgagcagcacgatcagttcgccgccaagagttaccagaaggctgagcgcgctcagaaggccggctggactgtggatgagatcgttcccgtccggacccaggtcaaggaccccaagaccggtgaggtgaaggacgtcgtggtcgaccgcgatgacggtgttcgctacggcaccactgccgagtccctcggcaagattcgctctgccttccctcagtggaagcccagtgccacaaccggtggcaatgccagccagatcaccgatggtgccgctggtgttatcctgatgaagcggtctcgtgcccaagagctcgggcagcccatcatcggcaagttctgcggagccaccgtcgcgggtctggagcccagaatcatgggtatcggcccttccattgctatccccaaaatcctctccaagttcggcttgaccaaggatgatgtcgatgttttcgagattaacgaagctttcgcatccatgggtgtctactgtgtctccaagcttggtctagatgagagcaaggtcaacccccgtggcggagccattgcacttggccaccccttgggagcaacaggcgctcgacaggttgtcactgctctgtctgagctgcgacgccagaacaagagaatcgccgtcacctcgatgtgtgtcggaaccggtatgggtatggccggtatctttgtttcagagcactag

SEQ ID NO: 2612 - protein, 420 aa, Aspergillus clavatus NRRL 1
MSTPQQRLSSIASQVAGSGVSAKSKLLAKNPDDIVITLAVRTPLTKARKGGLKDTTIDNLLVSLLTSIREKSNLDPSLVEDVCVGNVLAPGSAYVARSAVLAAGFPVTAAASIANRFCSSGLLAIQNIANQIMAGSIDVGIAVGAESMSTNADGGAPDMSAQILSHPIASQNTQPMGQTSENVAAQFNISREQHDQFAAKSYQKAERAQKAGWTVDEIVPVRTQVKDPKTGEVKDVVVDRDDGVRYGTTAESLGKIRSAFPQWKPSATTGGNASQITDGAAGVILMKRSRAQELGQPIIGKFCGATVAGLEPRIMGIGPSIAIPKILSKFGLTKDDVDVFEINEAFASMGVYCVSKLGLDESKVNPRGGAIALGHPLGATGARQVVTALSELRRQNKRIAVTSMCVGTGMGMAGIFVSEH

SEQ ID NO: 2613 - DNA, 1179 bp, Drosophila pseudoobscura pseudoobscura
  CDS (1)..(1179)
atgtctgacgtgtacattgtgtccgcagcccgcacgcctataggtagcttctgtgaaacgctttctaaactgaaagcctctgatctgggcagcgtggtcatccaggaagtgctcaagcgggcgagtgtggagcccgaaaatgtcaacgaagtcatcatgggtcaggcgctgactgcgggtcagggccagaaccccgctcgtcaggcctctctcaaggcgggcctccccattcaagtgccagcctatggcatcaatatgctctgtggttcaggtctcaaaaccgttgtcctgggctatcagtccattcgttctggggatgccaacatcgtgattgctggcggccaggagagcatgtccctggctccccatgtcatgcatttgcggcagggtgtgaaaatgggcccgagcagctttgttgattcgatgctccatgacgggctcacagatgccatggagaacatccacatgggcgtcaccgcagagattcttgccgagaaatataacctgagtcgggaggcccaggactcgtacgccgttcagtcacagacacgggcagaggaggcccagcaaaagggctactttgacaaggagattgtccccgtggagatcaaggatcgaaagggcactcagatcttcagcaaggatgagtacatcaaggcgggcagcactgtcgagggcgtgcagaagctgagggccgccttcaaggagggcggcaccgtcaccgctggcaatgcttcgggtgtgaatgattccgctgccgccgtcctgctgatgtccggcgaggaggtcaccaaaaagggtctgaaaccgctggccaagattgtgggttggacgcagagtggaatcgagcccagggtcatgggtctgggaccggttacagctgtggaagccttgttgacgaaaatctcgtggaaacgcgaggaagtcgatctgtatgagctgaacgaagcctttgctgcccaatccctggctgtgctaaaggatctgcagttggatgccagcaaagtgaatgtgaacggaggtgcgattgctttgggccatccgattggtgcctcgggtgcccgtgtcctggtcacgctgctctatgccttggagcgcactggcggtcgtcgtggtatcgcctccctctgcatcggtggcggcatgggcattgctttggccatcgagcgtgtcgtctaa

SEQ ID NO: 2614 - protein, 392 aa, Drosophila pseudoobscura pseudoobscura
MSDVYIVSAARTPIGSFCETLSKLKASDLGSVVIQEVLKRASVEPENVNEVIMGQALTAGQGQNPARQASLKAGLPIQVPAYGINMLCGSGLKTVVLGYQSIRSGDANIVIAGGQESMSLAPHVMHLRQGVKMGPSSFVDSMLHDGLTDAMENIHMGVTAEILAEKYNLSREAQDSYAVQSQTRAEEAQQKGYFDKEIVPVEIKDRKGTQIFSKDEYIKAGSTVEGVQKLRAAFKEGGTVTAGNASGVNDSAAAVLLMSGEEVTKKGLKPLAKIVGWTQSGIEPRVMGLGPVTAVEALLTKISWKREEVDLYELNEAFAAQSLAVLKDLQLDASKVNVNGGAIALGHPIGASGARVLVTLLYALERTGGRRGIASLCIGGGMGIALAIERVV

SEQ ID NO: 2615 - DNA, 1197 bp, Drosophila pseudoobscura pseudoobscura
  CDS (1)..(1197)
atgtctgcagcaacaaaaggtatttatatcgtggctgccaagcgcacggcctttggtaccttcggaggcgccctgaagggcattaatcagacgcagctgcagacagtggcagccaaggctgccctggatgcggctggtctgaagggagagcaggtggacaccgtcattgtcggcaatgtgattgcgtcctcctccacggacggcatttacgtaccgcgccatgtgggcctcaactgtggtgtgcccattgagaagcccgccctgggaatcaatcgcttgtgcggatctggcttccagtcgatcgtgaacggagcccaggacattctggtgggcggagctaaggtggcgctcaccggcggcgtggagaacatgtcacagagtccgttcattgcccgcaacattcgttttggcaccaccctgggggccaactacaatctggaggacgcgctgtgggcaggactcaccgatagccgctgcaaactgcccatggccctcacagccgagaacctggccgatcagtacaagatcagcagggagcgtgtggatgagttcgcgctgctgtcgcagaagaactgggagaagggtcagaaggagggcgccttcgatgcggagatcactcccatcaagctgaaggtgaagggaaaggaggtggactttgtcatcgatgagcatcctcgccccaagaccaccatcgagggcctgaacaagctgccctcgctcttcaagaagaacggagttgttacggccggcacagcgtctggcatctgtgacggagccgccgccgtgattgttgcctctgaagaggctctgaaggagtacaacctcaagcccctggcccgcctggtcgccttctcctttgtgggcgtcaaccctgagattatgggcattggcccagtgcctgccatccagaacgtactcaaggttgccggcaagaagctggaggacattgatctcattgagatcaatgaagcctttgctgcccaaactcttgcctgtgccgatgctctgaagctggatccctccaagctgaatgtaaatggcggtgccattgccttgggacatcctctgggtgccagtggctctcgcatcaccggtcacctggtccacgagttgcagcgcaagggactcaagtacggcattggctcggcctgcattggcggtggccagggcattgccttgctgcttgaggctgtctaa

SEQ ID NO: 2616 - protein, 398 aa, Drosophila pseudoobscura pseudoobscura
MSAATKGIYIVAAKRTAFGTFGGALKGINQTQLQTVAAKAALDAAGLKGEQVDTVIVGNVIASSSTDGIYVPRHVGLNCGVPIEKPALGINRLCGSGFQSIVNGAQDILVGGAKVALTGGVENMSQSPFIARNIRFGTTLGANYNLEDALWAGLTDSRCKLPMALTAENLADQYKISRERVDEFALLSQKNWEKGQKEGAFDAEITPIKLKVKGKEVDFVIDEHPRPKTTIEGLNKLPSLFKKNGVVTAGTASGICDGAAAVIVASEEALKEYNLKPLARLVAFSFVGVNPEIMGIGPVPAIQNVLKVAGKKLEDIDLIEINEAFAAQTLACADALKLDPSKLNVNGGAIALGHPLGASGSRITGHLVHELQRKGLKYGIGSACIGGGQGIALLLEAV

SEQ ID NO: 2617 - DNA, 1215 bp, Pichia stipitis CBS 6054
  CDS (1)..(1215): transl_table=12
atgtccgtcgtttccaatattctcaagaaatctgccaatgatatcgttgtgttatcagctttgcgtactcctatcacaagaggaaacaagggtggtttggctaaaatgtatccggaggaattactacacgatgtgttgaaaggttcaatagagcgatctggagttgatccggaattaattgacgatattcttgttggtgccgttctccaaactttgggcggtcaaaaggcttcggccttggctgcaaagaaagttggtttccctgtgaaaaccactgtcaacaccatcaatagacaatgtgcatcttcggcgcaagctgtatcttacagcgctggttcacttattactggtgaaaatcaattcactatcgctgctggtgtggagtccatgactcacgactattttcctcacagaggtatccctactagaatctacgagcctttcagacaagaagctagtgccgaagcccagaacgtattgatgcctatgggtattacaagtgaaaatgttgccaatgactttggtatcaccagagaagatcaagacagatttgctgttcaatctcatttgaaagccgctaaggctacggaatcgggtcacttcgcaaaggaaatcattcctataaatgccaggaccaacgcagagggcgaacccattgcccatgcacaagttagcaaagatgatggaatccgtgctggctcgacatttgagaagttgtccggcttgaaaccagtatttaaagaagacggaactaccacagcaggtaactcttcgcagatctctgatggtgcttctgctgtcattttaactactagagctaatgctgaaaaatatggcattaaaccaattgcaagattcttgggctcagctgttgctggtgttccttcagcattcatgggaatcggtccagcagctgcaatcccacaactcttaagcagattgaacgtagaccaaagagatatcgacattttcgaacttaacgaagcctttgcgtcacaatctctttactgcatcaacaagttgggtcttgattttgacaaggtaaacccatacggaggtgctattgctcttggccatcctcttggggctactggtggtagagtgatagctactttgttgaacggtttgagcgctcaaaataaggagctaggtgttgtatctatgtgcacctctactggccagggttatgccgggttgtttgcaaatgaattataa

SEQ ID NO: 2618 - protein, 404 aa, Pichia stipitis CBS 6054
MSVVSNILKKSANDIVVLSALRTPITRGNKGGLAKMYPEELLHDVLKGSIERSGVDPELIDDILVGAVLQTLGGQKASALAAKKVGFPVKTTVNTINRQCASSAQAVSYSAGSLITGENQFTIAAGVESMTHDYFPHRGIPTRIYEPFRQEASAEAQNVLMPMGITSENVANDFGITREDQDRFAVQSHLKAAKATESGHFAKEIIPINARTNAEGEPIAHAQVSKDDGIRAGSTFEKLSGLKPVFKEDGTTTAGNSSQISDGASAVILTTRANAEKYGIKPIARFLGSAVAGVPSAFMGIGPAAAIPQLLSRLNVDQRDIDIFELNEAFASQSLYCINKLGLDFDKVNPYGGAIALGHPLGATGGRVIATLLNGLSAQNKELGVVSMCTSTGQGYAGLFANEL

SEQ ID NO: 2619 - DNA, 1242 bp, Pichia stipitis CBS 6054
  CDS (1)..(1242): transl_table=12
atggacagactccaacagttaagcggacaattatctccctcatccaagcaatctcttttgcaaaagaacccagacgatgtggttatcgtcgctgcctacagaactgccttgaccaagggtggtagaggtaagttcaaggacgtaggttccgactaccttttgactgagttgttgaagggattcatcaaaaagaccggtgtcgacgtcaacttgatcgaagatgttgcctgtggtaacgttttgaacagagctgccggtgcctttgaacacagaggtgcctctttggctgctggtatcccatacacctctggtttcatcgcccttaacagacagtgttcttctggtttgatggccatctcggaaatcgcaaacaagatcaaggctggtgaaatcgactgtggtatcgcagccggttccgaatccatgtccatcaactatggtccaaactcgttgccaaatctcactccagctttgcaagataacccagaaatgcaaaaatgtttaattcctatgggtataaccaacgaaaacgttgtcaagaagtacaacatttccagacaaaagcaagatgaattcgctgctaactcctacaacaaggctgaaagggccgtttcctctggtgctttcaaggacgaaatcattcctattgaaactatcattgctgaagaagatgacgacgacaatattgtgtacagaaaggaaatcgtcgacaccgacgaaggtccaagaaagggtgtcactgcccaatctttggctaagttgaagccagccttcgctgctgacggtaccacccacgccggtaacgcctctcaaatcactgacggtgctgctgtcgtcttgttgatgagaagatctttggctgaagccaagggctacccaatcgaaggtaagtttgtgttgtgctctgccgtcggtgttcctccagaaatcatgggtgttggtccagctgttgccatcccaaccgtcttgaagaaggctggtttgactgtcagcgacattgatgttttcgaaattaacgaagcctttgctggccaatgtctttactctgctgaagcttgcaacatcccccttgatagattgaacatcaacggtggtgccattgctctcggtcatccattgggtaccactggtgctagacaatacgcaaccatcttgagattgttgaagaagggtgagttcggtttgacttctatgtgtatcggtactggtatgggtgctgcctctatcttggtcaaggaataa

SEQ ID NO: 2620 - protein, 413 aa, Pichia stipitis CBS 6054
MDRLQQLSGQLSPSSKQSLLQKNPDDVVIVAAYRTALTKGGRGKFKDVGSDYLLTELLKGFIKKTGVDVNLIEDVACGNVLNRAAGAFEHRGASLAAGIPYTSGFIALNRQCSSGLMAISEIANKIKAGEIDCGIAAGSESMSINYGPNSLPNLTPALQDNPEMQKCLIPMGITNENVVKKYNISRQKQDEFAANSYNKAERAVSSGAFKDEIIPIETIIAEEDDDDNIVYRKEIVDTDEGPRKGVTAQSLAKLKPAFAADGTTHAGNASQITDGAAVVLLMRRSLAEAKGYPIEGKFVLCSAVGVPPEIMGVGPAVAIPTVLKKAGLTVSDIDVFEINEAFAGQCLYSAEACNIPLDRLNINGGAIALGHPLGTTGARQYATILRLLKKGEFGLTSMCIGTGMGAASILVKE

SEQ ID NO: 2621 - DNA, 1257 bp, Aspergillus niger CBS 513.88
  CDS (1)..(1257)
atggcagcagatcgtctaaactctattctcagtcacctgaagccgacaggcaatagtggactcgccgcaatcactcaaaagaacccagacgatgtagtcatcacccttgcgctgcgcacgcccctcgcaaaggccgttaagggtggattcaaggatacagagctggattacatcctctacgcactgttgaaggaagtgctctctaaatctaagctggatcccgctttagttgaggatgtgtgcctgggaaatgtcggcgacggcaaagcagcctacctcgtccgcgctgcctccctcgcagccggcatccctcacactgccggtggatcctccgtgaaccgcttctgctcgtctggtctgaaggccgtacaggacatcgcgaatcagattcagcttggagccattgatgttggtatcgctgtcggtgcggagttgatgtctgctggtggcgaccggctgccgcgtccgttcaacgaggaggtccttcgcaaccaggaagcggcggactgcatgcagcccatgggtcagacgtcggagaatgttggtgcggacttcaacatcacgcgcgagcagcaggacaagtacgctgcggaatctttccgtcgggcagaggaggctcagaaggcgggctggttcgatgacgagatcgtccccattaccacaaaggtcaaggacccgaagactggggagctgaagcaggttacgttgacgaaggatgagggtattcgctatggtacgacgccagagtcgctggccaagatccgtcctgctttcccgcagttcggtaatcggagcacgggaggaaactcgagtcaggttacggatggtgccgccgctgttcttctcatgcgccgctccaaggctattgagctgaaccagcccattctggccaagttctgcggtgccaccgtcgcgggagtgccgccccggatcatgggtattggtcccacggcagcgatccccaagctgctgtcccagttcaacttgaacaaggacgacattgacatctacgagattaacgaggccttcgcctccatggctgtctactgccttaacaaccttggtctggagcacgccaaggtgaacccgcgcggtggtgccattgcccttggccaccctctgggcgcaacgggcgcacgccagatctgcacgattctcagtgaggcgcgccggacgaagaagaagatcctggtgacaagtatgtgcattggcacgggccagggtatggcgggtttgtttgtgaatgagcaggtgtaa

SEQ ID NO: 2622 - protein, 418 aa, Aspergillus niger CBS 513.88
MAADRLNSILSHLKPTGNSGLAAITQKNPDDVVITLALRTPLAKAVKGGFKDTELDYILYALLKEVLSKSKLDPALVEDVCLGNVGDGKAAYLVRAASLAAGIPHTAGGSSVNRFCSSGLKAVQDIANQIQLGAIDVGIAVGAELMSAGGDRLPRPFNEEVLRNQEAADCMQPMGQTSENVGADFNITREQQDKYAAESFRRAEEAQKAGWFDDEIVPITTKVKDPKTGELKQVTLTKDEGIRYGTTPESLAKIRPAFPQFGNRSTGGNSSQVTDGAAAVLLMRRSKAIELNQPILAKFCGATVAGVPPRIMGIGPTAAIPKLLSQFNLNKDDIDIYEINEAFASMAVYCLNNLGLEHAKVNPRGGAIALGHPLGATGARQICTILSEARRTKKKILVTSMCIGTGQGMAGLFVNEQV

SEQ ID NO: 2623 - DNA, 1242 bp, Aspergillus niger CBS 513.88
  CDS (1)..(1242)
atggcctctccaatcccccggggcctgcgccaggtcctccagaaatctccctcggacattgtcattctctcttccctccgtaccccggtcacccgtgcgaagaagggcggcttcaaggacgcctatcccgaagagctgctcgctcacgtcctccgggctactttggaggcgaacccgaacctcgaccctgctctcattgacgatgtcgccatcggttccgttctccaggaactcggcggtgcgaaggctggccgtatggctcaaatccacgccggcttcccccacagcgtgcctttccacacgatcaacagacagtgctcctccggtctggctgctatctccactatcggaaacggaatccgctccggagcgattaacgtcggtatcggtggtggaatggagtccatgaccagaaactatggctcccgcgccatccccacggttctctggcccgagctgaaggagtctcactcccaggacgcccgtgactgcattatgcccatgggtatcacctccgagaacgttgcttcgcgctacggcatctcccgtgccgaccaggacgcgttcgctgccgagtcccacaagaaggctactgccgcccagaacgccggtctgttcgacaaggaaatcatccccgtcaagaccctctcctatgaccccgagaaccccgatgctcctcccaaggagattaccgtgaccaaggacgacggtgtccgccccaacatctcggttgagaagatggctagcctgaagcccgctttctctcccaccggtgctagtaccgctggaaacagctcccaggtcagcgacggtgcggctgccgctctgctcatgcgccgctctactgctaccgagctcggcctgacctctcagatccagggccgctgggttggcactgccgttgcgggctgtgctcccgacgagatgggtgtcggccctgccgttgctatccccaagctccttcagcagcttgacatgaccgtctcagatgttaacgtctgggaaatcaacgaggctttcgcctcccaggccctgtactctatccgcaagctgggtattgacgaggccaaggtgaaccctaagggtggtgccatcgctatcggtcaccctcttggtgccaccggtgccagacagcttgccactctgctgcctgagttggagcgtaccggccaggaagtcggtgttgtgagcatgtgcattggcactggtatgggcatggctggcatgttcgtccgggagtaa

SEQ ID NO: 2624 - protein, 413 aa, Aspergillus niger CBS 513.88
MASPIPRGLRQVLQKSPSDIVILSSLRTPVTRAKKGGFKDAYPEELLAHVLRATLEANPNLDPALIDDVAIGSVLQELGGAKAGRMAQIHAGFPHSVPFHTINRQCSSGLAAISTIGNGIRSGAINVGIGGGMESMTRNYGSRAIPTVLWPELKESHSQDARDCIMPMGITSENVASRYGISRADQDAFAAESHKKATAAQNAGLFDKEIIPVKTLSYDPENPDAPPKEITVTKDDGVRPNISVEKMASLKPAFSPTGASTAGNSSQVSDGAAAALLMRRSTATELGLTSQIQGRWVGTAVAGCAPDEMGVGPAVAIPKLLQQLDMTVSDVNVWEINEAFASQALYSIRKLGIDEAKVNPKGGAIAIGHPLGATGARQLATLLPELERTGQEVGVVSMCIGTGMGMAGMFVRE

SEQ ID NO: 2625 - DNA, 1266 bp, Aspergillus niger CBS 513.88
  CDS (1)..(1266)
atgtcttccgcgcaacaacgattgacctcgatcgcaaaccagctttcgggccctggtgcggcgtctgcaaagcaaagggtcttgtccaagaaccctgacgacattgtgattacactggccgttcggaccccgctcacaaaggccagaaagggcgggttgaaagacacgagtcttgacgatcttctcatctcgttgctgacgtccatccgcgaaaaatcgaatcttgaccccaaccttgtcgaggatgtttgcgttggaaatgtgctgtgccccggcgcagcttacgtcgcccgttcagctgtgctggccgcaggatttccggtcacagctgccgcttcagtcgccaatcgattctgttcctccggattgcttgccgtccagaacatcgccaaccagatcatggctggctctattgatgttggtatagctgtgggggctgagagcatgagcaccaacgccgacggtggttctccagaaatgtcctccaagattttgaaccacccgattgcctcgcagaacatccaacctatgggacagacatccgagaatgttgcctcgcagttcaacattacccgtgaaatgcatgatcggtttgccgccaacagctaccagaaagccgagcatgcccagaaggcgggatggttcaacgacgagattgtcccagtgaagacgataatcaaagaccccaagacgggcgagaccaaagaagttgtcgtcgaccgggatgatggtatccgctacggcaccacagccgagtctctgggcaagatccgctctgcgttccctcaatggaagcctagcgcaactacaggcggtaacgccagtcaaattaccgatggtgctgccggtctcattctcatgaagcgatctcgcgcccaagagctcggtcaacccattgtggccaagttctgcggtgctactgttgcaggcttggagcctaggattatgggcattggtccatcaatcgctattcccaagattctttccaagttcggtctgagtaaggaagatatcgacatctttgaaatcaacgaggcattcgcctcaatgggaacgtattgtgtccagaagctaggcctggatgaggccaaagttaacccccgtggcggtgctattgcttttggccaccctctgggctgcacaggagcgcgccaggtggtgaccgccctttcggagttgcgccgacagaacaagaggatcgcagttacctcgatgtgtgttggaacgggcatgggcatggctggtatcttcgtctctgagcattga

SEQ ID NO: 2626 - protein, 421 aa, Aspergillus niger CBS 513.88
MSSAQQRLTSIANQLSGPGAASAKQRVLSKNPDDIVITLAVRTPLTKARKGGLKDTSLDDLLISLLTSIREKSNLDPNLVEDVCVGNVLCPGAAYVARSAVLAAGFPVTAAASVANRFCSSGLLAVQNIANQIMAGSIDVGIAVGAESMSTNADGGSPEMSSKILNHPIASQNIQPMGQTSENVASQFNITREMHDRFAANSYQKAEHAQKAGWFNDEIVPVKTIIKDPKTGETKEVVVDRDDGIRYGTTAESLGKIRSAFPQWKPSATTGGNASQITDGAAGLILMKRSRAQELGQPIVAKFCGATVAGLEPRIMGIGPSIAIPKILSKFGLSKEDIDIFEINEAFASMGTYCVQKLGLDEAKVNPRGGAIAFGHPLGCTGARQVVTALSELRRQNKRIAVTSMCVGTGMGMAGIFVSEH

SEQ ID NO: 2627 - DNA, 1260 bp, Aspergillus niger CBS 513.88
  CDS (1)..(1260)
atgtcttccgcccagcagcgtctttcccaagtggcctcccacttcggccctggtggcaagaagggagtctccgccatcacggagaagcaccccgatgatatcgttgtgacctgcgctctgcgtacggctcttacaaagggtggaaagggtggtttcaaggacaccgctgccgccgacttgctggccggtgtcttcaagggggtcatcgaccgcagcggcatcgacccaagccaggttaacgacatcgctgtcggctccgtccttccccctggtggtggtgcgacggaattccgtgctgccgccctggtggcgggcttccctgagtctactgccgttaagagtctgaaccgtcagtgctctagcggtctccaggcgattgtggacattgccaatgccctgaaatcaggcatgatcgatgttggtattggtgctggtgtcgagagcatgtcgtctcaatacggccccggtgccgtgaccgagttctccgagcttctcgaggcccaccccgagtcggccaactgcaaggttcccatgggtgttctgtccgagcagatggccaaggatcgcaacgtcactcgtgcagcccaggacgccttcgccgcctcgtcgtaccagaaggccgtcaaggcccagaaggccggtctcttcaacgaagagatcatccctctgcaggtcaagtggacggaccctaagtccggcgaggagaagaccatcaccgtcaaggccgacgacggcatccgcgacggcattacccccgagtcgctgggcaagatccgacctgcattcgccaaggacggatccatccacgccggaaacgcctcccagatctccgacggtgctgccgccgtgctgctgatgaagcgttctacggccgagcgcctgggacagaagatcatcggcaagtacgtcgctgctagcgtcgtcggtgtcaagcctctgctcatgggtatcggcccgtggaaggccatccccgtggccttggagaaggccggcatcaccaaggacgacgtggatatctatgagatcaacgaagcgtttgcctcgcagtgcgtctggtgcatcaacgagctgggtctgccgcaggagaagatcaatcccaagggtggtgcgattgcctttggacacccgctcggctgcacgggttcgcgccagatcagcacgctgctgacggagctgaagcggacgaacaagaagattggtgttagcagcatgtgcgtcggaacgggtatgggtatggcagccgtttgggttgcggagtaa

SEQ ID NO: 2628 - protein, 419 aa, Aspergillus niger CBS 513.88
MSSAQQRLSQVASHFGPGGKKGVSAITEKHPDDIVVTCALRTALTKGGKGGFKDTAAADLLAGVFKGVIDRSGIDPSQVNDIAVGSVLPPGGGATEFRAAALVAGFPESTAVKSLNRQCSSGLQAIVDIANALKSGMIDVGIGAGVESMSSQYGPGAVTEFSELLEAHPESANCKVPMGVLSEQMAKDRNVTRAAQDAFAASSYQKAVKAQKAGLFNEEIIPLQVKWTDPKSGEEKTITVKADDGIRDGITPESLGKIRPAFAKDGSIHAGNASQISDGAAAVLLMKRSTAERLGQKIIGKYVAASVVGVKPLLMGIGPWKAIPVALEKAGITKDDVDIYEINEAFASQCVWCINELGLPQEKINPKGGAIAFGHPLGCTGSRQISTLLTELKRTNKKIGVSSMCVGTGMGMAAVWVAE

SEQ ID NO: 2629 - DNA, 1254 bp, Ostreococcus lucimarinus CCE9901
  CDS (1)..(1254)
atgaatgaatgcgcgcgacggccgcgggacgctcgactgacgacgcgcatcgacgcacagggattcgccaaatcgccggatgacgtcgtcatcgtgagcgcgtgcagaacgcccatcacgcgagcgaagcgaggcggattggcggcgacgccggcggatgacttgatcgccgcggtgctgcaagcgagcgtggcgcgagggaaaattgatgtgaacgatgtcggggacatcgtcgtcggatcggtgctgggagcgtcgagtcaaagggctaacgagtgcaggataggaatgtttctcgcggggtttccgaaggaggtgccggtgcgaacgacgaatcgacagtgctcgtcggggttgcaggcgtgcgcggacatcgcggcgggaatcaaggctgggtactacgatatgggaatcggtgcgggagtggagacgatgacggcaaatccgatgaagtgggaaggcgggattaatccgcgaatcgcgtcgtcgagcgacgcgcaaaactgcttgattcccatgggcatcacgagcgaaaacgtggcggagaagtgggggatcacgcgcgaggcgcaggatacgatggcggcgcgatcccacgcgcgcgcggcaaacgcgcgcgcgagcggcagattcaaggctgaaatcgtgcccattcacacgaaaaccgctccggatcccaaaaccggcgccggcggcggcgcaaacgtcatcgtgtcggaggacgacggtatcagagagggcacaacggttcaatcgctcgcaaaactcccggctgtgttcaagaaaggcggcagcacgacgccgggcaacgcatcgcaagtttccgatggtgccgccgccgtcgttctggcgcgaagatcgtacgcagaggcgcgcggcttgccgattttggcgacttggcgctcgtgggccgccgtcggctgtgacccagccctcatgggcatcggtcccgcgatcgcgattcccgcgacgctgagtgcggcgaacatgactgtcgatgacgtcgacctgtacgagataaatgaagccttcgcgtcgcaggcgacgtattgcgtcgaaaagttagggctcgattctgaaaaagtcaacgttaacggaggcgccatcgcgttaggccatccgctcggcgctacaggcgcgagatgtctcgcgacactgattcacgagatgcaccgacgtggcgcgaagaccggtgtcgtcagcatgtgcatcggcagcggtatggggatggcttcggccgtgtcaatcgattag

SEQ ID NO: 2630 - protein, 417 aa, Ostreococcus lucimarinus CCE9901
MNECARRPRDARLTTRIDAQGFAKSPDDVVIVSACRTPITRAKRGGLAATPADDLIAAVLQASVARGKIDVNDVGDIVVGSVLGASSQRANECRIGMFLAGFPKEVPVRTTNRQCSSGLQACADIAAGIKAGYYDMGIGAGVETMTANPMKWEGGINPRIASSSDAQNCLIPMGITSENVAEKWGITREAQDTMAARSHARAANARASGRFKAEIVPIHTKTAPDPKTGAGGGANVIVSEDDGIREGTTVQSLAKLPAVFKKGGSTTPGNASQVSDGAAAVVLARRSYAEARGLPILATWRSWAAVGCDPALMGIGPAIAIPATLSAANMTVDDVDLYEINEAFASQATYCVEKLGLDSEKVNVNGGAIALGHPLGATGARCLATLIHEMHRRGAKTGVVSMCIGSGMGMASAVSID

SEQ ID NO: 2631 - DNA, 1251 bp, Pichia guilliermondii ATCC 6260
  CDS (1)..(1251): transl_table=12
atggacagattaaatcaacttgcaggccagttgtctccttcctccaaacaggcggtattagagaagaacccagatgatgtggttgtagtggctgcttatagaaccgctttgaccaaaggtggaaaaggtggtttcaaagatgttggttccgactatcttttggcacaacttatcaagggatttttggccaagaccaaaattgacgtgaacttgattgaagacgtggccattggtaacgttttgaaccgtgctgctggtgcttccgagcacagaggtgcttcgttggctgctggaattcccaacaaggcagcttttgttgccatcaacagacaatgttcttcaggtttgatggctatttccgacattgccaacaagatcaagtgtggagaaatcgactgtggtctcgctggaggtgtggagtccatgtcctccaactatggtgccggcgctcttcccaaggtggactcacatttggctgaagaggacggaatggccaagtgtatgattcctatgggtatcaccaacgaaaacgtggcggaaaagtacagcattccaagaacaaagcaggatgcgttcgctgctgcctcgtaccaaaaggccgtcaaggccgtggctgacggtaagttcaaagacgagatcattcctatcgagtcgtacattgccgagggcgacgatgacgaagatgaggatgacatcaagtacaaaaaggtcaccatcgataccgatgaaggcccaagaaagggtgtcaccgccgaatctttggccaagttgagacccgctttcaaggctgatggttccacccacgccggtaacgcttcgcaggtcagtgacggtgctgctgtcgttctcttgatgagaagatcgttggccgaggccaagggctacccaatcgaggccaagtacgtcatgtgtaactctgttggtgttcctccagaaatcatgggtgttggacccgccgtggccattccttctgtgttgaagaagaccggattgacggtcaaggacattgatgtgtttgagatcaacgaggctttcgccgctcaatgtttgtactctgctgagtctctcaacataccacctgaaaagttgaacataaacggtggtgccatcgccttgggtcaccccttgggttctactggtgctagacaatacgccaccatcttgcgtttgttgaagaagggagagatcggtttgacctccatgtgtatcggtaccggaatgggtgctgcttccatcttggtcaaggagtag

SEQ ID NO: 2632 - protein, 416 aa, Pichia guilliermondii ATCC 6260
MDRLNQLAGQLSPSSKQAVLEKNPDDVVVVAAYRTALTKGGKGGFKDVGSDYLLAQLIKGFLAKTKIDVNLIEDVAIGNVLNRAAGASEHRGASLAAGIPNKAAFVAINRQCSSGLMAISDIANKIKCGEIDCGLAGGVESMSSNYGAGALPKVDSHLAEEDGMAKCMIPMGITNENVAEKYSIPRTKQDAFAAASYQKAVKAVADGKFKDEIIPIESYIAEGDDDEDEDDIKYKKVTIDTDEGPRKGVTAESLAKLRPAFKADGSTHAGNASQVSDGAAVVLLMRRSLAEAKGYPIEAKYVMCNSVGVPPEIMGVGPAVAIPSVLKKTGLTVKDIDVFEINEAFAAQCLYSAESLNIPPEKLNINGGAIALGHPLGSTGARQYATILRLLKKGEIGLTSMCIGTGMGAASILVKE

SEQ ID NO: 2633 - DNA, 1203 bp, Lodderomyces elongisporus NRRL YB-4239
  CDS (1)..(1203)
atgcccccggtctcaccacttttgaaaaaatccgcaaaggatatcgttattctttcagcattgcgaaccccagtaacaaagtctatcaaaggtgggttagcgcaattataccctgaagagcttctttatcatatccttcatggctctgttactcgctcaaaagtcgatccacaattaattgatgatatacttgttggtgccgttctccaaacactcggcggccaaaaagcatcggctctagcagttaaaaaagtagggttccctataaagacaacggtcaacactgtgaatcgacaatgcggttcttctgcacaagccattacatattctgcgggatctttgctttcaggagagaatcaatttgccattgctgctggagttgagtcaatgacacatgattatttcccacatcgaggaattccccaaagaatctatgaaccatttttacaagatgccgatgacgaggcaaaaaatgttttgatgccaatgggattaacaagtgaggcagtcgccgagaaatatggagttggaagaaaagaacaagatgaatttgccgtacagtcacatttgaaagcagcaagagccacagaaagtggccattttgcaaaggaaatagtgccaatagacgcaaggacacccgagggtgagcccgtagtggtaagcaaggatgatggaatcagaggaaactccacctttgaaaaattgtccacattgaaacccgtattcaaagaagacgggttcaccactgctggtaactcctcgcaaatatcggatggagcttcagccgtgattttgactacaagggagaacgcagaaaaatatggatataagcccattgcaaagtttattggctctgctgtggcaggtgtaccttcaggactaatgggaattggtccttcagctgcaattcctcagctattgaatcgtttgggtattgagatcaacgacattgatatttttgagctcaatgaagcatttgcatcgcaactgatatactgcatcaataaattgggattggattatgataaagtgaacccctacggcggtgcgatagcaattggtcacccattgggtgcaactggtggaagggtgactgcgaccttgttgaatggattgcgtgctcaaaataaagagttgggtgttatatctatgtgtacatccactgggcagggctatgctgcactattcgccaacgagcaataa

SEQ ID NO: 2634 - protein, 400 aa, Lodderomyces elongisporus NRRL YB-4239
MPPVSPLLKKSAKDIVILSALRTPVTKSIKGGLAQLYPEELLYHILHGSVTRSKVDPQLIDDILVGAVLQTLGGQKASALAVKKVGFPIKTTVNTVNRQCGSSAQAITYSAGSLLSGENQFAIAAGVESMTHDYFPHRGIPQRIYEPFLQDADDEAKNVLMPMGLTSEAVAEKYGVGRKEQDEFAVQSHLKAARATESGHFAKEIVPIDARTPEGEPVVVSKDDGIRGNSTFEKLSTLKPVFKEDGFTTAGNSSQISDGASAVILTTRENAEKYGYKPIAKFIGSAVAGVPSGLMGIGPSAAIPQLLNRLGIEINDIDIFELNEAFASQLIYCINKLGLDYDKVNPYGGAIAIGHPLGATGGRVTATLLNGLRAQNKELGVISMCTSTGQGYAALFANEQ

SEQ ID NO: 2635 - DNA, 1218 bp, Lodderomyces elongisporus NRRL YB-4239
  CDS (1)..(1218)
atgcaattaaatcagacaagtgcagcaggcaaaaagtcagttctcgaaaaacacccagacgatgtcgttatcgtggcagcatacagaactgctatcggtaaaggtttcaaaggaagctttagaaacgttagcacagaattcatccttaccgagtttctcaaacaatttcttaagaaaacccaagttgatcctaacttgattgaagatgttgccatgggtaacgtatgtaaccaagctattggtgcaatggaacatcgtggtgcatgtttggctgctggtatcccatacacctctggtttcattggtatcaaccgtttctgctcctcaggtttgatggccatttcagatatcgcaaacaagattgccactggtgaaatcgattgcggtattggtggtggtattgagtccatgtcacaatactacaagaaggctattccttccgtcgacccacacttgggcgacgacgaagccgttgccggatgtatgatccctatgggtatcaccaacgaaaatgttgctgaaaagtttaacatttcaagagaaactcaagatgcattcagtgccgagtcataccaaaaagctgcagctgcagttaaggagggcaagttcaaagatgaaatcttgccaatcagatctatcattagaaccgaagacaaggatggtaatgtcgttgaaaaggaaatcattgttgacaccgatgaaggtccaagagcaggtgtcactgccgagagtctttccaaattgagaccagcatttgacggtaccacaactgcaggtaacgcctcacaaatcagtgatggtgctgccggtgtgctcttgatgaagagatcacttgctgaatctaaaggatacccaattgttgccaagtttgttgcatgcagctcagttggtgtcccaccagaaatcatgggtgttggtccagcatacgccatcccagaagtcttgtccagaacaggcttgagcattgaagacattgatgtttacgaaatcaacgaagcatttgccgcacaatgtctttacagtgctgaacaatgtaacattccaaaggagaagttgaacaagaacggtggtgccattgcccttggccacccattgggtgtgactggtgcaagacaatatgctaccatcttgagattattagaaccaggtcaaattggtgtgacttcgatgtgtatcggtactggtatgggtgcagcatcagtcttggtgagagaataa

SEQ ID NO: 2636 - protein, 405 aa, Lodderomyces elongisporus NRRL YB-4239
MQLNQTSAAGKKSVLEKHPDDVVIVAAYRTAIGKGFKGSFRNVSTEFILTEFLKQFLKKTQVDPNLIEDVAMGNVCNQAIGAMEHRGACLAAGIPYTSGFIGINRFCSSGLMAISDIANKIATGEIDCGIGGGIESMSQYYKKAIPSVDPHLGDDEAVAGCMIPMGITNENVAEKFNISRETQDAFSAESYQKAAAAVKEGKFKDEILPIRSIIRTEDKDGNVVEKEIIVDTDEGPRAGVTAESLSKLRPAFDGTTTAGNASQISDGAAGVLLMKRSLAESKGYPIVAKFVACSSVGVPPEIMGVGPAYAIPEVLSRTGLSIEDIDVYEINEAFAAQCLYSAEQCNIPKEKLNKNGGAIALGHPLGVTGARQYATILRLLEPGQIGVTSMCIGTGMGAASVLVRE

SEQ ID NO: 2637 - DNA, 1242 bp, Ajellomyces capsulatus NAm1
  CDS (1)..(1242)
atgtcaggggcagctcagaaaggcctacggcaaattctccaaaagtttccgtccgatgtagtcatcctctcttcactgcgaacagcagtcactcgggctaacaaaggcggattcaaagatgcctaccccgaagaactgatatctcatgttctgcgcgcgacactcgcggcgaacccgcagctagacccggccttaattggtgatgtggccataggaagcgttctacaagagttgggtggcatgaaggccgcgcgaatggctcagattcatgccggcttcccacctacggtacctttccataccgtcagcaggcagtgcagctctgggttggcagctatcaccgccatttcacattcgatctccgtgggtgcgatatctgttggaattggtgggggcatggaatccatgacgcgcaattatggttcgcgggcccttcctacggttctgtggccggaactgcgcgactcgccctccaaggatgcgagagactgcatcatgccgatgggcatcacatctgagaacgttgcggagcggtacggtatcacgcgcaaggatcaagacttgttttctgcagagtcccataaaaaagctgcggcggcacaggagaagggactgttcgatgccgaaattatacccattacaactaaaacgttccctgagggtcagcctgatgggccagcgacggaaattacggtcactaaagatgacggcgtcagggcgtcgatttcccttgagaaactagctactcttaaaccagcgttctcggcaacaggatcaagcactgctggaaatagttctcaggtcagtgatggtgcggctgccacgttgctcatgcgacgctccacagcaacagaacttggcctcacgtcctgtatcatcggaaaatgggtatccacgcaagtagccggttgcgctcccgatgagatgggtattggcccttccgttgctattcccaaggttctatcacacaccggcctgtcgatctccgacgttggaatctgggaaatcaacgaggcgttcgctagccaggccatctactgtattcgaaaactgggaattgatgaaagtaaagttaaccccaagggtggggcaattgccttgggacacccgttgggggcaactggtgcgaggcaacttgcaactttactcccggagatggagaggcagggagagcgggttggagttgtgagcatgtgtattggaacgggaatgggaatggcaagtgtgtttgtccgggaatag

SEQ ID NO: 2638 - protein, 413 aa, Ajellomyces capsulatus NAm1
MSGAAQKGLRQILQKFPSDVVILSSLRTAVTRANKGGFKDAYPEELISHVLRATLAANPQLDPALIGDVAIGSVLQELGGMKAARMAQIHAGFPPTVPFHTVSRQCSSGLAAITAISHSISVGAISVGIGGGMESMTRNYGSRALPTVLWPELRDSPSKDARDCIMPMGITSENVAERYGITRKDQDLFSAESHKKAAAAQEKGLFDAEIIPITTKTFPEGQPDGPATEITVTKDDGVRASISLEKLATLKPAFSATGSSTAGNSSQVSDGAAATLLMRRSTATELGLTSCIIGKWVSTQVAGCAPDEMGIGPSVAIPKVLSHTGLSISDVGIWEINEAFASQAIYCIRKLGIDESKVNPKGGAIALGHPLGATGARQLATLLPEMERQGERVGVVSMCIGTGMGMASVFVRE

SEQ ID NO: 2639 - DNA, 1266 bp, Ajellomyces capsulatus NAm1
  CDS (1)..(1266)
atggccaacgagagattgcaggctgtccttgcacagctaaagcccgcaacaggggggcagagcgctcttgacaagataacacaaaagaaccccgacgacattgtcatcacattggcacggcgaacgccgatggcgaggggattcaagggcgggttcaaggacacggatcttgactatctggtccttcaactgttgcaggaggtgatggcgaagtcgaaactagatccaaatttgattgatgatgtcgtcatggggaatgcaaacaacgacaaagcttccacaatatgccgcacagctgccctcgccgccggcatcccctacaccgccggtgcggccgctatcagccgcttctgctcgtccggcctcatgtcgattcaaagcgtcgcctacgagatcgcacagggtgccatcgagatcggtattgcaattggcgcagagtccatgagcaaagggcccgaccgcaaccccaagcccttccatccggaaatcatgaaggagccggatgcggcagactgcatgcagccgatgggtcagaccagtgagaatgtcggggatgactttggcatttcgcgcgagatgcaggatcggtactccgtggagtcattccggagggcggaggtggcgcagaaggctggctggttcgaggatgagattgtaccgattcggacgacggtgaagcttgggaaggatgggaaggggccggcgagggaagtgactgtcaccaaagatgaagggccgcggtatggcacgacgttagagtcgttgagtaaaattcggccggcgtttccacagtttgggaataagacgaccggtgggaatgcgagtcagattaccgacggagccgccgccgtaatcctcatgaaacgctccaaagccatcgaactcggccaaccgatcctcgcaaaattcgtcggcgccaccgtcgccggagtcccgccccgcatcatgggcatcggcccctccattgctattcccaaactcctgtcgatgtacaacctgcgcaaggaagatgtcgatatattcgaaatcaacgaggcgtttgcctccatggcggtttactgtattgataagctgggtctggatcacgagaaggtaaacccgcgcggcggcgccattgcgctggggcatccgttgggatgcacggggacgagacaggtctgtactattttgagtgaggcgcggaggacgaagaagaaggtattggttacgagtatgtgtattgggacgggacaggggatggctggattgtttattaacgaacaatga

SEQ ID NO: 2640 - protein, 421 aa, Ajellomyces capsulatus NAm1
MANERLQAVLAQLKPATGGQSALDKITQKNPDDIVITLARRTPMARGFKGGFKDTDLDYLVLQLLQEVMAKSKLDPNLIDDVVMGNANNDKASTICRTAALAAGIPYTAGAAAISRFCSSGLMSIQSVAYEIAQGAIEIGIAIGAESMSKGPDRNPKPFHPEIMKEPDAADCMQPMGQTSENVGDDFGISREMQDRYSVESFRRAEVAQKAGWFEDEIVPIRTTVKLGKDGKGPAREVTVTKDEGPRYGTTLESLSKIRPAFPQFGNKTTGGNASQITDGAAAVILMKRSKAIELGQPILAKFVGATVAGVPPRIMGIGPSIAIPKLLSMYNLRKEDVDIFEINEAFASMAVYCIDKLGLDHEKVNPRGGAIALGHPLGCTGTRQVCTILSEARRTKKKVLVTSMCIGTGQGMAGLFINEQ

SEQ ID NO: 2641 - DNA, 1254 bp, Ajellomyces capsulatus NAm1
  CDS (1)..(1254)
atgtctcaagcaacgcagcgtctttcacaggtcacttcgcaccttaccggcaagggcggagtctccgctatcaccgctaaacacccggacgacatcgtcgtgacctgtgccctgcggacagccatcaccaaaggtggtaagggcggcttcaaggacaccgccgcatccgacctgctggctggtgtattcaaatctttggttgagaaatccaagatcgatcctgccttggtcgaagatattgctgttggctctgttttgcctcctggaggaggagctactgagttccgtgctgcagctctggttgccggatttcccgaaaccgccgctgttcggtctctcaacagacagtgctcgagcgggctccaggcaattgtcgatattgccaatgccatcaagtgcgggatgattgatgttggcatcggcgctggcgtcgagagtatgtctcaacaatatggtcctggtgcagtctccgaattctctgaactgctcgaaagcaaccaagaagccgccaattgcaaagtgcctatgggcatcctctccgagcagatggccaaggaccgcaatatcacgcgtgccgagcaggacgccttcgccgccacctcttaccagaaggccgtcaaggcccaagaggcggggctcttcaatgaagaaatagccccacagaccgttaaattcgtcgatccaaagacagagaaggaatcgaccatcacagtctctcgcgacgacggtgtgcggacgggcatcacggccgaatcgctctccaagattcgcccagcctttgccaaggacggcagtatacacgccgggaactcctcgcagatctctgacggcgccgctgcagtcttgctcatgaagcgctctaccgctgagcgcctgggtcagcgtatcattggcaagtacgtcactgccagcgtggttggtgtcaagccactgctgatgggcattgggccgtggaaggccatccccgtcgcgctggagaaggcgggtttgtccaaggatgacgttgatatctatgagatcaatgaggcgtttgcgtcgcagtgtgtgtggtgtgtgaaggagctggggttaccgctggagaaggtcaatccgaagggtggtgctattgcctttggacacccgcttggctgcacaggctgtagacaggtcagcacgctcctgacggagctgaagagaacggggaagagagttggggttactagcatgtgtgttggcactggaatgggtatggccgctgtctgggttgcggagtag

SEQ ID NO: 2642 - protein, 417 aa, Ajellomyces capsulatus NAm1
MSQATQRLSQVTSHLTGKGGVSAITAKHPDDIVVTCALRTAITKGGKGGFKDTAASDLLAGVFKSLVEKSKIDPALVEDIAVGSVLPPGGGATEFRAAALVAGFPETAAVRSLNRQCSSGLQAIVDIANAIKCGMIDVGIGAGVESMSQQYGPGAVSEFSELLESNQEAANCKVPMGILSEQMAKDRNITRAEQDAFAATSYQKAVKAQEAGLFNEEIAPQTVKFVDPKTEKESTITVSRDDGVRTGITAESLSKIRPAFAKDGSIHAGNSSQISDGAAAVLLMKRSTAERLGQRIIGKYVTASVVGVKPLLMGIGPWKAIPVALEKAGLSKDDVDIYEINEAFASQCVWCVKELGLPLEKVNPKGGAIAFGHPLGCTGCRQVSTLLTELKRTGKRVGVTSMCVGTGMGMAAVWVAE

SEQ ID NO: 2643 - DNA, 1263 bp, Botryotinia fuckeliana B05.10
  CDS (1)..(1263)
atgtcaaccggacctcttcgcagaggactctcgcagatcctcaaaaaagacccctcagacatcgtaattctctcttccctccgcacccccataacccgttcctacaaaggacagctctcctccgcctatcccgaacagctcttgcacagcgttctcaaagccactctctctgccaatccctcgctcgaccctgctctcatcgacgatgtatgcgtcggcgtcgtgctctctgagctcggcggctcgaaagccggccgtatggctatgaaccacgctggctacgatacccgcacctccttctctactaccaaccgcgcgtgcagttctggattgcaagccattaccaatatagcaaattcgattgcgacgggcgggattaatatcggtgttggaggcggaatggaaagtatgacgaggaattatggatcgaaagctatacctgtggatttgtggccagagctgaaggatgcggagagagatacgaaagattgcattatgccaatgggccttacgagtgagaatgtagcgagtagatatggagttggcagagaagaacaggatagattggcggtggagagtcatcgtcgcgcggcagaggcacaggagaagggatggtttgatgaggaaatcgtgccggttactacaatgtggcaggagactggtaaaggaggcgtgaaagtaggagaacccaaggaagttactgttacaaaagatgatgggattagaaagggggctacgttggagagcatgcagaagttaaagcctgcgttcaaggaagatggtgcatcgactgcgggtaactcgtcgcagatttctgatggagcagcagctacattgatgatgcgtcgtagcactgctacctcgctcggactatcctcttctattattggtaaatgggccggtacagcaatcgcaggatgccgtccagatgagatgggaattggacctgcgcttgcaattccaaagttgatggagcaagctggcattcaaaaggaagaggtaaatgtgtgggagattaacgaggcgtttgctagtcaagccatctattgtgtgagggaattaggacttatgggtgcatatgagaagggcgatgtgaatccaaagggaggagccattgcactgggccatccattaggagctactggtgcaagaatggtggcaggtttgttggcggagttgaagagaagagaccaacaggttggtgtcgtcagtatgtgcattggtaccggaatgggaatggcaggaatgtttgtcagggaataa

SEQ ID NO: 2644 - protein, 420 aa, Botryotinia fuckeliana B05.10
MSTGPLRRGLSQILKKDPSDIVILSSLRTPITRSYKGQLSSAYPEQLLHSVLKATLSANPSLDPALIDDVCVGVVLSELGGSKAGRMAMNHAGYDTRTSFSTTNRACSSGLQAITNIANSIATGGINIGVGGGMESMTRNYGSKAIPVDLWPELKDAERDTKDCIMPMGLTSENVASRYGVGREEQDRLAVESHRRAAEAQEKGWFDEEIVPVTTMWQETGKGGVKVGEPKEVTVTKDDGIRKGATLESMQKLKPAFKEDGASTAGNSSQISDGAAATLMMRRSTATSLGLSSSIIGKWAGTAIAGCRPDEMGIGPALAIPKLMEQAGIQKEEVNVWEINEAFASQAIYCVRELGLMGAYEKGDVNPKGGAIALGHPLGATGARMVAGLLAELKRRDQQVGVVSMCIGTGMGMAGMFVRE

SEQ ID NO: 2645 - DNA, 1254 bp, Botryotinia fuckeliana B05.10
  CDS (1)..(1254)
atggccgtcgaaagaatcagctcaattgttaagcatatgactcctggtgcatcaggattgtctgcaattacctcgaaaaatgccgatgatatcgttatcacacttgcagttcgcacaccgttagcaaagggattcaagggaggattcaaggacacaaagcttgactatctcatctacgcccttctccagaaagtcagagaaaagtccaacctcgacccagctcttgtcgaagatatctgctgtggaaatgtcagcgatggcaatgccgcatacaaacttcgtgccgccgccttggcagcaggattcccaaacacagccgcagcctccattgtaaaccgattctgctcctcaggtctcaaggccacccaagatatcgcgaaccaaattgctgaaggtagcattgatattggtattgccatgggtgcagagatgatgtcgattggaggtgataaactcgatggtggtttccaccctgatattctcaaatgccaagatgctgccgattgtatgcagcctatgggacaaacatctgagaacgtaggaaaggacttcaacatcactcgtgaacaacaagataaatacgcggcagagagttatcagcgcgcagagcgtgcccaaaaggctggatggttcgatgatgagatcgtaccaattgttgcggaagtcaaggacccaaagaccggagaagttaagaaggttactttgaccaaagatgagggtccaagatatggaactaccttcgagagcttgaacaagatcagacctgctttcccagcatatggtgatagatccactggtggaaactctagtcaggttactgacggtgctgccgctgttatccttatgaagcgttcccgtgccatcgagctcggccaaccaattctcgccaaatttgtcggagccaccgtagcaggtcttgctccacgtattatgggtatcggtccatccgtcgctatccccaaacttcttaccaaatacaacctcactattgacgattgtgatgttatcgagcttaacgaagcattcgcttccatggccgtatactgcaaagatgtccttaagattcctcacgagaagatgaacatcagaggtggtgctattgcacttggtcatccattgggtacgactggtgctagacaaattgttaccggattgagtgagtgcaggagacagaagaagaagattttgttgactagtatgtgtattggtactggacagggaatggcgggtttgtttgttaatgaacagttgtaa

SEQ ID NO: 2646 - protein, 417 aa, Botryotinia fuckeliana B05.10
MAVERISSIVKHMTPGASGLSAITSKNADDIVITLAVRTPLAKGFKGGFKDTKLDYLIYALLQKVREKSNLDPALVEDICCGNVSDGNAAYKLRAAALAAGFPNTAAASIVNRFCSSGLKATQDIANQIAEGSIDIGIAMGAEMMSIGGDKLDGGFHPDILKCQDAADCMQPMGQTSENVGKDFNITREQQDKYAAESYQRAERAQKAGWFDDEIVPIVAEVKDPKTGEVKKVTLTKDEGPRYGTTFESLNKIRPAFPAYGDRSTGGNSSQVTDGAAAVILMKRSRAIELGQPILAKFVGATVAGLAPRIMGIGPSVAIPKLLTKYNLTIDDCDVIELNEAFASMAVYCKDVLKIPHEKMNIRGGAIALGHPLGTTGARQIVTGLSECRRQKKKILLTSMCIGTGQGMAGLFVNEQL

SEQ ID NO: 2647 - DNA, 1284 bp, Botryotinia fuckeliana B05.10
  CDS (1)..(1284)
atgtcagctgcacaaaaacgtcttggacaagtttccggccatttggctggatcgcagagcactattgcgcccacagagggtgatagtggccgcgcgaagctcttggagaagcatccggatgatatcgtcgtaacagcttgtctccgaaccgcattcacaaagggtggcaaaggaggcttcaaagatacagcagcagccgatttgctcgttggcgcattcaaatctctcattgaacgttcgaaaatcgacccggggctagtagaagacatagtcgttggatcggtgcttcctcctggaggtggagctactgaattccgagctgccgctttggctgcaggatttcctgtatctgcagcagtcaagagtttgaatagacaatgttcatctggtctacaagcatgtgtggatatcgcaaatgccatcaagtccggcatgattgatgtcggtgttggagcaggtgtcgaaagcatgagtttgcaatatggacccggcgcagtaacagaattttccgaactcctcgagtctcacccagaatctgcgaactgcaaagtgcctatgggcgttctctccgagaatatggccaaagacaagggaattccacgttccctgcaagactcatttgcagcttcatcataccaaaaagcactcaaggctcaagaggagggtctttttgacgaggaaattgctcctttaactgtcaaatgggaggacccaaaaactggcgaaataaaggacatcactgttgccaaggatgatggtgttcgaccgggtatcaccgctgagagcttaggcaaaattaagcctgcttttgcaaaggatggtagtattcatgccggaaatgcttctcaaatttcagatggagctgccgcagttcttttgatgaagcgttccacagccgagaaactcggtcaaactatccttggtaaatacgttgccgcatctatcgcaggtgtagctcctttacttatgggtatcggcccttgggctgctattccaaaggtattcgagaagaccgggatcaacaaagatgacgtagatatcttcgaaatcaatgaagcattcgcaagtcaatgcctttggtgcgcaaatgagttaggactcgaccagaagaagatcaatccaaagggtggtgcaattgcttttggacatcctctcggatgtaccggagctagacaggttagcacattattgtatgagctgagaaggacaaatcagaaagttggcgtaactagtatgtgtgtgggtactggtatgggtatggctgctgtttgggttgccgagtaa

SEQ ID NO: 2648 - protein, 427 aa, Botryotinia fuckeliana B05.10
MSAAQKRLGQVSGHLAGSQSTIAPTEGDSGRAKLLEKHPDDIVVTACLRTAFTKGGKGGFKDTAAADLLVGAFKSLIERSKIDPGLVEDIVVGSVLPPGGGATEFRAAALAAGFPVSAAVKSLNRQCSSGLQACVDIANAIKSGMIDVGVGAGVESMSLQYGPGAVTEFSELLESHPESANCKVPMGVLSENMAKDKGIPRSLQDSFAASSYQKALKAQEEGLFDEEIAPLTVKWEDPKTGEIKDITVAKDDGVRPGITAESLGKIKPAFAKDGSIHAGNASQISDGAAAVLLMKRSTAEKLGQTILGKYVAASIAGVAPLLMGIGPWAAIPKVFEKTGINKDDVDIFEINEAFASQCLWCANELGLDQKKINPKGGAIAFGHPLGCTGARQVSTLLYELRRTNQKVGVTSMCVGTGMGMAAVWVAE

SEQ ID NO: 2649 - DNA, 1254 bp, Sclerotinia sclerotiorum 1980
  CDS (1)..(1254)
atggccgtcgaaagaatcagctcaattgttaagcatttgtctcctggtgcatcaggattgtctgcaattacctctaaaaatgccgatgatattgttatcacacttgcagttcgcacaccattagcaaaggcttacaagggaggatttaaggacacacagctcgattaccttgtgtactctcttctccagaaagtccgggagaagtccaacctcgacccagctctcgtggaagatgtctgctgtggaaatgtaagcgatggccatgctgcctacaaagtccgcgccgctgtcttagcagcaggattcccaaacaccaccgccgcctccattgtaaaccgattctgctcctccggtctcaaagctacccaagatatcgccaatcaaattgccgagggctccattgacattggtattgctatgggtgcagaaatgatgtccgttggaggggataaactcgaaggttctttccaccctgaggttcttaagtgccaagaagctgcagattgtatgcaacccatgggacaaacatcagagaatgtaggaaaggacttcaatatttctcgtgaacaacaagatagatatgcggcggaaagtttcaaccgtgctgagcttgctcagaaagccggatggttcgatgatgagattgtgccaattgttacagaagttaaggatccaaagactggagaagtcaagaaggttactttgactagagatgaaggtccaagatatggaactactttcgaaagtttgaacaagatcagaccagctttcccgcagtttggtgataaatcaactggtggaaattctagccaggtcaccgatggtgccgctgccgttctcctcatgaagcgttcccgcgccattgaacttggtcagccaatcctcgccaagttcgttggagccaccgtagcaggtctcgctccaagaatcatgggtgttggcccaactatcgccatcccaaagctcctcagcaaatataacatcacaattgacgattgcgacatcatcgaagtcaacgaagcatttgcttctatggctgtatactgcaaagatgccctcaagattcctcatgagaaaatgaacgttagaggtggtgctatcgcacttggtcatccattaggtgcaactggtgctagacagattgtcactggattgagtgagtgtaggagacagaagaagaagattttgttgactagtatgtgtattggtactggacagggaatggcaggtttgttcgttaatgaacaattgtaa

SEQ ID NO: 2650 - protein, 417 aa, Sclerotinia sclerotiorum 1980
MAVERISSIVKHLSPGASGLSAITSKNADDIVITLAVRTPLAKAYKGGFKDTQLDYLVYSLLQKVREKSNLDPALVEDVCCGNVSDGHAAYKVRAAVLAAGFPNTTAASIVNRFCSSGLKATQDIANQIAEGSIDIGIAMGAEMMSVGGDKLEGSFHPEVLKCQEAADCMQPMGQTSENVGKDFNISREQQDRYAAESFNRAELAQKAGWFDDEIVPIVTEVKDPKTGEVKKVTLTRDEGPRYGTTFESLNKIRPAFPQFGDKSTGGNSSQVTDGAAAVLLMKRSRAIELGQPILAKFVGATVAGLAPRIMGVGPTIAIPKLLSKYNITIDDCDIIEVNEAFASMAVYCKDALKIPHEKMNVRGGAIALGHPLGATGARQIVTGLSECRRQKKKILLTSMCIGTGQGMAGLFVNEQL

SEQ ID NO: 2651 - DNA, 1302 bp, Sclerotinia sclerotiorum 1980
  CDS (1)..(1302)
atgtcagctgcacaaaaccgacttggacaagtttctagccatttggctggctcgcggagctctatcgcaccccaggcctctattacaccaatagtaggtgatggcggccgcgcaaagcttttagaaaagcatccggatgatgtcgtcgtaacagcttgtctccgtaccgcatttacaaagggtggcaaaggaggattcaaagatacagcagcagcagatttactagttggcgctttcaaatctctcattgaacgatcgaaaattgaccctgggctggttgaagacatagctgttggttctgtacttcctcccggaggtggcgctacggagttccgtgctgcagctttggctgcaggatttcctgtatctgcggcggtcaagagcttgaatagacaatgttcatctggtttacaagcatgcgtagatatcgcgaatgccatcaagagtggaatgattgatgttggtgttggtgcaggtgtcgaaagcatgagtttacaatacggacctagcgccgtaacagaattttcggaacttctcgaatctcacccagagtccgcaaactgcaaagtgcctatgggcgttctttccgagacgatggctaaaaacaagggtgtttctcgcgctgtacaggacgcgttcgcagcttcatcataccaaaaggcactcaaggcccaacaagatggtctttttgatgaggaaattgcccctttgactgttaaatgggaggaccctaaaactggcgaaacaaaggaaataactgttgccaaggatgatggtatccgaccaggtatcacagctgagagcttaggcaagattaagcctgctttcgcaaaggacggtagcatccatgctggaaatgcttctcaaatctcagatggagctgccgcagtccttttgatgaagcgttccacagcggagaaacttggccaaaccatccttggtaaatacgttgcggcatccattgcaggtgtacctcccctccttatgggtattggcccttgggctgctattcctaaggtctttgagaagaccggtatcaacaaggatgatgtagacatcttcgagatcaatgaagcatttgcaagtcaatgtgtttggtgcgcaaatgagttgggacttgatcaaaagaaaatcaatccaaagggtggtgccattgcttttggacatccccttggatgtaccggagcaagacaggtcagcacattattgtatgaattgagaaggacaaagcaaaaggttggtgtaactagtatgtgtgttggaactggcatgggtatggctgctgtttgggtagctgagtag

SEQ ID NO: 2652 - protein, 433 aa, Sclerotinia sclerotiorum 1980
MSAAQNRLGQVSSHLAGSRSSIAPQASITPIVGDGGRAKLLEKHPDDVVVTACLRTAFTKGGKGGFKDTAAADLLVGAFKSLIERSKIDPGLVEDIAVGSVLPPGGGATEFRAAALAAGFPVSAAVKSLNRQCSSGLQACVDIANAIKSGMIDVGVGAGVESMSLQYGPSAVTEFSELLESHPESANCKVPMGVLSETMAKNKGVSRAVQDAFAASSYQKALKAQQDGLFDEEIAPLTVKWEDPKTGETKEITVAKDDGIRPGITAESLGKIKPAFAKDGSIHAGNASQISDGAAAVLLMKRSTAEKLGQTILGKYVAASIAGVPPLLMGIGPWAAIPKVFEKTGINKDDVDIFEINEAFASQCVWCANELGLDQKKINPKGGAIAFGHPLGCTGARQVSTLLYELRRTKQKVGVTSMCVGTGMGMAAVWVAE

SEQ ID NO: 2653 - DNA, 1200 bp, Nasonia vitripennis
  CDS (1)..(1200)
atgactactatcactaaaggaattttcattgttgctgccaagcgcacaccctttggaaaaatgggtggagcttttactggtaaaagtataacagagttatcagtggttgcatctaacgcagccattcaagctgccaatctgaagcctgaacaaattgataacgtggtatttggaaatgttctgcctttgtcatcttctgatggtgcgttcatgcccagacacgtattattaaagtgtggaattcctcttgagaagccagctttaggtgtcaatcggctgtgtggttctggtttccaggcaatcgtcagtggtgctcaaagcattctgactggagaagcaaaggttgtgctaactggaggtgctgagaatatgagccagatgccatttgtggtacgcaatgttcgttttggaacagttttggggcaaaaacatgagtttgaagattccctctggctaggattacttgacacgcactgtggtatgcctatgggcatgacagctgaaaagcttggagctcaatttggagtcaccaggaaagaagttgatgagtttgctttaagaagccaacacacatggaaagctgccaacgatgcaggctatttcaaagctgaaatagcacctgtaactttgaaatcaaagaagggagaagtatctgtaaccgtggatgagcatccaagacctcaaacaaaaattgaagatctttcaaaacttccttcaatcttcaagaaagatggattagtcactgcaggaacagcatctggagtctgtgatggagctggagtagtcattcttgccagtgaagatgctgttaaagctaatggactcaagccaatagcacgtttggttggttacagtactgttggtgttgatccaactattatgggaattggaccgtctccagccattaaaaatttattgaaggctgctggaaaatcgttaaacgatatggaattggttgagattaatgaagcctttggagctcagacacttgcttgtgctaaagatctaaatcttgatatcaacaagcttaatgtaaatggtggtgctattgctgttggacatcctcttggagcttctggatctcgcattactggtcatttagttcatgaactgaggagaagaaacgctggcaagtttgctattgggtcagcttgcattggaggagggcaaggtattgctgttatggttgaagctctttaa

SEQ ID NO: 2654 - protein, 399 aa, Nasonia vitripennis
MTTITKGIFIVAAKRTPFGKMGGAFTGKSITELSVVASNAAIQAANLKPEQIDNVVFGNVLPLSSSDGAFMPRHVLLKCGIPLEKPALGVNRLCGSGFQAIVSGAQSILTGEAKVVLTGGAENMSQMPFVVRNVRFGTVLGQKHEFEDSLWLGLLDTHCGMPMGMTAEKLGAQFGVTRKEVDEFALRSQHTWKAANDAGYFKAEIAPVTLKSKKGEVSVTVDEHPRPQTKIEDLSKLPSIFKKDGLVTAGTASGVCDGAGVVILASEDAVKANGLKPIARLVGYSTVGVDPTIMGIGPSPAIKNLLKAAGKSLNDMELVEINEAFGAQTLACAKDLNLDINKLNVNGGAIAVGHPLGASGSRITGHLVHELRRRNAGKFAIGSACIGGGQGIAVMVEAL

SEQ ID NO: 2655 - DNA, 1185 bp, Nasonia vitripennis
  CDS (1)..(1185)
atgtgcgaccccaaggatgtcgttatcgtgtcagctgttcgcacccctataggttccttctgtggctcgctatcatcgctgaaggcatcggatcttggcagcattgtaatcaaggaaagcttggccagagccaatttgaagcctaccgatgtctccgaagtgataatgggacaaggactgacggcaggacaggggcagaatccagcgagacaggcttccatacaagctggtcttcctattactgtaccagcttatcttgtcagcatgttgtgtggatcaggcctcaagtctattatgaatggttaccaagcaatcaagagtggggagagcgaagtaattgtggctggtggacaagagagcatgagtaaagctcctcacgcaattcatcttagagatggagtaaaaatgggtgatgcaacaatggttgataccatgctggttgatggccttactgatgttttcaacaatattcacatgggtgttactgctgaaaatctggctaaaaaatatgctattagcagagaggagcaagatgaatttgctgcccgatctcaacataaagctgaaattgcgatgactaaagggtactttgacaaagaaatcattccagtgcctgtgacaattcgaagaaaaacgaccattgtatccaaggatgaattcccaaaaccaggtacaactgcaaaagatcttgcaggattgaaacctgtgtttgtcaaagatggaacagtaactcctggcaacgcgtcaggaataaacgatggagcggcagcggttgttctaatgtcaagcgagactgccactaaaaaaggactaaaaccaatggcccgcatagtcgcgatgaccgtggttggcctcgagcccgatatcatgggttacggacccgttcccgcagtcgaattactgctcaaaaaagcccaatggaagaaggaagaggtagacttatttgaattgaatgaagcctttgctgctcaatccattgcatgtgaacgcaatcttggagtagatcctgaaaaagttaatattagtggcggagctattgctcttggtcaccctattggtgcttcaggtgcaagaattgtcgtgaccttgctctacttgctggaaagaacaggaggaaagaaaggtgttgcatccctttgtataggtggaggtatgggtattgctattgctgttgagagactttaa

SEQ ID NO: 2656 - protein, 394 aa, Nasonia vitripennis
MCDPKDVVIVSAVRTPIGSFCGSLSSLKASDLGSIVIKESLARANLKPTDVSEVIMGQGLTAGQGQNPARQASIQAGLPITVPAYLVSMLCGSGLKSIMNGYQAIKSGESEVIVAGGQESMSKAPHAIHLRDGVKMGDATMVDTMLVDGLTDVFNNIHMGVTAENLAKKYAISREEQDEFAARSQHKAEIAMTKGYFDKEIIPVPVTIRRKTTIVSKDEFPKPGTTAKDLAGLKPVFVKDGTVTPGNASGINDGAAAVVLMSSETATKKGLKPMARIVAMTVVGLEPDIMGYGPVPAVELLLKKAQWKKEEVDLFELNEAFAAQSIACERNLGVDPEKVNISGGAIALGHPIGASGARIVVTLLYLLERTGGKKGVASLCIGGGMGIAIAVERL

SEQ ID NO: 2657 - DNA, 1194 bp, Nematostella vectensis
  CDS (1)..(1194)
atggccctttcaagacctgtgtacatcgtagcagccaagagaacggcgtttggagcattcggaggccgcttgaaggattttactgctactgttttgggcgagcacgcgtcagttgccgcgatggagtcgggtaaagtcgaccctgctaccgttgattcagtcatatttggcaatgttttacagtgtgcaaatgatgcagcttatgttgctcgtcatattgggatcaagtccaaagtccctgtgaccacgcccgccctcacagtcaacaggctatgtgggtcaggtttccaatctataatctctggagctcaggaaattattcttggtgaaagtgatatatgcttggttggtggcacagagaatatgagccaggccccttatgcagtgagaaatgccaggtttgggacaaaattaggtctagatttaaagatggaagacacgctatggcaagggctgacagatatgctgccaggtttgcctatgggaataacggcagagaaccttgcagagaagtacaacatcaccagggaggagtgtgaccagtttgctttactgtcacagcagcgctgggccgcagctcatgaaagtggagcattcactgcagagatagtccctgttcctgtcaaaggcaaaaaaggccctgagcagtttgctgtcgatgaacatcctagacccgaaacaactattgaacagcttgcaaagctaccagccgtgttcaagaagaatggcacagtttctgctggcaatgcctcgggtatctgcgatggagctgcagccctggttctcgccagtgagaaggcagtcaaagaccatggccttacaccactagcgcggctcgtgtcttactccattaatggtgttgatcccgccatcatgggtatcggcccagtgccgtccatcaagtgtgccctggagagggcaggaaaaaccctagatgatatggacattatagaggttaatgaggcatttgcaccccagttcttagctgtacaaaaggacctaggcttggacatgagcaagactaatgtaaatggcggcgccattgcactgggtcacccagttggcacatcaggagcacgactgacagttcacctcacccatgagatgatgcgcaaaggtctcaagtattccattggatctgcatgtattggtggtggacaaggtgtcgctcttgtccttgagaatgtggcttga

SEQ ID NO: 2658 - protein, 397 aa, Nematostella vectensis
MALSRPVYIVAAKRTAFGAFGGRLKDFTATVLGEHASVAAMESGKVDPATVDSVIFGNVLQCANDAAYVARHIGIKSKVPVTTPALTVNRLCGSGFQSIISGAQEIILGESDICLVGGTENMSQAPYAVRNARFGTKLGLDLKMEDTLWQGLTDMLPGLPMGITAENLAEKYNITREECDQFALLSQQRWAAAHESGAFTAEIVPVPVKGKKGPEQFAVDEHPRPETTIEQLAKLPAVFKKNGTVSAGNASGICDGAAALVLASEKAVKDHGLTPLARLVSYSINGVDPAIMGIGPVPSIKCALERAGKTLDDMDIIEVNEAFAPQFLAVQKDLGLDMSKTNVNGGAIALGHPVGTSGARLTVHLTHEMMRKGLKYSIGSACIGGGQGVALVLENVA

SEQ ID NO: 2659 - DNA, 1200 bp, Nematostella vectensis
  CDS (1)..(1200)
atgagcaattcttaccaagagcgagatgtaattatcgcttgtgcagtgcgaactcccgtgggttcacacaacggagacctcagttcgctaaaagctcatgaactcggttcgattgttgtgaaagaggcgctttgccgggcctctatctctccttgtgacgtgtcagaggttattctcggccaagttttgacggccggacaaggtcaaggtcctgctcgccaggctgcaatacatgctggtataccagcctgtgttcctgcatatggagttaacatgctgtgtggatcaggccttaaggctgttgcccttggttaccaagctgttgccatgggagactctaatattgttgtagcaggtggacaggagagcatgagtcaggctccccattgttgtcacatgcgacctgctctgaagtttggtgacatgacgctgatagacacaatgcttaaggatggattaatggactcgttcaataactatcatatgggaattacagctgaaaatgtggcgaaacagtgggaagtctcacgggaggaacaagataactttgctctgacgtcacagcaacgcactgagactgcgcagaaagctggatacttcagtgacgagattgttacggtttctatcaagacgagggctggtcttactgaggtcaactcagatcagttcccacgccatggctgtacaatcgaaggtctaaggaaacttaaaccttgctttctgtttgatggaaagggcactgtttccgcgggcaacacttccgggctcaacgacggagcagctgtagtagtactaatgccatacgcagaagcaaatgtcagaaacgtcagtccgcttgctagagtagtatcatgggctcaagctggcgtagacccctcggttatggggactgggccaattcctgccactagaaaagctttgtctaaagctggatggaaagttgaagacgtggaccttttcgagctgaatgaggcttttgcagcacagtcatgcgcagtcatcagagaactgggactagacccttctaaggtgaacatcaacggcggcgccattgctcttggtcatccaataggggcatctggttgccgtatactcgtcactttgcttcataacctcagacgcaccggcaagcgaagaggcgtggctgcactctgcgtaggcggtggaatgggcgtggcagtgtgcgtggaaagattatag

SEQ ID NO: 2660 - protein, 399 aa, Nematostella vectensis
MSNSYQERDVIIACAVRTPVGSHNGDLSSLKAHELGSIVVKEALCRASISPCDVSEVILGQVLTAGQGQGPARQAAIHAGIPACVPAYGVNMLCGSGLKAVALGYQAVAMGDSNIVVAGGQESMSQAPHCCHMRPALKFGDMTLIDTMLKDGLMDSFNNYHMGITAENVAKQWEVSREEQDNFALTSQQRTETAQKAGYFSDEIVTVSIKTRAGLTEVNSDQFPRHGCTIEGLRKLKPCFLFDGKGTVSAGNTSGLNDGAAVVVLMPYAEANVRNVSPLARVVSWAQAGVDPSVMGTGPIPATRKALSKAGWKVEDVDLFELNEAFAAQSCAVIRELGLDPSKVNINGGAIALGHPIGASGCRILVTLLHNLRRTGKRRGVAALCVGGGMGVAVCVERL

SEQ ID NO: 2661 - DNA, 1176 bp, Nematostella vectensis
  CDS (1)..(1176)
atgtcagaggaggttgtcatagtgagtgcagcccgtacagccatcggatcgtttagaagtgctctctgtagtgttcctgcccctaagcttggtgctgtcgcaataaagcatgctgtggaaagagcgggtatttcccctgagcaggttcaggaggtctacatgggcaatgtatgtgcagcagggatgggccaggcaccggccaggcaggcggcactaggagcagcccttcctatctcaacaccctgtacaactattaacaaggtgtgcgcatctggaatgaagtcaatcatggcggcagcacaaagtctgatgtgtggtagccaggaaataatggtcgctggtggaatggaaagcatgtctaatgtgcctttttatgtctcaagagaggctcccacatatggaggccacaaaatggaggatggaattatcaaagatggcttgtgggatgtgtacaaccagtttcacatgggagtttgtgcagagaacgctgcctcaaagtacaacatcactagagaagaacaagacgattatgccatccattcctacagacgcacagctgctgcttgggatgcagggaaattcaagcaagaggttgtaccagttaatattcctcaaaagaaaggcaaaccagatattgttttcgaggaggacgaagagtacaaaaaggtcagctttgagaagtttccttcactgaagactgtgtttaagaaagaaaatggcactgtcacagcagccaatgccagcactctgaacgacggtgctgcggcagtggttttgatgacaagagaagcagctgagaagaatggtgtaacaccgctagcaagcatcgtagcgttcgctgatgcagctgtcgcccctatcgacttccctatcgcgccagcggccgccatcccaaaggttttacgactggctcacttgcgaaaagacgatatcgacatgtgggaaattaacgaggctttcagtgccgtggctctagccaatataaagattctagacctcgaccccagcaaagtcaacatccatggaggtgccgtctctatcggccatccagtcgggatgtcgggcgctcgtctcatcagtcacatgacgtacaatctcgccccgggagcgctcggacttgctgccatctgtaacggtggcggaggagcttcggcaatgattctccgaaaactttga

SEQ ID NO: 2662 - protein, 391 aa, Nematostella vectensis
MSEEVVIVSAARTAIGSFRSALCSVPAPKLGAVAIKHAVERAGISPEQVQEVYMGNVCAAGMGQAPARQAALGAALPISTPCTTINKVCASGMKSIMAAAQSLMCGSQEIMVAGGMESMSNVPFYVSREAPTYGGHKMEDGIIKDGLWDVYNQFHMGVCAENAASKYNITREEQDDYAIHSYRRTAAAWDAGKFKQEVVPVNIPQKKGKPDIVFEEDEEYKKVSFEKFPSLKTVFKKENGTVTAANASTLNDGAAAVVLMTREAAEKNGVTPLASIVAFADAAVAPIDFPIAPAAAIPKVLRLAHLRKDDIDMWEINEAFSAVALANIKILDLDPSKVNIHGGAVSIGHPVGMSGARLISHMTYNLAPGALGLAAICNGGGGASAMILRKL

SEQ ID NO: 2663 - DNA, 1233 bp, Vanderwaltozyma polyspora DSM 70294
  CDS (1)..(1233)
atgtctcaaagattacaaaatattggtaatcatttatcaggttctaatggtcaatcatgtccaattacttcaaaaagaccagatgatattgtaattgtctcggctaaaagatctgctattgcaagaggttttaagggttcttttaaagatgtcaactctgattatttattaacccaattcttaatccaattttttaatgatttacctccagaaattagagaacatcaagatttaatccaagaagttacttgtggtaatgtcttaaatccaggtgctggtgcaactgaacataggggttcttgtttagctgcaggtatcccttattctgtcccattcatggctttaaatagacagtgttcttctggtctaactgctgttaatgatatcgcaaataaaatcaaaaccggtcaaatcgatataggtttagctttaggtgtagagtcaatgactaaaaattatgcagctgttaatccattgggtagaatctctgatgagttgaaggcaaacaaagaagcaagaaaatgtttaataccaatgggtataacaaatgaaaatgttgcatccaattttagtatcacaagacaagatcaagataagtttgctgccaactcctataacaaagctgagaaggccgttaagactggtttattcaaagatgaaatattaccaattcaattaccagatggaagaattgtagacaccgatgaaggtccacgtccaaatgtcactccagaaagtctatcaaagattaaacctgcattcatcaaagataaaggtactaccactgctggtaacgcttcccaagtttcagatggtgttgctggtgtcttgttggctcgtagatcagttgcagaaaaattgaatctaccaattgtaggtcgttatttagctttccaagctgttggtgttccacccgaaatcatgggtgtcggtccagcttatgctatcccaagagtgttgcaagatgtcggcttacaagtaaaagatatcgatatttttgaaatcaatgaagcatttgctgctcaagctctttattgtatccataagctaggcatagatataaataaagttaatcctcgtggtggtgctattgctctaggtcatccattaggttgtactggtgctcgtcaaattgccactattatgcgcgaattacaaccaggtcaaatcggtgtcactagtatgtgtattggtactggtatgggtgcagcagcagtatttgtcaaagagtga

SEQ ID NO: 2664 - protein, 410 aa, Vanderwaltozyma polyspora DSM 70294
MSQRLQNIGNHLSGSNGQSCPITSKRPDDIVIVSAKRSAIARGFKGSFKDVNSDYLLTQFLIQFFNDLPPEIREHQDLIQEVTCGNVLNPGAGATEHRGSCLAAGIPYSVPFMALNRQCSSGLTAVNDIANKIKTGQIDIGLALGVESMTKNYAAVNPLGRISDELKANKEARKCLIPMGITNENVASNFSITRQDQDKFAANSYNKAEKAVKTGLFKDEILPIQLPDGRIVDTDEGPRPNVTPESLSKIKPAFIKDKGTTTAGNASQVSDGVAGVLLARRSVAEKLNLPIVGRYLAFQAVGVPPEIMGVGPAYAIPRVLQDVGLQVKDIDIFEINEAFAAQALYCIHKLGIDINKVNPRGGAIALGHPLGCTGARQIATIMRELQPGQIGVTSMCIGTGMGAAAVFVKE

SEQ ID NO: 2665 - DNA, 1185 bp, Aedes aegypti
  CDS (1)..(1185)
atgacgtcaccaggagaggtttacatcgtttcggccgccaggactccgatcggcaatttcctgggcaccctatcgagcctctccgctgccgagctgggcgccgtagccgtcaaagaggttctcaaccgtgccaacgttccagcagccgatgtggacgaagtcatcctcggacagtccctcgctgccggtcagggtcaaaatcccgcccggcaggcctcgatgaaggccggtatcccgaaggaagtgcccgcctttctgatcaacatgctgtgcggttcggggctaaaaaccgtagctctgggctatcaagcgatccgttccggtgatgccaaagtggtcgtggccggtggccaggagtgcatgtccaaggcgccgcacgtccttcacttgcgcagcggtaccaaaatgggcgaggccaagatggtggacaccatgctgagcgacgggctaaccgatgccttctacgacctgcacatgggagtgactgcggagaacctggccaaggagtttgaaatcacccgcgaacagcaggatgccttcgcggccaagagtcaacagctggcagaggaatcgcagaacaagggttacttcaaggacgaaatcgtggccgttccggttccgagccgcaaggagaccatcaatttcgacaaggatgaattcccgaagcacggaacaacggtggaaggactggctaagctgagggcctgcttcatcaaggacgggacggtaacgcctggaaatgcttccggaatcaacgattcggcggcggcagttctgctgatgtccgacgaagaggtccagaagcgagatgcaaaacccctggcaaggattgtcgccttcagccagacgggaatttgtccgaaaaccatgggcgccgggccgatcagtgccgtgcagaaagttttggacaaagccggatggaagctggaggaggtcgatctgttcgaactgaacgaagcattcgccgcccaagcgctggccgtcaacaaaggtctcggtgtcaatccggacaaggtgaacgtcggtggcggagcaatcgcccttggacatccgattggagcttctggttgccgcgtgctggtcaccctgctgtacgccttgaagagaaccggcggcaaaaagggcgtggcgtctctctgcgttggtggcggaatgggagtggcaatggccgttgaaatggtttag

SEQ ID NO: 2666 - protein, 394 aa, Aedes aegypti
MTSPGEVYIVSAARTPIGNFLGTLSSLSAAELGAVAVKEVLNRANVPAADVDEVILGQSLAAGQGQNPARQASMKAGIPKEVPAFLINMLCGSGLKTVALGYQAIRSGDAKVVVAGGQECMSKAPHVLHLRSGTKMGEAKMVDTMLSDGLTDAFYDLHMGVTAENLAKEFEITREQQDAFAAKSQQLAEESQNKGYFKDEIVAVPVPSRKETINFDKDEFPKHGTTVEGLAKLRACFIKDGTVTPGNASGINDSAAAVLLMSDEEVQKRDAKPLARIVAFSQTGICPKTMGAGPISAVQKVLDKAGWKLEEVDLFELNEAFAAQALAVNKGLGVNPDKVNVGGGAIALGHPIGASGCRVLVTLLYALKRTGGKKGVASLCVGGGMGVAMAVEMV

SEQ ID NO: 2667 - DNA, 1230 bp, Aedes aegypti
  CDS (1)..(1230)
atgttcttgaaagtaaatcaggctatcgcccaaggagttcgccggtattcgacgaaaagacacgatgtggtcattgtggcagcaacacgaactcccattggaagtttccagagctccctatcgtctcttacggctacccagctgggagctgttgccgtgcaagctgttgtgaagcaggcaggcattgctggtagtgatgttcaagaggtgtacatcggtaatgtgaacgctgctggtttgggccaggccccagcaagacaggcggtcatttttgccggacttccgaagagcactatctgtactactgtgaacaaggtgtgttcttctggaatgaagagcgttatgcttggtgcccagaccttgatgctaggacaccaggaagttgtgctcgccggaggaatggaatcaatgtcaaatgtgccttattacctgaagcgcggtgccacgccatacggcggtgtacagcttcaggatggtattgtcttcgatggcctgaccgatgtgtacaacaagtttcacatgggaaactgtgctgagaatacggccaagaaaatgggtatcactcgtcaggatcaagatgaattcgctgttaatagctacaaacgcagcgctgcagcttgggctgataaggcttttgacgctgagattactccagtgactatccctggaaagcgtggtaagccggatattgtcgtaaaggaagacgaagaatataagcgagttaacttcgataaattcggccagcttgcgaccgtgtttcagcgagaaaatggtaccgtaaccgcgggaaatgcttcaacccttaatgatggtgcatcggctttgattttgatgaccgcagaagccgctgaaaagtttaagtgcaaacctcttgcacgcgtggttggattcgccgatgcagagactgacccaattgatttcccgattgctccagctcttgccatacctaaactacttgagcagactggagttcgtaaggaagatgtgtccatgtgggaaatcaacgaggccttttcggtggtcgttgttgccaatcagcgaaaattggatatcgatccggcaaagatcaacgtacatggaggtgccgtttccctcggtcatccaattggaatgtctggtgctcgcttggtgacccacttgactcattcattgaaggctggtcaatacggatgcgcttccatttgcaacggcggaggtggcgcctcttctatcctgatcgaaaaactgtaa

SEQ ID NO: 2668 - protein, 409 aa, Aedes aegypti
MFLKVNQAIAQGVRRYSTKRHDVVIVAATRTPIGSFQSSLSSLTATQLGAVAVQAVVKQAGIAGSDVQEVYIGNVNAAGLGQAPARQAVIFAGLPKSTICTTVNKVCSSGMKSVMLGAQTLMLGHQEVVLAGGMESMSNVPYYLKRGATPYGGVQLQDGIVFDGLTDVYNKFHMGNCAENTAKKMGITRQDQDEFAVNSYKRSAAAWADKAFDAEITPVTIPGKRGKPDIVVKEDEEYKRVNFDKFGQLATVFQRENGTVTAGNASTLNDGASALILMTAEAAEKFKCKPLARVVGFADAETDPIDFPIAPALAIPKLLEQTGVRKEDVSMWEINEAFSVVVVANQRKLDIDPAKINVHGGAVSLGHPIGMSGARLVTHLTHSLKAGQYGCASICNGGGGASSILIEKL

SEQ ID NO: 2669 - DNA, 1185 bp, Caenorhabditis briggsae AF16
  CDS (1)..(1185)
atggcaggaaaaggtgtattcatcgtcggagcgaaacgtaccgccttcggaacgtttggcggaaaactcaaggggctgagtgcgacggatttgggagtggtcgcctcgcaaggagcactgaagcacgctaatgttggtgccgacgcggtggatcatgtcatttttggaaacgtcgtagcgagctctcgtgatggcatctacctgacccgtcacattggtctcaaggcaggcgtcccacaaaacgtcggagccctcaccgtcaaccgtctctgtggatccggcttccaagcggtcgtcaacgcggcccaatccattaaactcggcgaagcgaacattgtcttggcgggaggaaccgagaatatgtcgatggttccattcgcagtgagggatattcgttttggaaccgctcttggaaagaaatacgaattcgaagatatgctttgggattcgctgagcgatccgtacgccaagctagctatgggacagactgcggagaaattgggtgctcagtacaaggtgacacgtgccgaggcggatgaattcgcgttgagatcgcagacactgtggaagaaggcccaggacgccgggatttataaaaatgagattgttggaattacggtgaaagggagaaagggagaagagaacttcgatgtggacgaacatccaaggccaacgacagcggagtcactggccaaactgaagccagtattccagaaggatggattggttaacgctggaaacgcatctggaatctcggacggtgccgccgcgctggttgtcgctggagaggactcggtgaaggcaaagaatctgaagccgttggctcgtgttgtggcatactcggctgtcggatgtgatccgacgatcatgggaatcggaccagcgccagcgattcgcgaggtgttgaagcagagtggattgaagattggagatattgatatctttgaggtcaacgaggcgttcgccccacaagcgctcgccgtccagcgtgagctcggaatcccaatggagaaattgaatgtcaatggaggagccatcgctctcggccaccctctggccgcgtctggagccagaatctccacccacattgtccatgaacttcaacgccgcaatgtcaagtacggaatcggatccgcctgcatcggaggaggacaaggaatcgcgattcttttcgagaaaatctaa

SEQ ID NO: 2670 - protein, 394 aa, Caenorhabditis briggsae AF16
MAGKGVFIVGAKRTAFGTFGGKLKGLSATDLGVVASQGALKHANVGADAVDHVIFGNVVASSRDGIYLTRHIGLKAGVPQNVGALTVNRLCGSGFQAVVNAAQSIKLGEANIVLAGGTENMSMVPFAVRDIRFGTALGKKYEFEDMLWDSLSDPYAKLAMGQTAEKLGAQYKVTRAEADEFALRSQTLWKKAQDAGIYKNEIVGITVKGRKGEENFDVDEHPRPTTAESLAKLKPVFQKDGLVNAGNASGISDGAAALVVAGEDSVKAKNLKPLARVVAYSAVGCDPTIMGIGPAPAIREVLKQSGLKIGDIDIFEVNEAFAPQALAVQRELGIPMEKLNVNGGAIALGHPLAASGARISTHIVHELQRRNVKYGIGSACIGGGQGIAILFEKI

SEQ ID NO: 2671 - DNA, 1386 bp, Chlamydomonas reinhardtii
  CDS (1)..(1386)
atggagagctcagcgcaggcgcgcctggcggtcctgtctcgccagttcgcacccgtagcggagggcatgcagtcactctcgctgcagacctgctccgctggtgactctgccgcctacgagcgtcgcaacaccgccgatgacgacgtcgtcattgtggcctctctgcgcacgccgctgaccaaggccaagcgcggcggtctgcgggacacggacgcggctgacctgctgtccactctgttcaaggcggtgctggagcgcaccggtgtggagccgcaggcgattggcgacattgtgattggctcggtgctgggcccctcgtcccagcgcgccaacgagtgccgcatcgcctcgttctttgccggcatcccggatgtggtgcccgtgcgcaccgtcaacaggcagtgctcgtcaggcctgcaggccatcgctgacgtggccgccgccatcaaggctggcttctacaccgtcggcctggcgggcggtgtggagaccatgtcttccaaccccatggcctgggagggcggcatcaacccgcgcgtgggcgacttccccggcgccgccagctgcatgctgcccatgggcgtcaccagcgagaacgtggcggccaagtacggcgtggaccgcaagacgcaggacgagttcgccgtgcgctcgcacaagaaggccgccgccgcgcgcgccgctggcaagttcaaggacgagattgtgccggtggccaccaagctggtggaccccaagacaggcgccgagaccaagatcaccatcagcgaggacgatggcatccgcggcagcaccaccatggagacgctgggcgcgctcaaggctgtgttcaagaagaacggcaccaccaccgccggcaactcgtcccaggttacggacggcgcagcggtggcgctgatgatgactcgcgcggaggcgacccgccgcggcctgcccattctgggcgtgttccgcgcctttgcggcggttggcgtggaccccgccatcatgggcgtggggccggccgtggccatcccggccgccgtggcgcgcgccggcctgtcgctggacgacattgacgtgttcgagatcaacgaggccttcgcgtcgcaggccttctactcgatcaccaagctaggcctggatgaggccaaggtgaaccccaacggcggtgccattgcgcttggccaccccctgggcgccacgggcgcgcgctgcaccgccacgctgctgcacgagatgcgccgtcgcggccgcgccgcgcgcttcggcgtcgtgtcgatgtgcattggcagcggcatgggcgcggcggcggtgttcgaggcgggcggcgagacggacgcgctggccacggcgcgcgccgtggcgggcccgcagcagctgctgagcaaggacgcggtcgtgtaa

SEQ ID NO: 2672 - protein, 461 aa, Chlamydomonas reinhardtii
MESSAQARLAVLSRQFAPVAEGMQSLSLQTCSAGDSAAYERRNTADDDVVIVASLRTPLTKAKRGGLRDTDAADLLSTLFKAVLERTGVEPQAIGDIVIGSVLGPSSQRANECRIASFFAGIPDVVPVRTVNRQCSSGLQAIADVAAAIKAGFYTVGLAGGVETMSSNPMAWEGGINPRVGDFPGAASCMLPMGVTSENVAAKYGVDRKTQDEFAVRSHKKAAAARAAGKFKDEIVPVATKLVDPKTGAETKITISEDDGIRGSTTMETLGALKAVFKKNGTTTAGNSSQVTDGAAVALMMTRAEATRRGLPILGVFRAFAAVGVDPAIMGVGPAVAIPAAVARAGLSLDDIDVFEINEAFASQAFYSITKLGLDEAKVNPNGGAIALGHPLGATGARCTATLLHEMRRRGRAARFGVVSMCIGSGMGAAAVFEAGGETDALATARAVAGPQQLLSKDAVV

SEQ ID NO: 2673 - DNA, 1251 bp, Aspergillus oryzae RIB40
  CDS (1)..(1251)
atggccacagatcgtttgaactctattctcagccacctcaagggaggaaacactggccttgccgccatcacccagaagaacccagacgatgtagtcattacgctcgctctgcgtactcctctggccaaggccgttaagggtggattcaaggacacacagttggattacatcgtatactccttgttgaaggaggttatcgacaagtctaagattgaccctgctttggtcgaggatgtctgcttgggtaatgtcaacgacggcaaggccccctatctcctccgtgccgcctcccttgcggccggcatccccaacacatccggcgcatcgtccgtcaaccgattctgttcctccggtctcaaggctgttcaggacatcgccaaccagattacattgggtcagatcgatgtcggtatcgcccttggtgctgagttgatgtcggccggcggtgatgcagtccaacctttcagcgaggaagtcctgaagaaccaggagtctgccgactgcctgcagcccatgggtcagacatccgagaacgtcggctcggacttcaacatcagccgtgaggttcaggacaagtatgccgccgagtcgtaccgccgcgctgaggaggcccagaaggctgggtggttcgatgatgagatcgtccccatcaccaccaaggtgaaggaccccaagaccggcgaggtcaagcaggttactttgaccaaggatgaaggtatccgttatggaacgacggccgagtctctcggcaagatccgaccggctttccccaagttcggtaaccggagcactggtggcaactccagccaggtgactgacggcgctgccgctgtcctcctcatgcgtcgctctagggctatcgaacttaaccagcctatcctggctaagttctgtggtgccaccgttgctggcgttccccctcgcatcatgggtatcggccctaccgctgccatccccaagctcctctccaagttcaacttgaacaaggatgacatcgatatctacgagatcaacgaggccttcgcttccatggccgtctactgtttgcagaaccttggcttggaccatgccaaggtcaacccccgcggcggtgccattgcactcggccatcccttgggcgccacgggtgctcgccagatctgcacaattctgagcgaggcaagacggacgaagaagaaggtgctggtcacgagtatgtgcattggtaccggacagggcatggcgggattgttcgtcaacgaacaggtgtaa

SEQ ID NO: 2674 - protein, 416 aa, Aspergillus oryzae RIB40
MATDRLNSILSHLKGGNTGLAAITQKNPDDVVITLALRTPLAKAVKGGFKDTQLDYIVYSLLKEVIDKSKIDPALVEDVCLGNVNDGKAPYLLRAASLAAGIPNTSGASSVNRFCSSGLKAVQDIANQITLGQIDVGIALGAELMSAGGDAVQPFSEEVLKNQESADCLQPMGQTSENVGSDFNISREVQDKYAAESYRRAEEAQKAGWFDDEIVPITTKVKDPKTGEVKQVTLTKDEGIRYGTTAESLGKIRPAFPKFGNRSTGGNSSQVTDGAAAVLLMRRSRAIELNQPILAKFCGATVAGVPPRIMGIGPTAAIPKLLSKFNLNKDDIDIYEINEAFASMAVYCLQNLGLDHAKVNPRGGAIALGHPLGATGARQICTILSEARRTKKKVLVTSMCIGTGQGMAGLFVNEQV

SEQ ID NO: 2675 - DNA, 1209 bp, Malassezia globosa CBS 7966
  CDS (1)..(1209)
atgagctttgccaagtacactggaaagacgcagattctcgagaagcacgacgatgacgtggtcatctgtggcgcgtaccgatcacccgtcacgcgtgctcgcaagggtggccttgcccagtgcacaccagaagaatgccttggtgtggtgttcaagggcctgattgctaagacgggcgtcgacccgaaggtcattgaagacgtttcggttggaaacgtgcttccacccggtggtggtgccacgggagctcgtcaggctgcactctgggccggtatccccaatacagccgccgtcaacacagtgaaccgccaatgttcatctggtctcgcctctgtaacgcagattacaaatgaaatcattacgggtcagatcgacgtggggattggtgccggtgtggagtcgatgactttgaactatggcgctggtgtcatgcctgtgaagatgtctgacgaggttatgagcaacgaggaagcagccgattgcatgatgccgatgggtattacatcggagaacgtcgccaaaaaatacaatgtgactcgtgaaaagcaagatgcctttgcagccgagtcgtataagcgtgcccacgaggccaaggcggctggcaagttcaaggatgaaatcatcccgatcaaatatgttgatgacgacggcaacgagcgcgttgtcagtgaagatgacggtattcgccctggcgtatcgaaggagtcgctttcgaagctcaagccagccttcgctaaggatggctgcacgcacgctggcaatgcctcgcaggtcagcgatggtgctgctgctgtgctgcttgctcgccgcagtgtcgctcagaagctcggtctgcctgtggttgccaagttcgccggcgccgtcgttgtgggcgtgccgccgaacattatgggcgttggacctgcattcgcgatccccaagctactcgaaaaggctcaaatctccaaggacgatatcgacatatacgagattaacgaggctttcgcgtcgcaggctcttttctctgttgagcatgttggcttgcctctttcaaaggtgaaccctgtgggtggtgccatcgccatgggacatccactcggtgctactggttcccgtcagattgcgacagctctaagtgaggcgaaacgcactggtgctaagctgatcgtcacctcgatgtgcattggaaccggtatgggtatggcctctttgattgtaagcgagcagtaa

SEQ ID NO: 2676 - protein, 402 aa, Malassezia globosa CBS 7966
MSFAKYTGKTQILEKHDDDVVICGAYRSPVTRARKGGLAQCTPEECLGVVFKGLIAKTGVDPKVIEDVSVGNVLPPGGGATGARQAALWAGIPNTAAVNTVNRQCSSGLASVTQITNEIITGQIDVGIGAGVESMTLNYGAGVMPVKMSDEVMSNEEAADCMMPMGITSENVAKKYNVTREKQDAFAAESYKRAHEAKAAGKFKDEIIPIKYVDDDGNERVVSEDDGIRPGVSKESLSKLKPAFAKDGCTHAGNASQVSDGAAAVLLARRSVAQKLGLPVVAKFAGAVVVGVPPNIMGVGPAFAIPKLLEKAQISKDDIDIYEINEAFASQALFSVEHVGLPLSKVNPVGGAIAMGHPLGATGSRQIATALSEAKRTGAKLIVTSMCIGTGMGMASLIVSEQ

SEQ ID NO: 2677 - DNA, 1368 bp, Physcomitrella patens subsp. patens
  CDS (1)..(1368)
atggagaagtccacgatgcgccagcaggtgttgcttgaccacttgaagcccgagactgggcgaagggcgtcgtcgatctgctccgccaacgacagtgcaccttacgcacgtaccaccgacttcctagacgatgtcgttattgtggctgcgtatcgcacggcgatttgcagggcgaagaggggaggattcaaggatacttatcccgatgacctgttggcgccagtccttagagctgtcgttgagaagacaggcgtcagtcctgccgagatcggtgacattgtgataggcagtgtcctcgcacctggtgctcagcgtgctaatgagtgccgtatggctgcgtttttcgctggattcccagaaactgtgcccgttagaactgtgaacaggcaatgctcatctggactgcaagctgttgcggatgtagcggcagctattaaagcaggtttctatgatattggtattggaggtggattggagtcgatgactgttaatcccatggcttgggaaggctccgttaatccaagggtggaggctgatcaaagagctcaagattgtctactacccatgggtatcacttccgagaacgtcgcagagcgctatggagttggtcgcagacagcaagatgaagcagcagtcaaatcgcatgcgaaggcagcagctgccagagcctctggcaggttcaaggatgagattattcctgtgcagaccaagattgtaaatcctaaaactggagatgagaagaaggtagtcatctcagaggatgacggtattcgacctgggacatccctcgctgatttgtcaaagttgaagacagtttttaagaagtctggcacgactactgcaggaaattcttcgcaagtgagtgatggagcagctgctgtgctgctcatgaaacgcaggactgctttggagaagaatttgcctgttctaggtgtcttcaggagcttcgctgctgtaggtgtggacccatctgttatgggtatcggtcctgctgttgccattcccgctgctgttaaggcagctggcctagagctcagcgacatcgacctttttgaaatcaacgaggcatttgcatcacagttcacatactgtgctcaagagctgggactagatgaagagaaggtgaatgtgaatggaggtgctatggctcttggtcatcctcttggtgccacaggtgcacgatgcacggcaactctcttgcacgagatgaagaaacgtggcaaggattgtcgattcggtatcgtgtcgatgtgtattggatctggtatgggagctgctgcagtgtttgagcagggaggtgccatagatccgctcagcaatgcgcgggctgttggtcaaaacaacttgctctcaagagatgcaaagtag

SEQ ID NO: 2678 - protein, 455 aa, Physcomitrella patens subsp. patens
MEKSTMRQQVLLDHLKPETGRRASSICSANDSAPYARTTDFLDDVVIVAAYRTAICRAKRGGFKDTYPDDLLAPVLRAVVEKTGVSPAEIGDIVIGSVLAPGAQRANECRMAAFFAGFPETVPVRTVNRQCSSGLQAVADVAAAIKAGFYDIGIGGGLESMTVNPMAWEGSVNPRVEADQRAQDCLLPMGITSENVAERYGVGRRQQDEAAVKSHAKAAAARASGRFKDEIIPVQTKIVNPKTGDEKKVVISEDDGIRPGTSLADLSKLKTVFKKSGTTTAGNSSQVSDGAAAVLLMKRRTALEKNLPVLGVFRSFAAVGVDPSVMGIGPAVAIPAAVKAAGLELSDIDLFEINEAFASQFTYCAQELGLDEEKVNVNGGAMALGHPLGATGARCTATLLHEMKKRGKDCRFGIVSMCIGSGMGAAAVFEQGGAIDPLSNARAVGQNNLLSRDAK

SEQ ID NO: 2679 - DNA, 1383 bp, Physcomitrella patens subsp. patens
  CDS (1)..(1383)
atggagaagatgcagatgcgccagcagttgttgcttgaccacctgaagcccgagaccggacggagggcggctgccaacgtcgtgacgtcaatttgttccgccaacgacagtgcaccttatgcacgaaccactgacttccttgacgatgtcgtcattgtggctgcgtatcgcacgccgatttgcaaagcaaagaggggaggtttcaaggacacttatccagatgacctcttggcacccgttctcagggctgtcgttgagaagaccggcgtaaatcctgcagagattggggacattgtgattggtaccgtcctcgctccgggtgcacagcgtgctaatgaatgccggatggctgcgttttacgctggttttccagaaactgtaccgattagaactgtgaatagacaatgctcatctggattgcaagccgttgcagacgtagtggcagcaatcaaagcaggtttctatgatatcggtattggaggtggattggagtcgatgactgtcaatcccatggcttgggaaggcgccgttaacccaaaggtggaggccgatcaaagagctcaagattgtctacttcctatgggtatcacttccgagaacgttgcggaacgctatggagttgatcgcagacagcaagatgaagcagcagtcaaatcgcatgcaaaggcggcagctgccagggcttctggcagattcaaagatgaaataattcctgtgcacaccaagattgttgatcctaaaactggagaggagaagcaagtagtcatctccgaggatgacggtattcggcctgggacatcccttgctgacttgtcgaagttgaagaccgtctttaagaaatctggcaccaccactgcagggaactcttcacaagtgagcgatggagcaggagctgtactgctcatgaaacgcaagactgctttggagaggaacttgcctattcttggtgttttcaggagctttgctgctgtaggtgtggatccagctgttatgggcatcggtcctgctgttgccattcctgctgctatcaaggcagctggcttggagatcaacgacattgatctttttgaaattaacgaggcgtttgcatcacagttcacatactgtgctcaagagttgggactagatgaggagaaaatcaatgtgaatggaggtgctatagctcttggccatcctcttggtgccacaggtgcgcgatgcacagcaacactcctgcacgagatgaagaagcgaggcaaggattgccggtttggtgtaatatcgatgtgtattggatctggtatgggagccgccgcagtatttgagcagggcggtgcaattgatccgcttagcaatgtccgggccgtcggacaaaacaacctactttcgagagatgcgaagtag

SEQ ID NO: 2680 - protein, 460 aa, Physcomitrella patens subsp. patens
MEKMQMRQQLLLDHLKPETGRRAAANVVTSICSANDSAPYARTTDFLDDVVIVAAYRTPICKAKRGGFKDTYPDDLLAPVLRAVVEKTGVNPAEIGDIVIGTVLAPGAQRANECRMAAFYAGFPETVPIRTVNRQCSSGLQAVADVVAAIKAGFYDIGIGGGLESMTVNPMAWEGAVNPKVEADQRAQDCLLPMGITSENVAERYGVDRRQQDEAAVKSHAKAAAARASGRFKDEIIPVHTKIVDPKTGEEKQVVISEDDGIRPGTSLADLSKLKTVFKKSGTTTAGNSSQVSDGAGAVLLMKRKTALERNLPILGVFRSFAAVGVDPAVMGIGPAVAIPAAIKAAGLEINDIDLFEINEAFASQFTYCAQELGLDEEKINVNGGAIALGHPLGATGARCTATLLHEMKKRGKDCRFGVISMCIGSGMGAAAVFEQGGAIDPLSNVRAVGQNNLLSRDAK

SEQ ID NO: 2681 - DNA, 1224 bp, Phaeosphaeria nodorum SN15
  CDS (1)..(1224)
atggcagctttcaacaaggtggcgcgcaacgtgttgcaaaagagcccaaatgatgttgtcttgctttcagctgtacgctcgccaatcaatcgtagcttcaaaggcggatacaaagatgcacatcctgaggatatcttgatgcctgttatgaaggctgctgtagagcgagcgcaaattcagaaaagcgatgtaaacgatgtccttatcggaaacgtacttgcagagctgggttttgcgaagacgggtcgaatggccctcaaccacgctggatttcccaactcgacgacttttcacactgtcaatcgtcagtgctccagcagtctgcaagctataacccacatctcgcactctatcatggtcggtcaaattgatgttggacttgctggcggcgtggaatgcatgtcacggaactacggatctcgcggagtcccgaccgatgtttcgcccactcttctgggatccacggtcaaagatgcccgtgactgtctgatgcctatgggcaccacttcggaaaatgtagcagaaagatataaggtagatcgaaagagccaggacgagtatgctatacgtagccatggccgtgcaagtcgagcacagaaagagggtcgttttgactgggagatcactcccgtaacagtgccgagaatagacgaggctacagggcaaccggcaggctatgaagtgagcaaggacgatggcattcggcacggattgacgtttgaaaaggtctcaacgctgaagccggtgttcggagagaacgggaaaagcacagctgggaactccagtcagatctcggacggagcgtcgtccactattctggcccgacgtttttgggcagaagaccgcggactccaaccacttggccgcttcgtgggtacacaagtcagaggctgtgcgccggatgagatgggcatctctccaatctatgccataccagctttgctgaagtgggctggtgtggaactcaaagacattgatatcgttgaattaaacgaggcattcgcgagtcaaaccatcgcatgcatacgcgagcttggtctggacgaggagaaggtcaatccaaatggcggtgcaatcgccctgggccaccccacaggcgcgactggggctcgtcagacagcgaccctgttcggtgagcttcggcggcaagacaaggagatgggcatcgtcagcatgtgtgcaagcactggccttggtgtggcttcgttgttcatccgcgagtag

SEQ ID NO: 2682 - protein, 407 aa, Phaeosphaeria nodorum SN15
MAAFNKVARNVLQKSPNDVVLLSAVRSPINRSFKGGYKDAHPEDILMPVMKAAVERAQIQKSDVNDVLIGNVLAELGFAKTGRMALNHAGFPNSTTFHTVNRQCSSSLQAITHISHSIMVGQIDVGLAGGVECMSRNYGSRGVPTDVSPTLLGSTVKDARDCLMPMGTTSENVAERYKVDRKSQDEYAIRSHGRASRAQKEGRFDWEITPVTVPRIDEATGQPAGYEVSKDDGIRHGLTFEKVSTLKPVFGENGKSTAGNSSQISDGASSTILARRFWAEDRGLQPLGRFVGTQVRGCAPDEMGISPIYAIPALLKWAGVELKDIDIVELNEAFASQTIACIRELGLDEEKVNPNGGAIALGHPTGATGARQTATLFGELRRQDKEMGIVSMCASTGLGVASLFIRE

SEQ ID NO: 2683 - DNA, 1242 bp, Phaeosphaeria nodorum SN15
  CDS (1)..(1242)
atggcgaaccaggcaccgaacaaagctcaagagcgcctctcgcaggttgcagaccacatgtctggagcttcaagcaagaagggcaaggccagcttgttggagaagcaccccgatgatatcgtcgtaacatgcgccctccgcacgcccttcacaaagggcggcaaaggcggcctcaaagacacccaagccgccgacctcctcaccggcgccttcaaagcgctcctcaaccgctcgaaaatcgaccccaacctcgtcgaagacatcgctgtcggcgccgtcctcgcccccggcggtggcgccacagaattccgcgccgccgccctggccgccggcttccccgtcaccacctcgtgcaagtcgctcaaccggcaatgctcgtcgggcctgcaagcgtgcgtcgacattgccaacgcaatcaaatccggcatgattgaaatcggcatcggcgcgggcgcagagtccatgtcgacgcaatacgggcccggcgccgtctctgaattctcgcccttgctcgaatcccacagggagagcgcaaactgcaaagtccccatgggcgtgctgagcgagcaaatggccaaggctaaaggcatcccgaggtccgcacaggacgcgtttgccgccagctcgttccagaaggccatcgaggcgcagaagcaggggctttttgatgccgagatcgcgccgttgacggtgcagtggacggaccccaagacggacgaggagaagacgattaccgtcgccaaggacgatggcgtcagggaagggtattactgcggaatcgctggccaagaattcgtcccggccttctcaaaggacggctcgatccatgcgggtaacgcgtcgcaaatctcagacggcgcggccgccgtgctgctcatgaagcgcagcaccgcgcagcgcctcgggcagactattgtcgggaaattcgtgcaggccagcatcgtcggcgtgccgcctctactcatgggcacgggcttgtccactggtgatgtggatatctgggaaatcaacgaggcttttgcgagccagtgtctgtactgcatcaaggagctgggcatcgatgagaagaaggtgaatcccaagggcggcgcgattgcgtttggacatcccctgggagtcacgggggcgaggcaggttagcacgctgttgacggagctgaagaggacgggcaagaagattggtgtgacgagtatgtgcgtgggcacgggcatgggcatggcggcggtttgggtggcggagtag

SEQ ID NO: 2684 - protein, 413 aa, Phaeosphaeria nodorum SN15
MANQAPNKAQERLSQVADHMSGASSKKGKASLLEKHPDDIVVTCALRTPFTKGGKGGLKDTQAADLLTGAFKALLNRSKIDPNLVEDIAVGAVLAPGGGATEFRAAALAAGFPVTTSCKSLNRQCSSGLQACVDIANAIKSGMIEIGIGAGAESMSTQYGPGAVSEFSPLLESHRESANCKVPMGVLSEQMAKAKGIPRSAQDAFAASSFQKAIEAQKQGLFDAEIAPLTVQWTDPKTDEEKTITVAKDDGVREGYYCGIAGQEFVPAFSKDGSIHAGNASQISDGAAAVLLMKRSTAQRLGQTIVGKFVQASIVGVPPLLMGTGLSTGDVDIWEINEAFASQCLYCIKELGIDEKKVNPKGGAIAFGHPLGVTGARQVSTLLTELKRTGKKIGVTSMCVGTGMGMAAVWVAE

SEQ ID NO: 2685 - DNA, 1245 bp, Phaeosphaeria nodorum SN15
  CDS (1)..(1245)
atggcaggtttcgcgcaaaaaggcctcaagaacatccttcagaagaaccctcgcgatgtcgtgttcctctccgcccttcgcacacctgtcacacgagcgaagaagggtggcttaagagatgcatacgaccatgaattgcttgctgcagtcctcaaagccaccatcaacaagtttcccaacctcgaccctgcaaagatagacgacgtatgcatcggcactgtcctcgctgagcttggaggctcaaaagctggccgcatggcggcgaaccacgtcggcattccgaccaccacatccttcagcaccacgaaccgggcctgcgcctcaggattgaacgccgtaaccaacattgcaaatgccattgctgttggacaaatagacattggtatcggcggtggaatggagagcatgactcgcaactacggcagccgcgccatccccacagagctctggcaagacttgaaagacagcccagtgaagcaagctcgggactgcataatgaacatgggcgtcacatccgagaacgtagcctcacgatacggcgtctcgcgagaagaccaagacgcattcgccgcacgctcacaccacctcgccgccaaagcgcgtcaaaccggcctcttcgcaaacgaaatcgtgcccgtaaccacacgccgcatcgagcccgaaacgccagaagacgtcaagaccatcacagtcgaggaggacgacggcatccggccaaccaccaccatcgagaagcttgctaccatgaagccagctttcagccaagacggcgcgtcaacagcgggaaacagcagtcaagtctccgacggcgccagcgcggctctcatgatgcgccgcagcactgccatcgcgctcggcctcgagaaggaaatcatcggaaagtgggcgggcacacaagtcaccggctgccagcccgacgagatgggcgttgggcccgccgtcgctatccccaagttactcgactacacgggcctggcaacgaaggatgtaaatgtgtgggagatcaatgaggcgtttgcgtcgcaggcgttgtattgcgtgcgcaagctgggtctcgaggataggatggaccatgtcaatcctaatggtggtgctattgcgttgggacacccgttgggcgcgacgagtgggaggatgctggcgacgttgttgagtgagttgggcaggaggggcgagcaggtgggtgttttgtcgaagtgtattgggacgggcatggggatggcgagtttgattgtgagggagtag

SEQ ID NO: 2686 - protein, 414 aa, Phaeosphaeria nodorum SN15
MAGFAQKGLKNILQKNPRDVVFLSALRTPVTRAKKGGLRDAYDHELLAAVLKATINKFPNLDPAKIDDVCIGTVLAELGGSKAGRMAANHVGIPTTTSFSTTNRACASGLNAVTNIANAIAVGQIDIGIGGGMESMTRNYGSRAIPTELWQDLKDSPVKQARDCIMNMGVTSENVASRYGVSREDQDAFAARSHHLAAKARQTGLFANEIVPVTTRRIEPETPEDVKTITVEEDDGIRPTTTIEKLATMKPAFSQDGASTAGNSSQVSDGASAALMMRRSTAIALGLEKEIIGKWAGTQVTGCQPDEMGVGPAVAIPKLLDYTGLATKDVNVWEINEAFASQALYCVRKLGLEDRMDHVNPNGGAIALGHPLGATSGRMLATLLSELGRRGEQVGVLSKCIGTGMGMASLIVRE

SEQ ID NO: 2687 - DNA, 1254 bp, Phaeosphaeria nodorum SN15
  CDS (1)..(1254)
atgaccgaacgcctcaagtccatcgtttcgcaaattgccccctcaaccaacgcgttgtcggccatcaccaccaagaaccccgacgatgttgtcatcaccctcgcgatccgcacacctctcacaaaggcacacaagggtggcttcaaggacacgacgctcgatgcactcctcgtcaagagcctgaaggcggttgtacaaaacgcgaacatcgaccctgcgctcgtagaagacatctgcctcggcaacgtcagcgattccaaagccgcatactacgtccgcgccgccatgctggctgctggcttccccaacaccacatccggttcatccctcaaccgcttctgctcatcaggattgaaggccgtgcaggacattgccaaccagatttccgttggcagcatcgagatcggtctggctttgggcgctgagagcatgaccgcgggcggcgaccgtctcgagaggccgttcgacgatgaaattttggagaaccaggaggccagcgactgcatgcagcccatgggccagacatcagagaacgtcggcaaggacttcaacatctcgcgcgagaagcaggacaggttcgccgcagagtcgtaccgaagagccgaggtcgcgcagaaggccggctggttcgatgacgagatcgcgcccattaaggtcaccctcaaggaccccaagaccggcgagtccaagcaggttaccctcacccgggacgagggcatccgtgccggaaccacattcgagagcctgcagaagctcaagcctgccttcctcccccacggcgacaggtcacacgccggtaactcgtcgcaattgaccgacggctgtgccgccgtcctgctgatgaagcgctcaacagccgagaagctcggccagcccatcctcgccaagtacgtcggcgccaccgttgccggccttcctccccgcatcatgggcatcggcccatccgtcgccatccccaagctcctcaccaagttcggcctgaccatcgacgacatcgacctcgttgagatcaacgaggctttcgcatccatggctgtctactgcctcgagactctcaagatcgaccacaacaagctcaacgtcaggggaggtgcgattgcgcttggccacccgcttggatgcaccggtgcgcgacagatcgtcactggtctgagcgagtgcaggaggcagaagaagaaggttctgctcacgagtatgtgcattggtactggtatgggcatggccggtttgttcgtcaacgagcagaatgtttag

SEQ ID NO: 2688 - protein, 417 aa, Phaeosphaeria nodorum SN15
MTERLKSIVSQIAPSTNALSAITTKNPDDVVITLAIRTPLTKAHKGGFKDTTLDALLVKSLKAVVQNANIDPALVEDICLGNVSDSKAAYYVRAAMLAAGFPNTTSGSSLNRFCSSGLKAVQDIANQISVGSIEIGLALGAESMTAGGDRLERPFDDEILENQEASDCMQPMGQTSENVGKDFNISREKQDRFAAESYRRAEVAQKAGWFDDEIAPIKVTLKDPKTGESKQVTLTRDEGIRAGTTFESLQKLKPAFLPHGDRSHAGNSSQLTDGCAAVLLMKRSTAEKLGQPILAKYVGATVAGLPPRIMGIGPSVAIPKLLTKFGLTIDDIDLVEINEAFASMAVYCLETLKIDHNKLNVRGGAIALGHPLGCTGARQIVTGLSECRRQKKKVLLTSMCIGTGMGMAGLFVNEQNV

SEQ ID NO: 2689 - DNA, 1227 bp, Coprinopsis cinerea okayama7#130
  CDS (1)..(1227)
atgtcgactcaagcttccacctctgctgccaagtctcgtcttctccagaagaacgacgacgacgtcgtcatcgtctccgctgttcgttcagccatcaccaagggtcgcaaaggtggattcaaggacaccaagcccgagctgctcctctcgcacgtcctgcgcgccgcctacagcaaggtctcgctcgaccccaagctcatcgaggacatctccgtcggcaacgtcctccccccgggcggtggtgcgaccgctgcccgcatggccgccctccacgctggcatccccatcgaaacctcgatcaacaccgtcaaccgacagtgctcctctggcttgaccgccatcacccagattgcgaacgagatcaaggccggtcagattgacattggtattggtgctggtgtcgagtcgatgaccaacggctacggagccggcgccatgggcgaatactcgaacgaggtcctctccaaccccgacgccgaggactgcctcctgcccatgggcatcacctctgaaaacgtcgccgccgactacggcatcacccgcgccgtccaagacgagttcgccgccatctccttccagcgcgccgccaaggcccagaaggagggcaagttcaaggaggagatcgtccctatcaccgccaagtgggtcgaccccaagactgagcaggagcgcgagatcgtggtcgaccacgatgacggtgttcgggatggtgttaccaaggagagtctctccaagttgaagcctgcgttcaagaaggatggaactacccatgctggtaacgcctcgcaagtctccgacggtgccgccgccgtcctcctcgctcgccgctccgtcgccaagcgcctcggcctccccatcctcggcaagttcgtcacctcctccgtcgtcggcgtgcccccacgcgtcatgggtatcggccccgccttcgccatcccccgcgtcctccaagtggccggcatcacccccgacgacgtcgacttctacgagatcaacgaggcgttcgcgtcgcaggctgtcatgtcagtgcagcacttgaagatcccctatgagaaagtcaacattaatggtggtgcgattgctattggccacccccttggatgcactggtgcacgacaggttgcgactggcttgagtgtggcgaagcagactggtggacgggtgtttgttacttcgatgtgtattggtagtggtatgggtatggctgctgtgttcgtcagcgagcactaa

SEQ ID NO: 2690 - protein, 408 aa, Coprinopsis cinerea okayama7#130
MSTQASTSAAKSRLLQKNDDDVVIVSAVRSAITKGRKGGFKDTKPELLLSHVLRAAYSKVSLDPKLIEDISVGNVLPPGGGATAARMAALHAGIPIETSINTVNRQCSSGLTAITQIANEIKAGQIDIGIGAGVESMTNGYGAGAMGEYSNEVLSNPDAEDCLLPMGITSENVAADYGITRAVQDEFAAISFQRAAKAQKEGKFKEEIVPITAKWVDPKTEQEREIVVDHDDGVRDGVTKESLSKLKPAFKKDGTTHAGNASQVSDGAAAVLLARRSVAKRLGLPILGKFVTSSVVGVPPRVMGIGPAFAIPRVLQVAGITPDDVDFYEINEAFASQAVMSVQHLKIPYEKVNINGGAIAIGHPLGCTGARQVATGLSVAKQTGGRVFVTSMCIGSGMGMAAVFVSEH

SEQ ID NO: 2691 - DNA, 1197 bp, Culex quinquefasciatus
  CDS (1)..(1197)
atggccgcattgacgaaaggagtctttattgttggagccaagcgtacggctttcggcaccttcggaggggcgttcaagaacacgaatgccacacagctgcagactgctgcggcaaaggcagccctggatgctgccggcgttaagcccgaccaggtcgactcggtcaacattggtcaggtgctggtgctgtcgtcctcggatggtgcctttttgcctcgtcacgtatcgctgcactgcggaattccaatcgagaagccggccctcggagtgaaccgcttgtgcggatccggattccagtcgatcgtgaacggagctcaggacatcatcctgggttcggcgaagatttctctgaccggaggagtggacaacatgagccagactccgtacaccgtgcggggaactcgtttcggaattcctctcggtaccaacccagcgctcgaggatgccctgtgggttggtctgagcgactcgttctgcaagcttccgatggcgttgactgcggagaatctggccgaacagcacaagatccctcgtgataaggtggacgcctttgcgctgcgttcccagcagctgtggaagaaggccaatgacgagggtgtattcaagaacgagatcacgcccttcaagctgaaggttaagggcaaggaagtcgactttgccgtcgacgaacatccccgtccgcaaacaaccgccgagggattggccaagctgccagcgttgttcaagaagaacggctgcgttaccgccggaactgcctccggaatctgcgacggagctgccgccgtcatcctggcctcggaggaagccgtcaaggcacacaacctaacgccgctggctcgcctagtagcgtacagtactgtcggagtgccgccggagatcatgggcatcggccccgttcccgccatcgagaacgtcctcaaagtggccggactgtccaagagtgacatcgatctgtacgaaatcaacgaagcgttcggcgttcaaactcttgcctgcattcaagcgctcggtctcgactccaaccagttcaatctgaacggtggtgcgatcgcgctgggacacccgctgggagcgtccggatcgcgcatcaccggtcatctggtgcacgagctgaagcgcaagaacctgaagcgagccatcggatcggcctgcatcggaggtggacagggtattgcgctgctgctggagtcggtttag

SEQ ID NO: 2692 - protein, 398 aa, Culex quinquefasciatus
MAALTKGVFIVGAKRTAFGTFGGAFKNTNATQLQTAAAKAALDAAGVKPDQVDSVNIGQVLVLSSSDGAFLPRHVSLHCGIPIEKPALGVNRLCGSGFQSIVNGAQDIILGSAKISLTGGVDNMSQTPYTVRGTRFGIPLGTNPALEDALWVGLSDSFCKLPMALTAENLAEQHKIPRDKVDAFALRSQQLWKKANDEGVFKNEITPFKLKVKGKEVDFAVDEHPRPQTTAEGLAKLPALFKKNGCVTAGTASGICDGAAAVILASEEAVKAHNLTPLARLVAYSTVGVPPEIMGIGPVPAIENVLKVAGLSKSDIDLYEINEAFGVQTLACIQALGLDSNQFNLNGGAIALGHPLGASGSRITGHLVHELKRKNLKRAIGSACIGGGQGIALLLESV

SEQ ID NO: 2693 - DNA, 1182 bp, Culex quinquefasciatus
  CDS (1)..(1182)
atgtcatcattggaagaagtttacatcgtttcggccgccaggacaccaattggcaacttcctgggcacactctcctccctctccgccgccgatctcggtgccgttgccatcaaggaggtcctgaaccgcgccggcgtcccaccggccgacgtcgacgaagtcatcctcggtcaagctctgaccgccggccagggtcaaaacccagcccgccaggcatcgctaaaggccggcatcccgaaagaagcgcccgcctacctgatcaacttgctgtgcggttcgggccttaaaacggtcgccctcggctatcaggcgatccgctgcggagatgcctcggtggtggtggccggtggccaggagtgcatgtccaagtcgccgcacgtgttgcacctgcgcagcggaaccaagatgggcgagaccaaaatggtcgacacgatgctgtgcgatgggttgaccgatgcgatctacgacatgcacatgggcgtgacggcggaaaatctggccaaggagtttgaaataagtcgcgaggagcaggacgcgtttgccgccaaaagtcaacagctggcggaggaatcgcagaagaagggttacttcgtggatgaaattgtagcggttccggtgccgagtcggaaggagaccatcaacttcgacaaggatgaatatccgaagcatgggaccacggtggaagggctggccaagttgaaggcgtgcttcattaaggatggaaccgttacgccgggtaatgcgtccggaattaacgattcggcggcggcggttctgttgatgtccggagccgaagttcagaagcgtggagcgaagccgttggccaggattgtggccttcagccagaccggaatttgtcccaaggttatgggcgctgggccaatcactgcggtgacgaaagtgctcgaaaaagccggctggaagttggacgaggtggatctgtttgagctgaacgaggcgtttgcggcccaagcactagccgtcaacaagggtctcggcgtgaacccggagcgggtgaacgttggtgggggtgcgatcgcccttggccatccgattggggcgtccggttgtcgggtgttggtaacgctgctgtacgcgctcaagcgcaccggaggtaaacggggcgtggcttcgctgtgcgttggcggtggaatgggcgtggccatggcgaacctcaagtga

SEQ ID NO: 2694 - protein, 393 aa, Culex quinquefasciatus
MSSLEEVYIVSAARTPIGNFLGTLSSLSAADLGAVAIKEVLNRAGVPPADVDEVILGQALTAGQGQNPARQASLKAGIPKEAPAYLINLLCGSGLKTVALGYQAIRCGDASVVVAGGQECMSKSPHVLHLRSGTKMGETKMVDTMLCDGLTDAIYDMHMGVTAENLAKEFEISREEQDAFAAKSQQLAEESQKKGYFVDEIVAVPVPSRKETINFDKDEYPKHGTTVEGLAKLKACFIKDGTVTPGNASGINDSAAAVLLMSGAEVQKRGAKPLARIVAFSQTGICPKVMGAGPITAVTKVLEKAGWKLDEVDLFELNEAFAAQALAVNKGLGVNPERVNVGGGAIALGHPIGASGCRVLVTLLYALKRTGGKRGVASLCVGGGMGVAMANLK

SEQ ID NO: 2695 - DNA, 1230 bp, Laccaria bicolor S238N-H82
  CDS (1)..(1230)
atgtcaacccaacaagcatccacctcttccgcaaaagccgccattctccaaaagaacgacaacgacgtcgtcatagtctgtgcagtccgttccgccatcacaaagggcagaaaaggaggcttcaaagacaccaaacccgaactcatcctctcacacgtcctacgcgcagcatactccaagataagcctcgaccccaagctcatcgaagacatctcggtgggcaacgttctccccccagggggaggcgcctccgccgcacgcatggcagccctccacgccggcatcccagtcgaaacgtccatcaataccgttaatcgacagtgttcgtcgggccttacggccatcaaccagatcgcgaaccagattcgcgcgggtcagatcgatattggtattggagccggcgtcgaatcaatgacacacggcttcggctcacgcgcagcccccgaagtatccgacgaagtcctaaccaaccaagacgcagaagactgtctcctccccatgggcataacctccgaaaacgttgcgagcgactacaacatcccccggtccgcgcaagacgccttttccgctctctccttccaaaaagccgcagcagctaataaagcaggcaaattcaaagcggagatcgttcccatccttgcaaaatggatagacccaaagacggaggaagttaaggaggttttggttagtgaggatgatgggattagggagggtgttacggctgagagcctggctaagattaaaccggctttcaagaaggatggtgttactcatgctggcaacgcatcccaagtctcagacggcgcagcagccatcatcctcgcccgtcgctccgtcgctctccgcctcggtctcccaatcctaggcaaattcgtaaacgcagcaaccatcggcgtacccccccgcatcatgggcgtcggtcccgcctatgccattccccgcgttcttaaattgacagggcttagtattgaagatgtcgatttctttgagattaatgaggcgtttgcgagtcaggcgttgttttctattgatacgctcaagattgggcatgagaaggttaatttgaatgggggtgctattgcgttggggcatccgttggggtgtaccggtgcgagacaggtagccacgggccttagtatcgccaagcagacgggtggaagggtcttcgtgacgagtatgtgtattgggtctgggatggggatggcggctgttttcgttagtgagcagtaa

SEQ ID NO: 2696 - protein, 409 aa, Laccaria bicolor S238N-H82
MSTQQASTSSAKAAILQKNDNDVVIVCAVRSAITKGRKGGFKDTKPELILSHVLRAAYSKISLDPKLIEDISVGNVLPPGGGASAARMAALHAGIPVETSINTVNRQCSSGLTAINQIANQIRAGQIDIGIGAGVESMTHGFGSRAAPEVSDEVLTNQDAEDCLLPMGITSENVASDYNIPRSAQDAFSALSFQKAAAANKAGKFKAEIVPILAKWIDPKTEEVKEVLVSEDDGIREGVTAESLAKIKPAFKKDGVTHAGNASQVSDGAAAIILARRSVALRLGLPILGKFVNAATIGVPPRIMGVGPAYAIPRVLKLTGLSIEDVDFFEINEAFASQALFSIDTLKIGHEKVNLNGGAIALGHPLGCTGARQVATGLSIAKQTGGRVFVTSMCIGSGMGMAAVFVSEQ

SEQ ID NO: 2697 - DNA, 1248 bp, Podospora anserina DSM 980
  CDS (1)..(1248)
atggcggtagaaagactcggctccatcctcaaacaccttgcccccggcaacgggctgtcccaaatcacctccaagaatgccgacgacattgtcatcaccctcgccgtccgcacgcctctggccaaggccaagaagggtggcttcaaggacaccaccatcgagtacatggtctacgctctcctgaaggaggtcaaccaacggagcaacctcgaccccgctctcgtcgaagatatctgcctgggcaatgtttccgatggcaaggcttcgtacaagctgcgcgccgcgtccctcgccgcgggctaccccaacacctgctccgtctactcgctcaaccgcttctgctcctccggcctcaaggccgtcgccgacattgcccacgccatctccaacggatccatcgaaatcggtatcgccatgggagccgagagcatgaccgctggcggcgatgcgctcgagaagccctttgacgaggaggtcaccaagcactcccaggaggctgtcgactgcatgcagcccatgggttggacttccgagaacgtcagcgctgactttggtgtcactcgcgagatgatggacaagtacgccgccgagagtttccagagagccgagagggcgcaaaaggccggtcttttcgatgacgagatcgtccccatcaccacccagatcaaggacaaggacggcaattccaaaacggtcaccctaacccaggacgagggcatccggcctggcaccaccgccgagggtctcggcaagatccgcgccgccttccctcaatggggtggctgcaccactggtggcaatgcctctcaggttaccgatggtgctgctgccatcctgctgatgaagcgcagcaccgccatcaagctcggtcagcccatcctgggcaaatacgtcggctccaccaccgccggtctcgccccccgcatcatgggtattggccccaccgtggccatccccaagctcctcgcccagcacaacatcaccctgaacgatgttgatgtcgtcgagatcaacgaggcctttgcaagcatggctgtctactgccgggacaagcttggactcgactgggccaagatgaacccccgtggcggtgccattgcccttggccacccactgggcgccaccggtgcgagacaaatcgtcaccggcctcagcgagtgcagaaagaccggcaagaagatcctgctgacgagcatgtgcattggcaccggcatgggcatggcgggcttgtttgttaacgagcaataa

SEQ ID NO: 2698 - protein, 415 aa, Podospora anserina DSM 980
MAVERLGSILKHLAPGNGLSQITSKNADDIVITLAVRTPLAKAKKGGFKDTTIEYMVYALLKEVNQRSNLDPALVEDICLGNVSDGKASYKLRAASLAAGYPNTCSVYSLNRFCSSGLKAVADIAHAISNGSIEIGIAMGAESMTAGGDALEKPFDEEVTKHSQEAVDCMQPMGWTSENVSADFGVTREMMDKYAAESFQRAERAQKAGLFDDEIVPITTQIKDKDGNSKTVTLTQDEGIRPGTTAEGLGKIRAAFPQWGGCTTGGNASQVTDGAAAILLMKRSTAIKLGQPILGKYVGSTTAGLAPRIMGIGPTVAIPKLLAQHNITLNDVDVVEINEAFASMAVYCRDKLGLDWAKMNPRGGAIALGHPLGATGARQIVTGLSECRKTGKKILLTSMCIGTGMGMAGLFVNEQ

SEQ ID NO: 2699 - DNA, 1263 bp, Podospora anserina DSM 980
  CDS (1)..(1263)
atgtccctcccccgcggcctcaaatccgtccttaccaaagcccccaccgacgtggtcatcctctctgccctccgcacccccatcacaaggtcctacaagggcggcctgaaagacgcctaccccgaagagttgctgtccaccgtcctcaaagccaccctcgacgccaaccccaacctcgacccgaaactcatcgaggatgtcgccgtcggcgtggtcctcaacgagctcggcgggtctaaggctgcccgcatggcgctcaaccacacccccggttttgacacgagctccacctccctttacaccgccaaccgggcttgtgcctcgtcgctgcaggcgatcaccttggttgcgagccagatcaagaccgagatgatcagtgttggtattggagccggtatggagagcatgacaaggaactacggcacgagggcgattccagttgatgtctggcctgagttgaaggagagtcccgtcaaagaggcgagggattgcgtgatgagcatggggatcacgagtgagaatgttgccgagaggtataacgtctcgagggaggaccaggatgccctggctgtggagtctcatgctcgtgctgcccgcgcggtgaaggaggggtggtttgacaaggaggttgttcctgtccacaccaggttccaagaggtggataagcaggggaataaagttggggaggagcagagggtgactgtgacaaaggatgacgggatcagggagggggtcacgcttgacaagctggcgaagctgaagccggcgttcaagcctgatgggaggagcacggcggggaattccagccaggttagcgatggggctgcggcggcgctgttgatgagacggagtaccgctactgagcttgggttgacggggcagattatgggcaagtttgttgctagtgctgttgcggggtgcaagccggatgagatggggattgggcctgcgattgcgattcctaagttgttgaaccagcttgggttgaagagtgaggatgttgatcggtgggagattaacgaggcgtttgcttcccaggcgctgtactgtgtgagggagttggggttggagaaggagttggcggctggcaaggtcaaccctgatggcggtgctatcgcgctgggtcatcctcttggtgctactggtgcgagaatggtcagcacgctcatgcatggtctccagaggacgggtggtgaggttggtgttgtgagcatgtgcattggtactggtatgggtatggctggtgttttcgttcgggagtaa

SEQ ID NO: 2700 - protein, 420 aa, Podospora anserina DSM 980
MSLPRGLKSVLTKAPTDVVILSALRTPITRSYKGGLKDAYPEELLSTVLKATLDANPNLDPKLIEDVAVGVVLNELGGSKAARMALNHTPGFDTSSTSLYTANRACASSLQAITLVASQIKTEMISVGIGAGMESMTRNYGTRAIPVDVWPELKESPVKEARDCVMSMGITSENVAERYNVSREDQDALAVESHARAARAVKEGWFDKEVVPVHTRFQEVDKQGNKVGEEQRVTVTKDDGIREGVTLDKLAKLKPAFKPDGRSTAGNSSQVSDGAAAALLMRRSTATELGLTGQIMGKFVASAVAGCKPDEMGIGPAIAIPKLLNQLGLKSEDVDRWEINEAFASQALYCVRELGLEKELAAGKVNPDGGAIALGHPLGATGARMVSTLMHGLQRTGGEVGVVSMCIGTGMGMAGVFVRE

SEQ ID NO: 2701 - DNA, 1260 bp, Podospora anserina DSM 980
  CDS (1)..(1260)
atgggtgctctcgacagactttctcagctgggcaaccagatctccggcggcgcctccgcaggcggcaaggccaagctcctggagaagaaccccgatgatatcgtcgttaccgctgccctccggacggccatcacaagaggtggaaagggtagcttcaaggacacagccgccgccgacctgatggctggtgccctcaagtccatcatcgagcgctccaagatcaaccccgccctggtcgaggatatcgttgtcggcaccgtcctcgcccccggtggtggcgccaccgagatgcgcgctgccgctcttgttgccggcttccccgactccaccgccgtccacaccctcaaccgccagtgctcttccggtctccaggcctgcgttgacattgccaacgccatccgctccggccagatcgaggtcggcatcggcgccggtgtcgagtccatgtccactcagtatggccccggcgccgtgaccgagttctccgagctcctcgagagccaccccgaggctgccaactgcaaggtccccatgggtgtcctctctgagcagatggccaaggccaagggcgtcacccgtgccgtccaggatcagttcgctgccgcttccttccagaaggccgtcaaggcccagaaggctggtctcttcaaggaggagatcgctcccctcaaggtcaagtacgaggaccccaagtccggcgagaccaaggagattgtcgtcgacaaggacgatggcatccgtgagggtgtcaccgtcgagtccctcggcaagatccgtgctgccttcgccaaggacggcagcatccacgccggcaacgcctcccaggtttccgacggtgccgccgccgttctcctcatgaagcgctccaccgccgagaagctcggccagaccatcctcggcaagtacgtcaacgcttccatcgttggtgtgccccctcttctcatgggtctcggcccctggaaggccatccccaaggtgttcgagctcactggcatcaccaaggaggacgttgacatctttgagatcaacgaggctttcgcctctcagtgcctcttctgcgccaacgagcttggcatccctgctgagaagatcaaccctaagggtggtgccattgctttcggccaccctctcggctgcaccggtgccagacaggtgtccaccctcctctatgagctcaagaggacaaaccagaagattggtgtcacttccatgtgcattggtactggtatgggtatggctgctgtctgggttgccgagtaa

SEQ ID NO: 2702 - protein, 419 aa, Podospora anserina DSM 980
MGALDRLSQLGNQISGGASAGGKAKLLEKNPDDIVVTAALRTAITRGGKGSFKDTAAADLMAGALKSIIERSKINPALVEDIVVGTVLAPGGGATEMRAAALVAGFPDSTAVHTLNRQCSSGLQACVDIANAIRSGQIEVGIGAGVESMSTQYGPGAVTEFSELLESHPEAANCKVPMGVLSEQMAKAKGVTRAVQDQFAAASFQKAVKAQKAGLFKEEIAPLKVKYEDPKSGETKEIVVDKDDGIREGVTVESLGKIRAAFAKDGSIHAGNASQVSDGAAAVLLMKRSTAEKLGQTILGKYVNASIVGVPPLLMGLGPWKAIPKVFELTGITKEDVDIFEINEAFASQCLFCANELGIPAEKINPKGGAIAFGHPLGCTGARQVSTLLYELKRTNQKIGVTSMCIGTGMGMAAVWVAE

SEQ ID NO: 2703 - DNA, 1278 bp, Pyrenophora tritici-repentis Pt-1C-BFP
  CDS (1)..(1278)
atggctaaccaggctcctaacaaagttcaagagcgccttacgcaggtcgaaggccatctcactggtgctgcgtcgaagacgggcaagaacgctctattggagaagaaggctgatgatatcgtcataacctgcgccctccgcaccgccttcaccaaaggcggcaaaggcggcttcaaagacacacatgcatcagacctcctccacggcgcctacaaagccctcgtagagcgctccggcatcgacccctccctcgtcgaagacatcgccgtcggcgccgtcctcgccccaggcggtggcgcaaccgaattccgcgccgcagccctcgccgccggcttccccacaactacagccgtcaagtctctaaaccgacaatgctcatcgggcctccaagcctgcgtcgacatcgccaacgccatcaaatccggcatgattgaaatcggcatcggcgcaggcgctgagagcatgagtacgcagtatggtcccggggctgtgagcgagttctcgccccttctcgacggccacacggaagctgcaaactgcaaggtaccaatgggtgttttgtccgagaaaatggcaaaggagaagggtattccgcgctctgcacaagacgccttcgccgcgtcttcgttccaaaaagccgtcgaggcgcagaagaacggcttgttcgatgaggaaatcgcgcccttgacagtcaagtggacagaccccaaaaccgatgaagaaaagaccatcaccgtcgcggccgacgacggcatccgacaaggcattaccgcggaatccctggccaaaatccgccctgccttttcaaaagacggttccatccacgcaggcaacgcctcgcaaatctccgacggcgccgccgccgtcctcctcatgaaacgctccacggcccagcgcctcggccagaagattctcggaaaattcgttcaggccagcatcgtcggtgtgccgccgctactcatgggtgtcggtcctgctgctgctattcccgtggtactgcagaagacgggccttgccaaggaggacgttgatatttatgaaatcaatgaggcgtttgctagtcagtgcctctactgcattaatgagctgggtctcgatcagaagaaggttaatcccaagggaggtgcgattgcgtttggtcatccgctgggtgtcacgggtgcgagacaggttagtacgctgttgacggagttgaggcggactgggcagaaggtcggggttacgagtatgtgtattggtactggtatgggtatggctgctgtttgggtggctgagtag

SEQ ID NO: 2704 - protein, 425 aa, Pyrenophora tritici-repentis Pt-1C-BFP
MANQAPNKVQERLTQVEGHLTGAASKTGKNALLEKKADDIVITCALRTAFTKGGKGGFKDTHASDLLHGAYKALVERSGIDPSLVEDIAVGAVLAPGGGATEFRAAALAAGFPTTTAVKSLNRQCSSGLQACVDIANAIKSGMIEIGIGAGAESMSTQYGPGAVSEFSPLLDGHTEAANCKVPMGVLSEKMAKEKGIPRSAQDAFAASSFQKAVEAQKNGLFDEEIAPLTVKWTDPKTDEEKTITVAADDGIRQGITAESLAKIRPAFSKDGSIHAGNASQISDGAAAVLLMKRSTAQRLGQKILGKFVQASIVGVPPLLMGVGPAAAIPVVLQKTGLAKEDVDIYEINEAFASQCLYCINELGLDQKKVNPKGGAIAFGHPLGVTGARQVSTLLTELRRTGQKVGVTSMCIGTGMGMAAVWVAE

SEQ ID NO: 2705 - DNA, 1251 bp, Pyrenophora tritici-repentis Pt-1C-BFP
  CDS (1)..(1251)
atgaccgaccgcctgaagtctatcgtgtcgcacatgacacccgcgacaagcggactctcggcaatcaccaccaagaatgccgacgacatcgtcatcaccctcgctatccgaactcccctcaccaaggcctacaagggcggcttcaaggacacgactcttgatggcttgatggtcaagacgctcaagcaagtagtcgcaaagtcaaacctcgaccccgcgcttgtagaagacatctgcgtcggcaatgtctcggatgcaaaggccgcctactacgtccgcgccgccatgctcgcggctggcttccccaacacaaccgccggctcatcgctgaaccgattctgctcatccggactcaaggccgtgcaggacatcgccaaccagattgccgtcggcagcatcgaaattggattggccatgggcgcagagagcatgacagccggcggcgacaggctcgagaggccgttcgtagctgaggtgctcgagaaccaggaggcatgcgactgcatgcagcccatgggccaaacctcagaaaacgtcggcaacgacttcaacatctcgcgcgagcgccaggacaagttcgccgctgagtcataccgaagggccgaggctgcgcaaaaggctggctggttcgacgacgagatcacgcccatccccaccgtcatcaaggaccccaagaccggcgaggagaaggccgtcacactgaccaaggacgagggtatccgctacggcaccacattcgagagcctgcaaaaagtcaagcctgccttccttccccacggcgacaagtcacatgctggaaactcctcgcaactcaccgacggtgccgccgcaatcctactcatgaagcgttccaccgccgagaagctcgggcaacccatcctcgcaaagtacgtcggcgcaaccgtcgctggacttgcccctcgcatcatgggtatcggcccatccgtcgccatccccaagctcctccacaagttcaacctcactatcgacgaggtcgacctgattgagatcaacgaggccttcgcatccatggctgtatactgcatggagacacttaagatcgaccaccagaagctcaacgttaggggtggtgctattgcgttgggtcacccgttggcttgcactggtgcgaggcagattgtcacaggtttgagcgagtgcaggaggcaaaagaagaaggttcttcttactagtatgtgcattggtactggtatgggtatggctggtttgttcgtcaatgagcagttgtag

SEQ ID NO: 2706 - protein, 416 aa, Pyrenophora tritici-repentis Pt-1C-BFP
MTDRLKSIVSHMTPATSGLSAITTKNADDIVITLAIRTPLTKAYKGGFKDTTLDGLMVKTLKQVVAKSNLDPALVEDICVGNVSDAKAAYYVRAAMLAAGFPNTTAGSSLNRFCSSGLKAVQDIANQIAVGSIEIGLAMGAESMTAGGDRLERPFVAEVLENQEACDCMQPMGQTSENVGNDFNISRERQDKFAAESYRRAEAAQKAGWFDDEITPIPTVIKDPKTGEEKAVTLTKDEGIRYGTTFESLQKVKPAFLPHGDKSHAGNSSQLTDGAAAILLMKRSTAEKLGQPILAKYVGATVAGLAPRIMGIGPSVAIPKLLHKFNLTIDEVDLIEINEAFASMAVYCMETLKIDHQKLNVRGGAIALGHPLACTGARQIVTGLSECRRQKKKVLLTSMCIGTGMGMAGLFVNEQL

SEQ ID NO: 2707 - DNA, 1227 bp, Pyrenophora tritici-repentis Pt-1C-BFP
  CDS (1)..(1227)
atggcatcctttagcagagccgcacggaatgcattgcaaaagagccccaatgatgttgtcctcctttctgcagtccggtcacccatcaatcgaagcttcaagggcggatataaagatgcgcatccggaggatattttgatgccggttatgaaagcggctgtgcaacgagctggcattgagaagagcgacgtgaacgatgtcatgattgggaacgtccttgctgagcttggtttcgcaaagacgggacgtatggccctcaaccatgccggcttcccgaattcgacaacttttcacaccgtcaaccgtcaatgctcgagcagtctacaggctattacccacatctcacattccatcatggtgggccagatagacgtggggctcgctggcggtgtagaaagcatgtcaagaaactatggctcgcggggcgtccccaccgacgtctcgcccgcccttctcggatcgaacgtcaaagatgctcgcgactgtctcatgcccatgggcattacatctgagaatgtagcagagagattcaagatcgaccggaagtcgcaagatgaatacgctgtgcggagtcacggtcgcgcaagtcgcgctcagaaagaagggcgttttgactgggagcttgtgccagtgacggtccagagaatggacgaggcaaccggtcagcctgcaggatacgaggtgaccaaagacgacggtatccgccatggattgacatttgagaaggtgtcaacgcttaaacctgtgtttggtgaaaacggcaagagcactgcaggcaattcatctcaaatatccgacggtgcatcgtctaccattcttgctcgacgttcctgggcagaggagcgtgggctccagcctctcggtcgcttcgtgggcacccaggtcaagggctgtgcaccagacgagatgggtatcagcccgatatacgccattccagcattgctgaagtggacaggtgtcgaactcaaggacgtcgatgtgattgaactgaacgaggctttcgcaagtcagactgtcgcttgtatccgagaattgggtctggacgaagacaaggtgaaccctaatggaggtgcgatagcccttgggcacccaaccggagcgacaggtgctcgacagacagctacactatttggtgagcttcgacgccaggacaaggagataggcattgtcagtatgtgtgccagcaccggcatgggcgtcgcatccttgtttgtgagagaatcatga

SEQ ID NO: 2708 - protein, 408 aa, Pyrenophora tritici-repentis Pt-1C-BFP
MASFSRAARNALQKSPNDVVLLSAVRSPINRSFKGGYKDAHPEDILMPVMKAAVQRAGIEKSDVNDVMIGNVLAELGFAKTGRMALNHAGFPNSTTFHTVNRQCSSSLQAITHISHSIMVGQIDVGLAGGVESMSRNYGSRGVPTDVSPALLGSNVKDARDCLMPMGITSENVAERFKIDRKSQDEYAVRSHGRASRAQKEGRFDWELVPVTVQRMDEATGQPAGYEVTKDDGIRHGLTFEKVSTLKPVFGENGKSTAGNSSQISDGASSTILARRSWAEERGLQPLGRFVGTQVKGCAPDEMGISPIYAIPALLKWTGVELKDVDVIELNEAFASQTVACIRELGLDEDKVNPNGGAIALGHPTGATGARQTATLFGELRRQDKEIGIVSMCASTGMGVASLFVRES

SEQ ID NO: 2709 - DNA, 1242 bp, Pyrenophora tritici-repentis Pt-1C-BFP
  CDS (1)..(1242)
atggctttcgtgcagaagggtctgaagaacattttgcagaaaagccccaacgacgtggttttcctttcagcattgcgcacaccagttacgagagcaaaaaaaggtggattgcgcgatgcatatgatcatgaacttttgggtgcagtgcttaaagccacaagaacgaaattcccgaatctcgatcctgcgaagatagacgatgtatgcattggtacagtcctcgctgaactcggtggctcgaaggctggccgtatggctgccaaccacgtcggtattcccacgacaacatcattcagcactgtaaaccgcgcgtgcgcatccggtctctccgcaattacttcgatcgcaaactcgatagctgtcgggcaaattgatataggtattgcaggaggcatggaaagcatgacacgcaactacggcagcagggctataccaacagagctctggcctgagatgaaagacagcccagtcaaggaagcgcgagagtgcatcatgagcatgggtatcacatcggagaacgttgcgcagcgctatggcgttaaccgcgcagatcaggacgcctttgccgcacaatcgcaacaaagggctgcccgggcgcaacagaacggcaactttgacgacgagatcgtacctgttacgacacgttggatagagccggaaactccggagagtcaaaaacaagttactgttacaaaggatgacggcattcggccaggaaccacaatcgagaagcttgccgccatgaaaccagcgttcaaggcggatggcacaagcacggcaggaaacagcagtcaggtctcagacggagcgagtgcagcgctcatgatgcgccgttctaccgccacagctcttggtctagaaaagcaaatcattggaaagtgggccggtacacaagtcgtgggttgttcgcctgatgaaatgggtgttggacccgctctagccatccccaagcttttgaactacactggtctgcagacctcagatgtaaatgtctgggaaattaatgaagcgtttgctagtcaagcactctactgcgtcaggaaattgggtctggagggcaagatggacaaggtcaaccctaacggaggtgcgattgctctaggtcatcctttgggagcgacaagtggcaggatgcttgcgacactgttgagtgaaatgggcaggagtggagagcaagttggtgtactgagcaaatgcattggtactgggatgggcatggctagtttgattattcgcgagtag

SEQ ID NO: 2710 - protein, 413 aa, Pyrenophora tritici-repentis Pt-1C-BFP
MAFVQKGLKNILQKSPNDVVFLSALRTPVTRAKKGGLRDAYDHELLGAVLKATRTKFPNLDPAKIDDVCIGTVLAELGGSKAGRMAANHVGIPTTTSFSTVNRACASGLSAITSIANSIAVGQIDIGIAGGMESMTRNYGSRAIPTELWPEMKDSPVKEARECIMSMGITSENVAQRYGVNRADQDAFAAQSQQRAARAQQNGNFDDEIVPVTTRWIEPETPESQKQVTVTKDDGIRPGTTIEKLAAMKPAFKADGTSTAGNSSQVSDGASAALMMRRSTATALGLEKQIIGKWAGTQVVGCSPDEMGVGPALAIPKLLNYTGLQTSDVNVWEINEAFASQALYCVRKLGLEGKMDKVNPNGGAIALGHPLGATSGRMLATLLSEMGRSGEQVGVLSKCIGTGMGMASLIIRE

SEQ ID NO: 2711 - DNA, 1182 bp, Acyrthosiphon pisum
  CDS (1)..(1182)
atggctgatgaagtatatattgtatctgccgtccgtacaccaataggttcatttggcggttcattgtcgtctttgaaagctcaccagttaggctccatagtgatttcagaagcacttaaaagagctaatgtcaattcaaatgaagtgtctgaagttattcttggacagacccttacagctggacaaggtcaaaatccagcaagacaagcttcgataaatgctggaattccaatcactgtacctgctcatggtattaacctactctgtggatctgggctgaagtctgtggttcatggataccagtcaatcaaatgcggagattcttcaattgttattgcaggtggccaagagagcatgagtaacgctcctcatgttgtcaatatacgatctggtgtcaaaatgggtaacacagaattgatagatacgatgctatacgatggtttgacagacgcatttaacaacatacacatgggcataactgctgaaaatattgctgaacagtataatatttcaagggaacttcaagacaattatgcttttgagtctcagaaacggacagcagaagctcaaaaaaatggttacttcaaagatgaaataacacctgttgaggttaaaatacgacagaataccatcgtatttgacacagatgaatatccaagaaatgatacaactttaaattcattatctgcattgagaccagcttttaaacctaatggtggtgtagtcactgtcggaaatgcatcaggaagaaatgatggtgctgcagtagttcttttaatgaacggagaagaatgtaaaaaacgaggttgtactccaatggctaaaatcgttgctcatgctgtgtgcgggcttgatccaaaaataatgggtatgggaccagtacctgctgtgtttaagacgattgaaaaagctggttggacaatggatagcgtggatatttttgaattaaatgaagcatatgctgcacattcaattgctgtagagcgtgatttaggaatatcttcagagaaagtaaacattaatggaggtgccatttcattgggtcatcctatcggagcatctggtgctcgagtattggttacgttggtgcacatattgttaaggaccggcaaaaaacgaggaatagcatccttgtgtattggcggaggcatgggtattgctattgctgtcgaaacattataa

SEQ ID NO: 2712 - protein, 393 aa, Acyrthosiphon pisum
MADEVYIVSAVRTPIGSFGGSLSSLKAHQLGSIVISEALKRANVNSNEVSEVILGQTLTAGQGQNPARQASINAGIPITVPAHGINLLCGSGLKSVVHGYQSIKCGDSSIVIAGGQESMSNAPHVVNIRSGVKMGNTELIDTMLYDGLTDAFNNIHMGITAENIAEQYNISRELQDNYAFESQKRTAEAQKNGYFKDEITPVEVKIRQNTIVFDTDEYPRNDTTLNSLSALRPAFKPNGGVVTVGNASGRNDGAAVVLLMNGEECKKRGCTPMAKIVAHAVCGLDPKIMGMGPVPAVFKTIEKAGWTMDSVDIFELNEAYAAHSIAVERDLGISSEKVNINGGAISLGHPIGASGARVLVTLVHILLRTGKKRGIASLCIGGGMGIAIAVETL

SEQ ID NO: 2713 - DNA, 1182 bp, Acyrthosiphon pisum
  CDS (1)..(1182)
atggctaatgaagtatatattgtatctgccgttcgtacaccaataggttcatttggcggttcattgtcgtccttgaaagctcatcaattaggctgcatagtgattacagaagtacttaaaagagctaatgtcaattcaaatgaagtgtctgaagttattcttggacaggcccttacagctggacaaggtcaaaatccagcaagacaagcttcgataaatgctggaattccaatcactgtacctgctcatgttatcaacatgctctgtggatctgggctgaaagctgttgttcacggataccagtcaatcaaatgcggagattcttcaatagtcattgcaggtggccaagagagcatgagtaacgctcctcatgttgtaaatttacgatctggtatcaaaatgggtaacacagaattgatagatacgatgctatacgatggtttgacagacgcatttaacaacatacatatgggcataactgctgaaaatattgctgaacagtataatatttcaagggaacttcaagacaattatgcttttgagtctcagaaacggacagcagaagctcaaaaaaatggttacttcaaagatgaaataacaccagtagaggtgaaaatacgacggaataccatcgtatttgatacagatgaatatccaaaaaatgatagtactttaaattcattatctgcattgagaccagtttttaaaccgaatggtggtgtagtcacagccggaaatgcatcaggaataaatgatggtgctgcagcagtacttttaatgaatggagaagaatgcaaaaaacgaggttgtactccattagctaaaatcgtagctcatgctgagtgtggggtcgatccaaaaataatgggtactggaccaatacctgctgtgcttaagacgattgaaaaagctggttggacaatggatagcgtggatatttttgaattaaatgaagcatttgctgcacaatcaatcgctgtagtgcgtgatttaggattaaattcagacaaagtaaacatttatggaggtgcaattgcattgggtcatcctattggagcatctggtgctcgagtattagttacgttggtgcacatattgttaaggaccggcaaaaaacgaggcatagcatccttatgtgttggtggaggtatgggtattgctgttgcagtcgagactttataa

SEQ ID NO: 2714 - protein, 393 aa, Acyrthosiphon pisum
MANEVYIVSAVRTPIGSFGGSLSSLKAHQLGCIVITEVLKRANVNSNEVSEVILGQALTAGQGQNPARQASINAGIPITVPAHVINMLCGSGLKAVVHGYQSIKCGDSSIVIAGGQESMSNAPHVVNLRSGIKMGNTELIDTMLYDGLTDAFNNIHMGITAENIAEQYNISRELQDNYAFESQKRTAEAQKNGYFKDEITPVEVKIRRNTIVFDTDEYPKNDSTLNSLSALRPVFKPNGGVVTAGNASGINDGAAAVLLMNGEECKKRGCTPLAKIVAHAECGVDPKIMGTGPIPAVLKTIEKAGWTMDSVDIFELNEAFAAQSIAVVRDLGLNSDKVNIYGGAIALGHPIGASGARVLVTLVHILLRTGKKRGIASLCVGGGMGIAVAVETL

SEQ ID NO: 2715 - DNA, 1182 bp, Acyrthosiphon pisum
  CDS (1)..(1182)
atgagagatgtttttattgtcagtgctactagaactccaattggttcttttggtggatcattgaagagtctttctgctactaaactgggtgctatagctatacaggctgccgttgagcgatctggaatttcaaaagatgaaattcaggaagtttttatgggaaatgtatgtcaaggtggtgttggacaagcgccagcaagacaagcagcaatatttgctggattacctaaatcaactatatgtaccacaataaataaagtctgtgcttccggaatgaagtcgatcatgttggcttctcagagtctgatatgtggtcatcaacaaatagtagttgccggtggcatggaatctatgtccaatgtaccattttatctagctagaggagaaacaaaatatggcggtgtgaatttatctgacggaattgtgtttgatggcttaactgatgtatacaataaagttcacatgggcagttgtgccgaaaatacagctaaacaatgtggcataagtagaatacagcaagatgattttgctttaagcagttacaaaaaaagtgctgatgcgtggaaacaaggacactttgctcaagaaattgttccagtcaatgttcctcaaaaaagaggtatcaagtgtaaacctgatattgttgtgtccgaagatgaagaattcaaaagaatagatttcgaaaagttcaaaaaattaaatacggtttttcaaaaagaaaatggaactgttactgctggaaatgcatcaacgattaatgatggagctgcagctttagttttgacaaatgaaaatgttgtaaaagaattaaatttaaaacctttagctagagtagttgcatttcaagatggtgctactgatcctattgattttcctattgctccagcatttgctatacccaaattgttaagcaaaagtggtatatcgaaagatgacattgcgttgtgggaaataaatgaagctttcagtgtagtggttttagctaatataatgaaattaaatctcgatccatctaaaatcaatgtacatggtggagctgttagcttaggtcatccaatagggatgtctggtgccaggattgtggtgcacttggcttatgcattaaaaccaggacaaaagggtgtagcttctatttgtaatggtggtggtggagcatcatcaattctaattgaacgattataa

SEQ ID NO: 2716 - protein, 393 aa, Acyrthosiphon pisum
MRDVFIVSATRTPIGSFGGSLKSLSATKLGAIAIQAAVERSGISKDEIQEVFMGNVCQGGVGQAPARQAAIFAGLPKSTICTTINKVCASGMKSIMLASQSLICGHQQIVVAGGMESMSNVPFYLARGETKYGGVNLSDGIVFDGLTDVYNKVHMGSCAENTAKQCGISRIQQDDFALSSYKKSADAWKQGHFAQEIVPVNVPQKRGIKCKPDIVVSEDEEFKRIDFEKFKKLNTVFQKENGTVTAGNASTINDGAAALVLTNENVVKELNLKPLARVVAFQDGATDPIDFPIAPAFAIPKLLSKSGISKDDIALWEINEAFSVVVLANIMKLNLDPSKINVHGGAVSLGHPIGMSGARIVVHLAYALKPGQKGVASICNGGGGASSILIERL

SEQ ID NO: 2717 - DNA, 1194 bp, Acyrthosiphon pisum
  CDS (1)..(1194)
atggctttggcaaaaggtgtttttattgtggctgctaagagaactccttttggttcatacggtggtaagtttgtgaaaacttcatctactgaactgcaaatagtagctgcaaaagctgcactcgcagctggtaatgtagaccctaaaattgttgattcagttataattggaaatgttttaatgaactcgtcttcagatggtgcatttttaccaagacatgtattactccattgtggaatcccactagatcgtcatgcattaggtgtcaacagattgtgtggatctggattccagtccattgttaacggagcacagagtatcatgtgtggtgaatctaatgttgtattgactggaggagtagacagcatgagtcagtccccacatgttgttcgtaatgcccgttttggtatacccctcggagcatcctatgtctttgaagacagtctgtggactggattaactgatacatattgtaaattgccaatggccttgactgcagaaaaattagctgaagtgtacaaaatcaccagacaaggagtagacgaatttgctttgcgttcacaaacgctatggaaaaaagcacaagataacaatgtattcagtgctgaattagctcctgtgaccataaaagtgaaaagagcagatgtagttgttgatgttgatgaacacccaaagccaaagactactcttgaaacattaggaaaattgcctacagtttttaaaaaggacggagttgtaactgctggttcagcatctggtatatgtgatggtgcaggagctgtcatattagctagtgaagaagcattgaaaaaacattcactgactccattggcaagattagttggttactcagtagtaggtgttgacccaagcataatgggtattggcccagctccatcaatttcaaaattattgagcctttctggaaaaacccttaatgatattgatttagttgagattaatgaggcatttggagctcaaactcttgcttgccaaaaagaattgaaacttgacattgaaaagcttaatgttaatggtggtgctattgcaatcgggcatccattggcagcatcaggagccagaattactagtcatcttgtccatgaactaattcgtaaaaatcttaaatatggaattggttctgcttgtattggaggaggtcaaggtatagctctcttggttgagaaagtataa

SEQ ID NO: 2718 - protein, 397 aa, Acyrthosiphon pisum
MALAKGVFIVAAKRTPFGSYGGKFVKTSSTELQIVAAKAALAAGNVDPKIVDSVIIGNVLMNSSSDGAFLPRHVLLHCGIPLDRHALGVNRLCGSGFQSIVNGAQSIMCGESNVVLTGGVDSMSQSPHVVRNARFGIPLGASYVFEDSLWTGLTDTYCKLPMALTAEKLAEVYKITRQGVDEFALRSQTLWKKAQDNNVFSAELAPVTIKVKRADVVVDVDEHPKPKTTLETLGKLPTVFKKDGVVTAGSASGICDGAGAVILASEEALKKHSLTPLARLVGYSVVGVDPSIMGIGPAPSISKLLSLSGKTLNDIDLVEINEAFGAQTLACQKELKLDIEKLNVNGGAIAIGHPLAASGARITSHLVHELIRKNLKYGIGSACIGGGQGIALLVEKV

SEQ ID NO: 2719 - DNA, 1266 bp, Acyrthosiphon pisum
  CDS (1)..(1266)
atgcgattggtcgatgcggcaagtattttcgtgttggattcgttgaaatttacaattcaagtccaaattaattactcatttaacatggccaatgaagtttacattgtttctgctgttcgtacaccgataggttcgtttggcggttcattgtcgtttctgaaagctcatcaattaggctgcatagtgatttcagatgttcttaaaagagctaatgtcaatgcaaatgaagtatctgaagttattcttggacaggcccttacagctggacaaggtcagaatccagctagacaagcttcaattaatgctggaattccaatcactgtacccgctcatgtcatcaacatgctctgtggatctgggctgaaggctgtggtttgtgggtaccaggcaatcaaatgtggagattcttcaattgtaatttcaggtggtcaagagagtatgagcaactctcctcatgttgtcaatatacgatctgggattaaaatgggtaacgcagaattgacagatacaatgctatgcgatggactgatagacgcattcgacaacatacatatgggcatgactgctgaaaatattgctgaagagtatgatatttcgagggaacttcaagacagctatgctttggagtctcagaaacggacagctgaagctcaaaaaaatggttacttcacagatgaaataacaccagttgagctaaaagtacgacgaaatacaatcatatttgacacagatgaatatccaaaaaatgatactacgttatattcattagctgcattgaagcctgtttttaaattgaatggtggtgtagttactgctggaaatgcttcaggaataaacgatggtgctgctgttgtacttctaatgaacgaagaagaatgcaaaaaacgaggttgtattccattggctaaaattgtagctcacgctgagtgtggggttgatccaaaaataatgggtactggaccaatacctgcagtgttgaagactattgaaaaagctggttggacaatggatagcgttgatatttttgaattaaatgaagcgtttgctgcacaatcaattgctgtagtgcgggatttaggtttaaatccagatagagtgaatatcaatggaggtgcaattgcattgggtcatcctattggagcatctggtgctcgagtattggtaacactggtgcatgtcttgttgagaaccggcaaaaaacgaggcattgcatccttatgtgttggcggaggtatgggtattgctgtggccatcgagacagtttaa

SEQ ID NO: 2720 - protein, 421 aa, Acyrthosiphon pisum
MRLVDAASIFVLDSLKFTIQVQINYSFNMANEVYIVSAVRTPIGSFGGSLSFLKAHQLGCIVISDVLKRANVNANEVSEVILGQALTAGQGQNPARQASINAGIPITVPAHVINMLCGSGLKAVVCGYQAIKCGDSSIVISGGQESMSNSPHVVNIRSGIKMGNAELTDTMLCDGLIDAFDNIHMGMTAENIAEEYDISRELQDSYALESQKRTAEAQKNGYFTDEITPVELKVRRNTIIFDTDEYPKNDTTLYSLAALKPVFKLNGGVVTAGNASGINDGAAVVLLMNEEECKKRGCIPLAKIVAHAECGVDPKIMGTGPIPAVLKTIEKAGWTMDSVDIFELNEAFAAQSIAVVRDLGLNPDRVNINGGAIALGHPIGASGARVLVTLVHVLLRTGKKRGIASLCVGGGMGIAVAIETV

SEQ ID NO: 2721 - DNA, 1179 bp, Drosophila ananassae
  CDS (1)..(1179)
atgtctgacgtgtatatcgtgtccgctgcccgaacgcccataggtagcttcaatggatcgctttctaaattaaaagcctccgatcttggcagtgtggtaatacaggaggtgctgcgaagggccaatgtatctggccagaaggtcagcgaggttatcatgggccaggctctcactgcgggtcagggtcaaaatacagctcggcaagcttcactcaaggcgggtctgcccatccaggttccagcttatggaatcaatatgctctgtggttccggcttgaaaactgttgcattgggctaccaggccattagatccggcgatgccacgattgtggtggctggtggtcaggagagtatgtcacttgctcctcatgtgatgctcctaagacagggaataaaaatgggtcctggtacgcttgtggattctatgatccacgacggcctgaccgatgccatggagaacattcacatgggcataactgcagagaacctggtcgagcagtacaaaatcagtcgggaggagcaggatgcttacgctgtaaagtcacagaaccgagcggaagaggcgcagaagaatggtttctttgacaaggagattgttccagttgaaatcaaggatcgcaagggcactcaaatattcaacaaggatgagtacatcaagcccggaagcaccgtcgagggtatccagaagctgagagcaacttttaaagagggaggctcgattacgcccggcaatgcgtctggtgtcaacgactcagccgctgctgtgcttctcgcttcggccgaggaggtggctaagaatggtttaaaacccctggctaagattgtgggctggacgcagactggcattgagcccagggttatgggtcttggaccagttacagctgtggaagcattgctttctaaaatcggctggaagcgggaagaagtggatttgtacgagctcaatgaagccttcgcggcccaatccctggctgtactccaagatctgaaactggacgccagcaaagtgaacataaatggtggcgccattgcccttggccatcccattggagcctctggggctcgagtcctggtgactctgctctacgccttggaaagaaccggcggacgtcgcggaatcgcctccttgtgcattggcggcggcatgggaatcgccttggctgtagagcgcatcgtctaa

SEQ ID NO: 2722 - protein, 392 aa, Drosophila ananassae
MSDVYIVSAARTPIGSFNGSLSKLKASDLGSVVIQEVLRRANVSGQKVSEVIMGQALTAGQGQNTARQASLKAGLPIQVPAYGINMLCGSGLKTVALGYQAIRSGDATIVVAGGQESMSLAPHVMLLRQGIKMGPGTLVDSMIHDGLTDAMENIHMGITAENLVEQYKISREEQDAYAVKSQNRAEEAQKNGFFDKEIVPVEIKDRKGTQIFNKDEYIKPGSTVEGIQKLRATFKEGGSITPGNASGVNDSAAAVLLASAEEVAKNGLKPLAKIVGWTQTGIEPRVMGLGPVTAVEALLSKIGWKREEVDLYELNEAFAAQSLAVLQDLKLDASKVNINGGAIALGHPIGASGARVLVTLLYALERTGGRRGIASLCIGGGMGIALAVERIV

SEQ ID NO: 2723 - DNA, 1179 bp, Drosophila erecta
  CDS (1)..(1179)
atgtctgacgtgttcatcgtgtccgccgcccgcactcccattggtagcttcaatggaacgctttctaaactgaaggcctccgatctgggcagcgtggtgatccaggaggtgctccggcgggcgaatgtgcagggccaggaagtgaacgaagtcatcttgggccaggcactaagtgccggtcagggtcagaatcccgcacggcaggcttcactcaaggctggtctgcccattcaggtacctgcctacggcatcaatatgctgtgtggttccggtttaaaaactgtggcgctgggctaccaggccatccgctcgggagatgcacagattgtggtggcaggaggtcaggagagcatgtccctggctccacacgtcatgcatctgcggcagggcgtcaaaatgggttcgagcacgatggtggacacgttgatccacgacggcctgaccgatgccatggagaacatacacatgggcatcaccgccgaaaatctggccgataaataccaaatcagtcgcgaagcccaggatgcttatgccgtgctgtcacaaaatcgagccgaggaggcccaaaataagggctacttcgacaaggagattgtgcccgtggagatcaaggatcgcaagggaacgatcacattcagcaaagatgagtacatcaaggcgggcagcaccgtcgagggtatacagaagctcagggcagccttcaaagagggcggctctataaccgctggtaatgcctctggtgtcaacgactccgctgctgcagtgctgctgatgtctggcgaggaggtggtcaagaagggccttaagccactggctaagattgtgggctggacgcagagtggcattgagccaaaggtgatgggactgggaccagtcaccgctgtcgaagcattgcttaaaaagattaactggaagcgcgaggaagtggatctctacgagctaaacgaagccttcgccgcccaatcactggctgtcctgcaggacctgcagctggatgctcaaaaagtaaatgtcaatggcggtgccattgccctgggccatccgattggagcttcaggtgcccgtgtcctagtcactttgctctatgcgctggagcgcacgggtggaagtcggggaattgcatcgctctgcatcggtggcggcatgggaatcgccctggccgtggagcgcatcaactag

SEQ ID NO: 2724 - protein, 392 aa, Drosophila erecta
MSDVFIVSAARTPIGSFNGTLSKLKASDLGSVVIQEVLRRANVQGQEVNEVILGQALSAGQGQNPARQASLKAGLPIQVPAYGINMLCGSGLKTVALGYQAIRSGDAQIVVAGGQESMSLAPHVMHLRQGVKMGSSTMVDTLIHDGLTDAMENIHMGITAENLADKYQISREAQDAYAVLSQNRAEEAQNKGYFDKEIVPVEIKDRKGTITFSKDEYIKAGSTVEGIQKLRAAFKEGGSITAGNASGVNDSAAAVLLMSGEEVVKKGLKPLAKIVGWTQSGIEPKVMGLGPVTAVEALLKKINWKREEVDLYELNEAFAAQSLAVLQDLQLDAQKVNVNGGAIALGHPIGASGARVLVTLLYALERTGGSRGIASLCIGGGMGIALAVERIN

SEQ ID NO: 2725 - DNA, 1179 bp, Drosophila grimshawi
  CDS (1)..(1179)
atgtctgacgtgtatattgtatctgcggcccgtactccaattggcagtttcaatggatcgctttccaaactaaaggcatccgatctgggcagcgtcgtcatcaaagaggtgctccaacgggccaaggtcgaggctcaacaagtcaacgaagtcatcatgggccagaccttgattgctgggcaaggtcagaatcccgcgcgacaagcatctctgaaagctggcctgcccatagacgtgcccgcctacggcatcaacatgctctgcggctccggactcaaaactgttgtgttgggttatcaggcgatacgtgctggagatgcacagattgtgattgctggcggacaggagaatatgtcgctggcgccgcacgtgatgcatttgcgtcagggcgtcaagatgggtcccggcacactggtcgattccatgctcaacgatggcctaacggatgccatggagcagatacacatgggcatcactgccgagaatctggccgagaagtatgacatctcccgaacgaggcaggatgccagcgcattggattcgcaacagcgtgcgacacaggcccagctggctggccactttgagcgggagattgtcgccgtcgagatcagggatcgatcgggcacggaactctttgccaaggacgagtacatcaagaccaactgcagcatcgagcaattgcaaaagttgcgttccgcttttaaggatggcggcaccgttactcccggcaatgcatccggcgttaatgatgccgccgcggccgtgctcctcatgtccggcgagcagctcaagcaacgcaatctgcagccgctggccaaaattgtgggctggacacaaacgggcctcgaacccaacttgatgggcctgggtccggttagcgctgtggaggcattgctcaccaagattggctggacacgcgacgatgtggatctgtacgagctgaacgaggcatttgccgctcaatcgctggccgtggtgcagtgcctccagctggatgccaacaaggtgaacattaatggtggcgccatcgccttgggtcatcccattggtgcgtcgggtgcccgtgttctggtcaccctgctctacgcgctggagcgcaccggcggacgacgtggcatcgcctccctctgcattggtggcggcatgggcatagccctggccgtggagcgcatcctctaa

SEQ ID NO: 2726 - protein, 392 aa, Drosophila grimshawi
MSDVYIVSAARTPIGSFNGSLSKLKASDLGSVVIKEVLQRAKVEAQQVNEVIMGQTLIAGQGQNPARQASLKAGLPIDVPAYGINMLCGSGLKTVVLGYQAIRAGDAQIVIAGGQENMSLAPHVMHLRQGVKMGPGTLVDSMLNDGLTDAMEQIHMGITAENLAEKYDISRTRQDASALDSQQRATQAQLAGHFEREIVAVEIRDRSGTELFAKDEYIKTNCSIEQLQKLRSAFKDGGTVTPGNASGVNDAAAAVLLMSGEQLKQRNLQPLAKIVGWTQTGLEPNLMGLGPVSAVEALLTKIGWTRDDVDLYELNEAFAAQSLAVVQCLQLDANKVNINGGAIALGHPIGASGARVLVTLLYALERTGGRRGIASLCIGGGMGIALAVERIL

SEQ ID NO: 2727 - DNA, 1410 bp, Drosophila mojavensis
  CDS (1)..(1410)
atgaatgtgcgaattattcaaaaccgaaaaaactttataactttaacaaactttctgcgatcacatggatgccggcacttgtccgtccaggctgcggctcagcctaaacgaaatgctaacactcaaaatatagtgcttgtcgatggcgtacgtacgccttttctgacttctggtacatcatactcgaatttaatgccacatgaactggccaggcattccttgctctcactgttgcaaaagactcgactggacaaggaacttgttgattatattgtctatggcaccgttatacaggaggtgaaaacttccaatattggccgcgaggcggcgctttcagctggcttcagcgataagacacctgcgcatacagttacaatggcttgcataagctcaaatgcggcaattacaactggcatgggtcttattgctacgaatacatatgacgtgatcgttgctggcggcgttgagtttatgtctgatgtaccaattcgtcattcgcgtaaaatgcgttcattgatgctgaaagcgaacaaggctaagacgctaggacagcgcctggctttgctgtcgacattcagaccaggtttcttggcgcctgaattgccagctgttgccgaattttcgtctggcgagactatgggacactccgctgatcgtctggcctccgcatttaatgtcactcgtaaagagcaggatgactacgctttgaggtcccatgttatggctaagaaggctcaggaaagtggatactttacggatttggtgcccttcaaggtgcgaggcgttgatcaagtcgtcgacaaggacaacggcattcgtgtgtcaacacctgaaagtttggccaaacttaagccagcttttgtgaaaccctatggcacaattactgcggccaacgcttcctttttgtccgatggcgcttcagcttgtctcataatgacagaggagaaggcaaagcaattgggcttaaagccaaaggcatatctacgtgatttcctctatgtctctcaagatcctgttaatcaactcttattgggtcctgcctatggcataccaaaacttctcaagaaagctggactcacacttaaagatattgatagttgggaaattcatgaagcttttgctggtcagattgttgccaatttgaaagctttggattctgattggttctgtaaaacatatctgggtctcagcgaaaaggtcggaactcccgatttgtccaagtggaacaactggggtggatccctgtcgatcggtcatccatttgctgccacaggcgttcgtctatgcatgcacacggccaatcgcctggtccgtgaggatggcaagctgggtgtggttgccgcgtgtgccgccggtgggcaaggcgtggccatgcttctcgagcgttatcctggagcaacggctgactga

SEQ ID NO: 2728 - protein, 469 aa, Drosophila mojavensis
MNVRIIQNRKNFITLTNFLRSHGCRHLSVQAAAQPKRNANTQNIVLVDGVRTPFLTSGTSYSNLMPHELARHSLLSLLQKTRLDKELVDYIVYGTVIQEVKTSNIGREAALSAGFSDKTPAHTVTMACISSNAAITTGMGLIATNTYDVIVAGGVEFMSDVPIRHSRKMRSLMLKANKAKTLGQRLALLSTFRPGFLAPELPAVAEFSSGETMGHSADRLASAFNVTRKEQDDYALRSHVMAKKAQESGYFTDLVPFKVRGVDQVVDKDNGIRVSTPESLAKLKPAFVKPYGTITAANASFLSDGASACLIMTEEKAKQLGLKPKAYLRDFLYVSQDPVNQLLLGPAYGIPKLLKKAGLTLKDIDSWEIHEAFAGQIVANLKALDSDWFCKTYLGLSEKVGTPDLSKWNNWGGSLSIGHPFAATGVRLCMHTANRLVREDGKLGVVAACAAGGQGVAMLLERYPGATAD

SEQ ID NO: 2729 - DNA, 1179 bp, Drosophila mojavensis
  CDS (1)..(1179)
atgtctgacgtatatatcgtgtccgcagcgcgtacgcctattggcagcttcaatggaacactttctaaattgaaggcctcagatttgggcagcgtggtcatcaaggaggtgttgaagcgtgctcatgtcgaggcgccgcaagtgaacgaagttattatgggccaggcattgaccgcaggccaaggccagaatcccgctcgccaagccgctctgaatgccggtttgcctattgaggttcccgcttatggtatcaatatactgtgcggatcgggtttaaaaactgtggtgctgggttatcaggcgatacgttcaggtgacgctaagattgttattgccggcggccaggagagcatgtccagtgctccacatgtagtgcatctccgtcagggcattaaaatgggtcctgcaacgttgctggacaccatggttcacgatggcctcaccgatgccatgaatcaaatacatatgggcatcactgccgaaaacttggcagagaagtaccaaatcagccgcgaagctcaggatgctcaagccttgcaatcgcagcaactcgccgagcaagcccagaagctgggctactttgatgctgagattgtgccagtcgagatcaaggatcgcaagggcacacaaatattcagcaaagatgaatacatcaaagcgggcagcactttggagggcttgcaacggctgcgacctgccttcaaagagggcggcaccgtcacagctggcaatgcatcgggtgtcaacgattcagctgcagcggtgctgctcatgtccggtgaagaagttaacaaacgcggtctgaaacctcttgccaaaattattggctggacacagagcggtattgaacccaatgtcatgggcctgggtccagtgactgccgtggaatcattgctaactaaaattggctggactcgtgatgacgtggatctatatgagcttaacgaggcctttgctgcgcaagctctagccgtggtgaagtgcctcaagttggatgagaaaaaagtgaatgtgcatggcggcgccattgccctgggccatccaattggtgcgtccggcgctcgcgttctagtgaccttgttgtatgccctggagcggacaggcggacgacgtggcatcgcctcactgtgcattggcggcggcatgggcattgcactggccgtagagcgcatcatctaa

SEQ ID NO: 2730 - protein, 392 aa, Drosophila mojavensis
MSDVYIVSAARTPIGSFNGTLSKLKASDLGSVVIKEVLKRAHVEAPQVNEVIMGQALTAGQGQNPARQAALNAGLPIEVPAYGINILCGSGLKTVVLGYQAIRSGDAKIVIAGGQESMSSAPHVVHLRQGIKMGPATLLDTMVHDGLTDAMNQIHMGITAENLAEKYQISREAQDAQALQSQQLAEQAQKLGYFDAEIVPVEIKDRKGTQIFSKDEYIKAGSTLEGLQRLRPAFKEGGTVTAGNASGVNDSAAAVLLMSGEEVNKRGLKPLAKIIGWTQSGIEPNVMGLGPVTAVESLLTKIGWTRDDVDLYELNEAFAAQALAVVKCLKLDEKKVNVHGGAIALGHPIGASGARVLVTLLYALERTGGRRGIASLCIGGGMGIALAVERII

SEQ ID NO: 2731 - DNA, 1179 bp, Drosophila persimilis
  CDS (1)..(1179)
atgtctgacgtgtacattgtgtccgcagcccgcacgcctataggtagcttctgtgaaacgctttctaaactgaaagcctccgatctgggcagcgtggtcatccaggaagtgctcaagcgggcgagtgtggagcccgaaaatgtcaacgaagtcatcatgggtcaggcgctcactgcgggtcagggccagaaccccgctcgtcaggcctctctcaaggcgggcctccccattcaagtgccagcctatggcatcaatatgctctgtggttcaggtctcaaaaccgttgtcctgggctatcagtccattcgttctggggatgccaacatcgtaattgctggcggccaggagagcatgtccctggctccccatgtcatgcatttgcggcagggtgtgaaaatgggctcgagcagctttgttgattcgatgctccatgacgggctcacagatgccatggagaacatccacatgggcgtcaccgcagagattctcgccgagaaatataacctgagtcgggaggcccaggactcgtacgccgttcagtcacagacacgggcagaggaggcccagcaaaagggctactttgacaaggagattgtccccgtggagatcaaggatcgaaagggcactcaaatctttagcaaggatgagtacatcaaggcgggcagcactgtcgagggcgtgcagaagctgagggccgccttcaaggagggcggcaccgttaccgctggcaatgcttcgggtgtgaatgattccgctgccgccgtcctgctgatgtccggcgaggaggtcaccaaaaagggtctgaaaccgctggccaagattgtgggttggacgcagagtggaatcgagcccagggtcatgggtctgggaccggttacagctgtggaagccttgttgacgaaaatctcgtggaaacgcgacgaagtcgatctgtatgagctgaacgaagcctttgctgcccaatccctggctgtgctaaaggatctgcagttggatgccagcaaagtgaatgtgaacggaggtgcgattgctttgggccatccgattggtgcctcgggtgcccgtgtccttgtcacgctgctctatgccttggagcgcactggcggtcgtcgtggtatcgcctccctctgcatcggtggcggcatgggcattgctgtggccatcgagcgtgtcgtctaa

SEQ ID NO: 2732 - protein, 392 aa, Drosophila persimilis
MSDVYIVSAARTPIGSFCETLSKLKASDLGSVVIQEVLKRASVEPENVNEVIMGQALTAGQGQNPARQASLKAGLPIQVPAYGINMLCGSGLKTVVLGYQSIRSGDANIVIAGGQESMSLAPHVMHLRQGVKMGSSSFVDSMLHDGLTDAMENIHMGVTAEILAEKYNLSREAQDSYAVQSQTRAEEAQQKGYFDKEIVPVEIKDRKGTQIFSKDEYIKAGSTVEGVQKLRAAFKEGGTVTAGNASGVNDSAAAVLLMSGEEVTKKGLKPLAKIVGWTQSGIEPRVMGLGPVTAVEALLTKISWKRDEVDLYELNEAFAAQSLAVLKDLQLDASKVNVNGGAIALGHPIGASGARVLVTLLYALERTGGRRGIASLCIGGGMGIAVAIERVV

SEQ ID NO: 2733 - DNA, 1179 bp, Drosophila sechellia
  CDS (1)..(1179)
atgtctgacgtgttcatcgtatccgccgcccgcacgcccattggtagcttcaatggaacgctttctaaactgaaggcctccgacctgggcagcgtggtaatccaggaggtgctccggcgggcgaatgtggagggccaggaggtcaacgaagttatcttgggccaggctctaagctccggtcagggtcagaatcccgcacgtcaggcttcactcaaggcgggtctgcccattcaggtgccagcctacggcatcaacatgctctgtggttccggtttaaaaaccgtagcgctgggttaccaggccatccgctcgggagactcacagattgttgtggcgggaggtcaggagagcatgtccctggctccacacgtcatgcatctgcggcagggtatcaaaatgggtccgggcactatggtggactcgatgatccacgacggcctgaccgatgccatggagaacatacacatgggcattaccgccgagaatctggccgataagtatcacatcagtcgtgaggcacaggatgcctatgccgtgctgtcgcaaaatcgggctgaggaggcccaaaaaaagggttacttcgacaaggagattgtgcccgtggagatcaaggatcgcaaggggacgaccacattcagcaaggatgagtacatcaaggcgggcagcaccgtcgagggtatacagaagctcagggcagccttcaaagagggcggctccataaccgctggcaatgcctcaggcgtcaacgactccgctgctgcagtactgctgatgtccggcgaggaggtggccaggaagggccttaagccgctggctagaattgtgggctggactcagagtggcattgagccaaaggtgatgggactgggaccagtcactgctgtggaagcattgcttaaaaagatcaactggaagcgcgaggaagtggatctttacgagctgaacgaagcattcgccgcccaatcactggctgtcctgcaggacctgcagctggatgctcagaaagtaaatgtcaatggcggtgccattgccctgggccacccgattggagcttcaggtgcccgagtcttggtcactttgctctatgcgctggagcgcaccggtggaagtaggggaatcgcatcgctctgcatcggcggcggcatgggaatcgccctggccgtggagcgcctcagctag

SEQ ID NO: 2734 - protein, 392 aa, Drosophila sechellia
MSDVFIVSAARTPIGSFNGTLSKLKASDLGSVVIQEVLRRANVEGQEVNEVILGQALSSGQGQNPARQASLKAGLPIQVPAYGINMLCGSGLKTVALGYQAIRSGDSQIVVAGGQESMSLAPHVMHLRQGIKMGPGTMVDSMIHDGLTDAMENIHMGITAENLADKYHISREAQDAYAVLSQNRAEEAQKKGYFDKEIVPVEIKDRKGTTTFSKDEYIKAGSTVEGIQKLRAAFKEGGSITAGNASGVNDSAAAVLLMSGEEVARKGLKPLARIVGWTQSGIEPKVMGLGPVTAVEALLKKINWKREEVDLYELNEAFAAQSLAVLQDLQLDAQKVNVNGGAIALGHPIGASGARVLVTLLYALERTGGSRGIASLCIGGGMGIALAVERLS

SEQ ID NO: 2735 - DNA, 1197 bp, Drosophila sechellia
  CDS (1)..(1197)
atgtctgccgcaaccaaaggtatctatattgtggctgccaagcgtacggccttcggaaccttcggtggatccttgaagggcatcaaccagacccagttgcagaccacggcggccaaggctgctctggatgctgccggccttaagggtgagcaggtggacaccgtcatcgtgggaaatgtgattgcgtcctcctccacggatggtatttatgtgccccgtcatgtgggtctcaactgcggtgtgcccatcgagaagcccgcccttgcaatcaaccggctttgcggttccggcttccagtcgatcgtcaacggtgcccaggacatcctggtcggtggtgccaagatagcccttaccggcggcgtggagaacatgtcacagagcccttttattgcccgtaatgtcagattcggaaccaccttaggtgtcaactacaatctggaggatgctctgtgggctggcctcaccgatacctactgcaagctgcccatggctctgaccgctgagaacctggccgatcagtacaagatcagtagggagcgtgtggatgaattctctctgctctcgcaaaggaactgggagaagggtcagaaggagggagcattcaatgccgagatcacacccatcaaacttaaggtcaagggaaaggaagtggactttgtggtggacgagcacccacgtcccaagaccaccatcgagggtctgaacaagttgccttcgctgtttaagaagaacggcgttgtgactgccggaactgcatccggaatctgtgatggtgcctccgcagtgatcgtggcctcggaggaggcgcttaaggagtacaacctgaagcccctggcccgtctagtggccttctcctttgtcggagttaagcctgagatcatgggcattggcccagtacccgccattcagaacgtcctgaaggtttccggcaagaaactggaggatattgatctgattgagatcaacgaagcctttgctgcccagacattggcctgtgccgatgccctgaagttggatccctccaaactgaatgtgaacggaggcgccattgccttgggccatcctctgggtgccagtggctctcgcatcactggtcatctggttcatgagttgcagcgcaagaagctgaagtacggcattggatccgcgtgcattggtggtggtcagggcatcgcccttctcctcgaggctgtctaa

SEQ ID NO: 2736 - protein, 398 aa, Drosophila sechellia
MSAATKGIYIVAAKRTAFGTFGGSLKGINQTQLQTTAAKAALDAAGLKGEQVDTVIVGNVIASSSTDGIYVPRHVGLNCGVPIEKPALAINRLCGSGFQSIVNGAQDILVGGAKIALTGGVENMSQSPFIARNVRFGTTLGVNYNLEDALWAGLTDTYCKLPMALTAENLADQYKISRERVDEFSLLSQRNWEKGQKEGAFNAEITPIKLKVKGKEVDFVVDEHPRPKTTIEGLNKLPSLFKKNGVVTAGTASGICDGASAVIVASEEALKEYNLKPLARLVAFSFVGVKPEIMGIGPVPAIQNVLKVSGKKLEDIDLIEINEAFAAQTLACADALKLDPSKLNVNGGAIALGHPLGASGSRITGHLVHELQRKKLKYGIGSACIGGGQGIALLLEAV

SEQ ID NO: 2737 - DNA, 1179 bp, Drosophila virilis
  CDS (1)..(1179)
atgtctgacgtgttcattgtgtctgcggcgcgaacgcccattggcagcttcaatggaacactttctaaactgaaggcatccgatctgggcagcgtggtcatccaggaggtgctgaagcgtgccaatgtcgaggcgccgcaagtcaatgaagtcatcatgggccaggcactgacggcaggtcaaggtcagaatcccgcccgccaggccgcactcaaagctggcctgcccatcgaggtgcccgcctatggcatcaatatgctctgcggctcgggtctgaaaaccgtcgcattgggctaccaggcgatacgcacgggcgatgcacagatcgttattgctggcggccaggagagcatgtccctggcaccgcatgtcatgcatctgcgccagggcgttaaaatgggcgctggcacgctactggactccatgctcaacgatggcctgaccgatgccatggagaacatacacatgggcatcacagccgagaatctggcggagaagtatcaaataagccgcgaggcccaggatgcctatgcggtgcagtcgcagcagcgcgccgaactggcacagcagcagggctattttgacgccgagattgtgcccgtcgagatcaaggatcgcaagggcacacagctatttagcaaagacgagtacatcaagagcggcagcaatgtggagggcctgcaaaagttgcgtgccgccttcaaggagggcggcaccatcacacccggcaatgcatccggcgttaacgattcggctgcagcgctactgctcatgtccggcgaggagcttaacaagcgcggcctcaagccactggccaaaattgtcggctgggcacagactggcattgagcccaaagtcatgggcctgggtccagtgtccgctgtggaagcactgctgaccaaaatcggctggagccgtgatgaagtggatctctatgagctgaacgaagcgtttgccgctcagtcgctcgccgtgcttcagtgccttcagctggatgccagcaaagtgaatgtgcatggcggcgccattgcactgggccatcccattggcgcctcgggcgcacgtgtcctggtcacattgctctacgccctgcagcgtactggcggacgtcgcggcatcgcctcgctatgcattggcggcggcatgggcatcgctctggccgttgagcgcatcatctaa

SEQ ID NO: 2738 - protein, 392 aa, Drosophila virilis
MSDVFIVSAARTPIGSFNGTLSKLKASDLGSVVIQEVLKRANVEAPQVNEVIMGQALTAGQGQNPARQAALKAGLPIEVPAYGINMLCGSGLKTVALGYQAIRTGDAQIVIAGGQESMSLAPHVMHLRQGVKMGAGTLLDSMLNDGLTDAMENIHMGITAENLAEKYQISREAQDAYAVQSQQRAELAQQQGYFDAEIVPVEIKDRKGTQLFSKDEYIKSGSNVEGLQKLRAAFKEGGTITPGNASGVNDSAAALLLMSGEELNKRGLKPLAKIVGWAQTGIEPKVMGLGPVSAVEALLTKIGWSRDEVDLYELNEAFAAQSLAVLQCLQLDASKVNVHGGAIALGHPIGASGARVLVTLLYALQRTGGRRGIASLCIGGGMGIALAVERII

SEQ ID NO: 2739 - DNA, 1179 bp, Drosophila willistoni
  CDS (1)..(1179)
atgtctgacgtgtttattgtttctgcagcccgcacgcccattggtagttttaatggaacgctttctaaactgaaagcctccgatcttgggagtgtagtgataaaagaggtgcttaaaagatccaatgtagaggctcatcaggttaatgaggtcatcatgggtcaggcgctgacagcaggccaaggccaaaatccggcacgccaggcatcgctcaaagctggcctgcccattcaagttcctgcgtttaatattaacatgctttgcggttctggactaaagactgtgactttgggttaccaggccatacgttcgggtgatgccagcatagttatcgctggtggtcaagaaaatatgtcgctggctcctcacaccatttatctgcggcagggcgtaaaaatgggtcctggcactatggtggactctatggttaatgatggcctcactgatgccatggagaatatacatatggggattactgctgaaaatctggcagataaatttacaataagtcgggaagctcaggatgcctatgccgtggagtcgcagaagcgagcggaaaccgctcaagttaaaggatattttgacaaggagattgttccagttgaaattaaggatagaaagggtacacaaatatttagcaaagatgagtacatcaaaaccgactgtagtattgagagtctgcaaaagttaagggctgtcttcaaggagggaggaaccatcactgcaggcaatgcctctggagttaatgactcagctgcagctgtattgttaatgtcaggcgagcaggtagccaagtcaggccaaaaaccgctggccaggattgtgggctggtctcaaagtggcatcgagccaaatgtcatgggtttgggtcccgttcctgctgtggaatctttgctctcgaaaattggctggacaaaagaccaagtcgatctgtatgagctaaacgaggcatttgctgctcagtctctggctgtagtgcagggccttcaactggacgcgtcgaaggtaaatgtgaatggtggagccattgcattgggtcatcctattggtgcctcgggtgcacgtgtcctagttacactgctatatgcccttgaacgaacaggcggtcgtcgtggcgttgcctccctttgtattggcggcggcatgggcattgctctagctgttgagcgcgtcatctaa

SEQ ID NO: 2740 - protein, 392 aa, Drosophila willistoni
MSDVFIVSAARTPIGSFNGTLSKLKASDLGSVVIKEVLKRSNVEAHQVNEVIMGQALTAGQGQNPARQASLKAGLPIQVPAFNINMLCGSGLKTVTLGYQAIRSGDASIVIAGGQENMSLAPHTIYLRQGVKMGPGTMVDSMVNDGLTDAMENIHMGITAENLADKFTISREAQDAYAVESQKRAETAQVKGYFDKEIVPVEIKDRKGTQIFSKDEYIKTDCSIESLQKLRAVFKEGGTITAGNASGVNDSAAAVLLMSGEQVAKSGQKPLARIVGWSQSGIEPNVMGLGPVPAVESLLSKIGWTKDQVDLYELNEAFAAQSLAVVQGLQLDASKVNVNGGAIALGHPIGASGARVLVTLLYALERTGGRRGVASLCIGGGMGIALAVERVI

SEQ ID NO: 2741 - DNA, 1194 bp, Drosophila simulans
  CDS (1)..(1194)
atgtctgccgcgaccaaaggtatctatattgtggctgccaagcgtacggctttggaaccttcgtggatccttgaagggcatcaaccagacccacttgcagaccacggcggccaagctgctctggatgctgccggtcttaagggtgagcaggtggacaccgtcatcgtgggaaatgtgatcgcctcctcctccacggatggtatttatgtgccccgtcatgtgggtctcaactgcggtgtgcccatcgagaagcccgcccttggaatcaaccggctttgcggttccggcttccagtcgatcgtcaacggagcccaggacatcctggtcggtggtgccaagatagcccttaccggcggcgtggagaacatgtcacagagcccttttattgcccgtaatgtcagattcggaaccaccttaggtgtcaactacaatctggaggatgctctgtgggctggcctcaccgatacctactgcaagctgcccatggctctgaccgctgagaacctggccgatcagtacaagatcagtagggagcgtgtggatgaattctctctgctctcgcagaagaactgggagaagggccagaaggagggagcattcaatgccgagatcacacccatcaaacttaaggtcaagggaaaggaagtggactttgtggtggacgagcacccacgtcccaagaccaccatcgagggtctgaacaagttgccttcgctgtttaagaagaacggcgttgtgactgccggaactgcatccggaatctgtgatggtgcctccgcagtgatcgtggcctcggaggaggcgcttaaggagtacaacctgaagcccctggcccgtctagtggccttctcctttgtcggagtcaagcctgagatcatgggcattggcccagtacccgccattcagaacgtcctgaaggtttccggcaagaaactggaggatattgatctgattgagatcaacgaagcctttgctgcccagacattggcctgtgccgatgccctgaagttggatccctccaaactgaatgtgaacggaggcgccattgccttgggccatcctctgggtgccagtggctctcgcatcactggtcatctggttcatgagttgcagcgcaagaagctgaagtacggcattggatctgcgtgcattggtggtggtcagggcatcgcccttctcctcgaggctgtctaa

SEQ ID NO: 2742 - protein, 397 aa, Drosophila simulans
MSAATKGIYIVAAKRTALEPSWILEGHQPDPLADHGGQAALDAAGLKGEQVDTVIVGNVIASSSTDGIYVPRHVGLNCGVPIEKPALGINRLCGSGFQSIVNGAQDILVGGAKIALTGGVENMSQSPFIARNVRFGTTLGVNYNLEDALWAGLTDTYCKLPMALTAENLADQYKISRERVDEFSLLSQKNWEKGQKEGAFNAEITPIKLKVKGKEVDFVVDEHPRPKTTIEGLNKLPSLFKKNGVVTAGTASGICDGASAVIVASEEALKEYNLKPLARLVAFSFVGVKPEIMGIGPVPAIQNVLKVSGKKLEDIDLIEINEAFAAQTLACADALKLDPSKLNVNGGAIALGHPLGASGSRITGHLVHELQRKKLKYGIGSACIGGGQGIALLLEAV

SEQ ID NO: 2743 - DNA, 1179 bp, Drosophila simulans
  CDS (1)..(1179)
atgtctgacgtgttcatcgtgtccgccgcccgcacgcccattggtagcttcaatggaacgctttctaaactgaaggcctccgacctgggcagcgtggtaatccaggaggtgctccggcgggcgaatgtggagggccaggaggtcaacgaagtcatcttgggccaggctctaagcgccggtcagggtcagaaccccgcacgtcaggcttcactcaaggcgggtctgcccattcaggtgccagcctacggcatcaacatgctctgtggttccggtttaaaaaccgtagcgctgggttaccaggccatccgctcgggagacgcacagattgttgtggcgggaggtcaggagagcatgtccctggctccacacgtcatgcatctgcggcaaggcgtcaaaatgggtccgggcactatggtggactcgatgatccacgacggcctgaccgatgccatggagaacatacacatgggcatcaccgccgagaatctggccgataggtatcacatcagtcgtgaggcacaggatgcctatgccgtgctgtcgcaaaatcgggctgaggaggcccaaaaaaagggttacttcgacaaggagattgtgcccgtggagatcaaggatcgcaaggggacgaccacattcagcaaggatgagtacatcaaggcgggcagcaccgtcgagggtatacagaagctcagggcagccttcaaagagggcggctccataaccgctggcaatgcctcaggcgtcaacgactccgctgctgcagtactgcttatgtccggcgaggaggtggccaggaagggccttaagccgctggctaggattgtgggctggactcagagtggcattgagccaaaggtgatgggactgggaccagtcactgctgtggaagcattgcttaaaaagatcaactggaagcgcgaggaagtggatctttacgagctgaacgaagcattcgccgcccaatcactggctgtcctgcaggacctgcagctggatgctcagaaagtaaatgtcaatggcggtgccattgccctgggccacccgatcggagcttcaggtgcccgagtcttggtcactttgctctatgcgctggagcgcaccggtggaagtaggggaatcgcatcgctctgcatcggcggcggcatgggaatcgccctggccgtggagcgcctcagctag

SEQ ID NO: 2744 - protein, 392 aa, Drosophila simulans
MSDVFIVSAARTPIGSFNGTLSKLKASDLGSVVIQEVLRRANVEGQEVNEVILGQALSAGQGQNPARQASLKAGLPIQVPAYGINMLCGSGLKTVALGYQAIRSGDAQIVVAGGQESMSLAPHVMHLRQGVKMGPGTMVDSMIHDGLTDAMENIHMGITAENLADRYHISREAQDAYAVLSQNRAEEAQKKGYFDKEIVPVEIKDRKGTTTFSKDEYIKAGSTVEGIQKLRAAFKEGGSITAGNASGVNDSAAAVLLMSGEEVARKGLKPLARIVGWTQSGIEPKVMGLGPVTAVEALLKKINWKREEVDLYELNEAFAAQSLAVLQDLQLDAQKVNVNGGAIALGHPIGASGARVLVTLLYALERTGGSRGIASLCIGGGMGIALAVERLS

SEQ ID NO: 2745 - DNA, 1197 bp, Drosophila yakuba
  CDS (1)..(1197)
atgtctgccgcaaccaaaggtatctatattgtggctgccaagcgtacggccttcggaacctttggtggatccttgaagggcatcaaccagacccagttgcagaccaccgccgccaaggctgctctggatgctgccggtcttaagggtgagcaggtggacaccgtcatcgtgggaaatgtgattgcgtcctcctccacggatggtatctatgtgccccgtcatgtgggtctcaactgcggtgtgcccatcgagaagcccgcccttggaatcaaccggctttgcggttccggctttcagtcgatcgtcaacggagcccaggacatcctggtcggtggtgccaaggtggctctcaccggcggtgtggagaacatgtcccagagcccattcattgcccgtaacgtcaggttcggaaccaccttgggtgccaactacaatctggaggatgctctgtgggctggccttaccgatacctactgcaagctgcccatggctctgaccgctgagaatctcgccgatcagtacaagattagcagggagcgtgtggatgagttctctttgctctcacagaagaactgggagaagggccagaaggagggagcgttcaacgccgagatcacacccatcaaacttaaggtcaagggaaaggaagtggactttgtggtggacgagcatcctcgtcccaagaccaccattgagggcctgaacaagttgccttcgctgttcaagaagaacggcgttgtgacggccggaacagcatccggaatctgtgatggagcctccgctgtgattgtggcctcggaggaggcgcttaaggagtacaacctgaagcccctggcccgccttgtggccttctcctttgtcggagtcaagcctgagatcatgggcattggcccagtacccgccattcagaatgtcctcaaggtttccggcaagaaactggaggatattgatctgtttgagatcaacgaagcctttgctgcccagacattggcctgcaccgatgccctgaaactggatccctccaagctgaatgtgaatggtggcgccattgccttgggccatcctctgggagccagtggctctcgcatcactggtcatctggtgcatgagttgcagcgcaagaagctgaagtacggcattggatccgcctgtattggtggtggtcagggaatcgcccttctccttgaggctgtttaa

SEQ ID NO: 2746 - protein, 398 aa, Drosophila yakuba
MSAATKGIYIVAAKRTAFGTFGGSLKGINQTQLQTTAAKAALDAAGLKGEQVDTVIVGNVIASSSTDGIYVPRHVGLNCGVPIEKPALGINRLCGSGFQSIVNGAQDILVGGAKVALTGGVENMSQSPFIARNVRFGTTLGANYNLEDALWAGLTDTYCKLPMALTAENLADQYKISRERVDEFSLLSQKNWEKGQKEGAFNAEITPIKLKVKGKEVDFVVDEHPRPKTTIEGLNKLPSLFKKNGVVTAGTASGICDGASAVIVASEEALKEYNLKPLARLVAFSFVGVKPEIMGIGPVPAIQNVLKVSGKKLEDIDLFEINEAFAAQTLACTDALKLDPSKLNVNGGAIALGHPLGASGSRITGHLVHELQRKKLKYGIGSACIGGGQGIALLLEAV

SEQ ID NO: 2747 - DNA, 1179 bp, Drosophila yakuba
  CDS (1)..(1179)
atgtctgacgtgttcatcgtgtccgctgcacgcactcccattggtagcttcaatggtacgctttctaaactgaaggcatccgatctgggcagcgtggtgatccaggaggtgctccggcgggcgaatgtggagggccaggaggtcaacgaagtcatcttgggccaggcactaagcgctggtcagggccagaatcccgcacgccaggcttcgctcaaggctggtctgcccattcaggtgcctgcctacggcatcaatatgctgtgtggttccggcttaaaaactgtagcgctgggctaccaggccatccgctccggagatgcacagattgttgtggcaggaggtcaggagagcatgtccctggctccacacgtcatgcatctgcggcagggcgtcaaaatgggaccgggcaccttggtggacacgatgatccacgacggcctgaccgatgccatggagaacatacacatgggcatcaccgccgaaaatctggccgataaataccaaatcagtcgcgaagcccaggatgcctatgccgtgcagtctcaaaatcgagctgaggaggcgcaaaataagggctacttcgacaaggagattgtgcccgtggagatcaaggaccgcaagggaacgatcacattcagcaaggatgagtacatcaaggcgggcagcaccgtagagggtatacagaagctcagggcagccttcaaagagggcggctctataaccgctggtaatgcctctggtgtcaacgactccgctgctgcagtgctgctgatgtctggcgaggaggtggccaagaagggcctaaagccgctggctaagattgtgggctggacgcagagtggcattgagcccaaggtgatgggactcggaccagtcactgctgtcgaagcattgctcacaaagattaactggaagcgcgaggaagtggatctctacgagctaaacgaagccttcgccgcccaatcactggctgtcctacaggacctgcagctggatgcacaaaaagtaaatgtgaatggcggtgccattgcgctgggccatccgattggcgcttcaggtgcccgtgtcttagtcacgttgctctatgcgctggagcgcaccggtggcagtcggggaattgcatcgctctgcatcggtggcggcatgggaatcgccctcgccgtggagcgcctcaactag

SEQ ID NO: 2748 - protein, 392 aa, Drosophila yakuba
MSDVFIVSAARTPIGSFNGTLSKLKASDLGSVVIQEVLRRANVEGQEVNEVILGQALSAGQGQNPARQASLKAGLPIQVPAYGINMLCGSGLKTVALGYQAIRSGDAQIVVAGGQESMSLAPHVMHLRQGVKMGPGTLVDTMIHDGLTDAMENIHMGITAENLADKYQISREAQDAYAVQSQNRAEEAQNKGYFDKEIVPVEIKDRKGTITFSKDEYIKAGSTVEGIQKLRAAFKEGGSITAGNASGVNDSAAAVLLMSGEEVAKKGLKPLAKIVGWTQSGIEPKVMGLGPVTAVEALLTKINWKREEVDLYELNEAFAAQSLAVLQDLQLDAQKVNVNGGAIALGHPIGASGARVLVTLLYALERTGGSRGIASLCIGGGMGIALAVERLN

SEQ ID NO: 2749 - DNA, 1191 bp, Trichoplax adhaerens
  CDS (1)..(1191)
atggcacttgctcgtccagtctatcttgttgctgccaagcggacagcttttggaactttcggtggtgctttaaagaatttcaccgcaacagatttaggagtagtggctgcaacggcagctttgcaagccggcaatgtcgatcctacggtggtagactctgttgttgttggaaacgttgctcagacttcatcagatggaccttacatagccaggcatgttggactaaggagtggtgttaagattgaatcacccgctttaaccgtcaacagattatgtggttccggattccaggcgatagtaactggagtccaggagatacaaattggtgactctaagatcgtattaacggctggtgctgaaagtatgagccaagctccatacgcggtcagaggtacaagatttggaatccctcttggtgtcagcccgcagctggaggatacattatggcaaacgctgacagacaattacataaaaactcctatgggtataactgcagaaacgttagctgaaaaatatagcattagtggggaggaatgtaatcagtttgcggtacaatcgcagacacgctggtttgaagcaaacaaagatggaaaattcaaagacgaaattgaacccatgtctattaaaggtaaaaaagggccggaaaacttcgataccgatgagcatcctcgtatgacttcagtggaaaagttggctaaactgccaccagtttttaaaaagggtggaacagtgaatgctggcaatgcatctgggatctgtgatggtgcagcagctgtgatattagccagcgaacaagcagttaaagatcacaatttaactcctttagctcgacttgtcgcttacggtatagctggtgttgatcctcgtgtaatgggaattggacctgttccagcaatcaaatctgcattaagtaaatctggtttgagcctgaacgatatgtcattggttgaggttaatgaggcctttgctcctcaagcgcttgcagtaatgaaagaattggatttaaatcctgaaattactaacgtaaatggtggtgctatttcccttggtcaccctgtgggtgcctctggtgctcgcattgctggacacctaatctacgagttaaagagaagaagtgcaaagtatgcgatcgggtcggcctgcatcggtggtggtcaaggaatagctgttattttggaaaatttacaatag

SEQ ID NO: 2750 - protein, 396 aa, Trichoplax adhaerens
MALARPVYLVAAKRTAFGTFGGALKNFTATDLGVVAATAALQAGNVDPTVVDSVVVGNVAQTSSDGPYIARHVGLRSGVKIESPALTVNRLCGSGFQAIVTGVQEIQIGDSKIVLTAGAESMSQAPYAVRGTRFGIPLGVSPQLEDTLWQTLTDNYIKTPMGITAETLAEKYSISGEECNQFAVQSQTRWFEANKDGKFKDEIEPMSIKGKKGPENFDTDEHPRMTSVEKLAKLPPVFKKGGTVNAGNASGICDGAAAVILASEQAVKDHNLTPLARLVAYGIAGVDPRVMGIGPVPAIKSALSKSGLSLNDMSLVEVNEAFAPQALAVMKELDLNPEITNVNGGAISLGHPVGASGARIAGHLIYELKRRSAKYAIGSACIGGGQGIAVILENLQ

SEQ ID NO: 2751 - DNA, 1302 bp, Trichoplax adhaerens
  CDS (1)..(1302)
atggagagagttgataaaatcttcggccatttaaccaatcaaactgattccagcaaagctgtactggatttattgccaaccagtagtgcctccaaattttctcagcctcatcctgatgatgtcgtagttgtctctgccaaaagaacagcgatatgtaaagcaaatcgaggttcatttaaggacacacatccagcagacctactagcggcagcatttaatgctgtaatgaatgaaaccaaagttgatcctgaaattattggtgatatccaagttggaaatgttctccatactggttctggagcagtactcgctagaatgactcaattctattgtggattacccgagaccatccctctcagcacatgcaatcgtcagtgtgcgtcaggattgcaagcagttgctaatattatcggtgaaattaaaactggagcaattgacgttggcattggtgctggccttgaaaacatgacgctacaaaaagttgcggccgatgataccgttttatatccgaagctcttggaaaatgaattagcaaaggattgtttaatacctatgggaattacatctgaaaatgttgctcatcggtttggtataactagacaacaacaggatttcatgggttacttatctcaacagaaggctgctaaagcgctagaagaaggcaaatttaaagatgaaattattcctgtgaaaacccaaatcaaaatgaaaaatggcgaaactaaggagattctagttgataccgatgatggtatccgtaaaggcacaaccatggaaaccttagccaaactaaaaccagcttttaataaagatggttcaactactgcaggcaattcgagtcaaagaagtgacggagcggccgctgtcatgcttgctaaaagatcgactgcagaacgcttgggtctaccaattttagggaaatttattgcatacgcggtagccggtgtgccaccagacgttatgggcataggtccagcttttgctattccaaaagttatgaagatgaccgatttgtcctatgaagatgttgacatttttgaaatcaatgaagctttcgctagtcaagcgacgtattgtgtgcaaaagttaggtattcctttgaataaagtgaatcctaatggtggtgctattgctatgggtcatcctcttggatgtactggtgctcgtatggtagcaactctattacatgaactcaagcgtcgcgagaagagagcttatggtattgtctcaatgtgtatgggctctggcatgggagcagctgcaatatttgaacacaatcctgcggaatatcaacagcagtaa

SEQ ID NO: 2752 - protein, 433 aa, Trichoplax adhaerens
MERVDKIFGHLTNQTDSSKAVLDLLPTSSASKFSQPHPDDVVVVSAKRTAICKANRGSFKDTHPADLLAAAFNAVMNETKVDPEIIGDIQVGNVLHTGSGAVLARMTQFYCGLPETIPLSTCNRQCASGLQAVANIIGEIKTGAIDVGIGAGLENMTLQKVAADDTVLYPKLLENELAKDCLIPMGITSENVAHRFGITRQQQDFMGYLSQQKAAKALEEGKFKDEIIPVKTQIKMKNGETKEILVDTDDGIRKGTTMETLAKLKPAFNKDGSTTAGNSSQRSDGAAAVMLAKRSTAERLGLPILGKFIAYAVAGVPPDVMGIGPAFAIPKVMKMTDLSYEDVDIFEINEAFASQATYCVQKLGIPLNKVNPNGGAIAMGHPLGCTGARMVATLLHELKRREKRAYGIVSMCMGSGMGAAAIFEHNPAEYQQQ

SEQ ID NO: 2753 - DNA, 1197 bp, Hydra magnipapillata
  CDS (1)..(1197)
atgtcttcattggctcgctctgtttacattgtagcagcaaaaagaacaccatttggggcatttggaggagcttttaaagatatatctgccaccgttcttgctgagaaatcttctactgctgcattggtttcagttaatttagatccagtacatatacaatctgttatttttggcaatgtcattcagagttcatcagatgctgcttacttggcacgccatgtaggtttaaaggctggtgctccagtttcctctacagctcttacagtgaataggttatgtggctccggatttcaggctgtagtcaatgcagctcaggaaattatacttgaagatgctgatttagttcttgctgggggagcagagagtatgagtcaagcaccatttgcagtgcgaaatgccagatggggtattgggcttggagaaaatagacaaatggaagatactttgtggtcaggcctgactgattcatattgtaacttacctatgggtataacagcagaaaatttggctgaaaagttcaacatcactagacaggattgtgatgagtttgctcttgcatctcaacagagatgggcaaatgctcataaaaatgggtattttgcaaatgaaatagcacaagtagaggttaagataaagaataaagttgtaactattgatacagatgaacatccaaggcctgatgttacattagaaaaacttcaaaaacttccacctgtatttaaaaaaaatggtacagtatcagcaggaaatgcttcaggaatatgcgatggcgctgcatcattattagttgcatcagaagatgcatgtaaaaaacataatttgaaaccacttgcgcgtgtagtttcttatggcgtatctggagttgaaccaagtattatgggcattggaccatgttcagctattcgaattgctctcaaaaaagctggattgtcacttaacgatatggctttagttgaggttaatgaagcttttgctgcacaatatctttcggttgaaaaagaacttggcctagatagatcaattactaattcagatggtggggctattgcactaggacatccacttgggacctctggtgcgcgtattttaacacatttgatttacgcattacaaagaaaacaacaacgctatgcaattggttcagcttgtattggaggaggtcaaggaattgctgtcgtaatcgaaaatatgaaataa

SEQ ID NO: 2754 - protein, 398 aa, Hydra magnipapillata
MSSLARSVYIVAAKRTPFGAFGGAFKDISATVLAEKSSTAALVSVNLDPVHIQSVIFGNVIQSSSDAAYLARHVGLKAGAPVSSTALTVNRLCGSGFQAVVNAAQEIILEDADLVLAGGAESMSQAPFAVRNARWGIGLGENRQMEDTLWSGLTDSYCNLPMGITAENLAEKFNITRQDCDEFALASQQRWANAHKNGYFANEIAQVEVKIKNKVVTIDTDEHPRPDVTLEKLQKLPPVFKKNGTVSAGNASGICDGAASLLVASEDACKKHNLKPLARVVSYGVSGVEPSIMGIGPCSAIRIALKKAGLSLNDMALVEVNEAFAAQYLSVEKELGLDRSITNSDGGAIALGHPLGTSGARILTHLIYALQRKQQRYAIGSACIGGGQGIAVVIENMK

SEQ ID NO: 2755 - DNA, 1191 bp, Branchiostoma floridae
  CDS (1)..(1191)
atggcgctgagtcggggaatttttatcgtagctgccaagcgtacgccattcggcgcgtttggtgggaagctgaaggaccggacagccaccgacctgtgtgagctcgcctcgcgggctgcgctggcggcagggaacgtaccggcagaggctgtcagctctgttatcgtgggaaactgtatccagagttccaaggatgcagcgtacatctcccgccatgttggattgcgagtgggtgtcccgatggctgcctccgctctgaccatcaaccgtctgtgtgggtctggcttccaggctatgatcaatggtgcacaggacatcatcatgggtgatgcggagatcgtactgacaggtgggtcggagagtatgacccaggctcccttcgtcctgcgggatgctcgcttcggcaccagactggggttggacctcaaccttgaggacaccctgtggaccggactgacggaccagcacattaacacaccaatgggagtgacagcggagaacctcggagagaagtacgacatttcgcgtgaggactgcgacaactacgctgtcaagacccagcaacgatggaaggatgcacacgataatggcaggtttaatgaagagatggcaccagtgacagtgaaagtgaagaagggaaaggaagagatgacggtagatgaacacccgaggccacaggcgaacatggaagccatgtccaaactgccgcctgtcttcaagaagaatggaagggtcacggcagccaatgcttcgggtgtttgtgatggagcggcagctgtagtgattgcaggagaggatgctgtgaagaagtataacctgactcctctggctcgtctggtggggtaccactactccggctgtgaccccagcatcatggggattggtccagtgcctgccattgagggactgctgcagaagactgggacaaaactgggtgatatggatttggtggaggtaaatgaggcttttgctgctcagtacttggctgtggagaaggctgctgggttggaccctgacaagactaacgtgaacggtggcgccatcgctcttggacatcctctcgcagcgtctggggcaaggatcgtcggccatctggtgcacgaactcagacggaggggtgcaaagcaagccattggttcagcctgtattggaggtggccagggcatcgctgtactgttggagagtgtgtaa

SEQ ID NO: 2756 - protein, 396 aa, Branchiostoma floridae
MALSRGIFIVAAKRTPFGAFGGKLKDRTATDLCELASRAALAAGNVPAEAVSSVIVGNCIQSSKDAAYISRHVGLRVGVPMAASALTINRLCGSGFQAMINGAQDIIMGDAEIVLTGGSESMTQAPFVLRDARFGTRLGLDLNLEDTLWTGLTDQHINTPMGVTAENLGEKYDISREDCDNYAVKTQQRWKDAHDNGRFNEEMAPVTVKVKKGKEEMTVDEHPRPQANMEAMSKLPPVFKKNGRVTAANASGVCDGAAAVVIAGEDAVKKYNLTPLARLVGYHYSGCDPSIMGIGPVPAIEGLLQKTGTKLGDMDLVEVNEAFAAQYLAVEKAAGLDPDKTNVNGGAIALGHPLAASGARIVGHLVHELRRRGAKQAIGSACIGGGQGIAVLLESV

SEQ ID NO: 2757 - DNA, 1293 bp, Branchiostoma floridae
  CDS (1)..(1293)
atggagcgcatgcagacgatattcgggcacatttcagtgccaaacagggcccaaaaccaatcgttttccagcctggcccagaatgaggtgaaaggtcgatttgcagagagtgaagacgacgttgtgatcatctctgcactgagaactccgatcggcaaagcggccagaggatcttttaaggacacaaccccagatgaccttctagtgtcagtgctgaaggctacgctggagaggaccaatgtgaacccttctgaaattggggacatctgtgtgggtaatgttctccagccaggtgcagggccagcggtcttcagaattgcccagtttgcagcaggcatcccagagactgtccctctgagtgcctgtaacagacagtgttcctcaggactgcaggctgttatgcatgtggccaacagtatcaaggcaggagtctgtgacatggctattggtgcaggtgtggagtccatgagtaagcgtaagcagggtggggaaccaggtgacctgaaccctgacaacttcaagttcgagaaggccagagactgcattattcccatggggatcacctctgagaatgtagctgagaggtttggagtgactcgtgagacacaggacatgtttgcagccatctctcagcagagagcctgtgctgccacagagaagggtttgttccaggacgagattgttcctgtcaagaccaaggtagttgacaaggatggacaggagagggaaatcaccgtgaccaaagatgatggtgtccgcccagggacaaccaaagaaaaactggccagacttccagcagctttcaaaaagggaggcagtacaactgcaggtaactccagccaggtgagtgatggtgcagctgccgtcctggtggccaggcggtccaaggcccgtcagcttggcctgccggtgttcggtgtgattcgcagctacgctgtggttggtgtgcctccagatgtcatgggcatcggacctgcctatgctataccagaagcactgaagaaagcaggcctgtctgttgatgacattgatgtctttgaagtgaatgaagcttttgcaagccaggcggtgtactccgtagacaagctggggatcccctgggagaaggtgaaccctaacggtggggccatcgccctggggcaccccctggggtgtaccggcagcaggcagatcgccacactgctcaatgagctcaagaggaggggcaagagggcttacggagttgtgtccatgtgtattggaacaggcatgggggcagcagcagtcattgagtaccctgggcctcaggcctga

SEQ ID NO: 2758 - protein, 430 aa, Branchiostoma floridae
MERMQTIFGHISVPNRAQNQSFSSLAQNEVKGRFAESEDDVVIISALRTPIGKAARGSFKDTTPDDLLVSVLKATLERTNVNPSEIGDICVGNVLQPGAGPAVFRIAQFAAGIPETVPLSACNRQCSSGLQAVMHVANSIKAGVCDMAIGAGVESMSKRKQGGEPGDLNPDNFKFEKARDCIIPMGITSENVAERFGVTRETQDMFAAISQQRACAATEKGLFQDEIVPVKTKVVDKDGQEREITVTKDDGVRPGTTKEKLARLPAAFKKGGSTTAGNSSQVSDGAAAVLVARRSKARQLGLPVFGVIRSYAVVGVPPDVMGIGPAYAIPEALKKAGLSVDDIDVFEVNEAFASQAVYSVDKLGIPWEKVNPNGGAIALGHPLGCTGSRQIATLLNELKRRGKRAYGVVSMCIGTGMGAAAVIEYPGPQA

SEQ ID NO: 2759 - DNA, 1215 bp, Vitis vinifera
  CDS (1)..(1215)
atggctccagcagcagcagcttcaataaagcctagagatgtttgcattgttggtgttgcacgtacgccaatgggtggctttttgggtacactttcatctttatcagctaccaagcttggatctatagccattgaagccgctcttaaaagggcaaatgttgatgcatcacttgtacaagaagttttctttggaaatgttctcagtgcaaatttaggacaggctcctgctagacaagctgcattaggtgcaggaatacctaattcagtggtctgtaccaccatcaacaaagtttgtgcatcaggaatgaaagcaacaatgctcgcagcacagagtatccagttgggtgtcaatgatattgttgtgtctggtggtatggaaagcatgtctaatgtgcctaaatacctagcagaagcaaggaagggatctcgatttggacatgattctcttgttgatggaatgctgaaggatgggctgtgggatgtttacagtgatacagggatgggtgtttgtgctgaattatgtgcagataatcatgtaatatcaagggaggagcaggatgcttatgctattcatagctttgagcgtggtattgctgcccaagatggtggtgcctttgcatgggaaattgttccggttgaagtttctgggggaagagggagaccatcaactattgttgacaaggatgaaggtctaggaaaatttgaccctgtgaaattaaagaagctccgacccagttttaaggagaatggaggttctgtcactgcaggcaatgcttctagcataagtgatggtgctgctgctttagttttggtaagtggagagaaggcacttcaacttgggctgtcagtcattgctaagattgcaggatacgctgatgctgctcaggcaccagaattatttactacagctccagcccttgcaattccaaaagctatttcaaatgcaggcttggaggcttctcaaattgattactatgaaataaatgaagcctttgctgttgtggctcttgcaaatcagaaactgcttggacttagtcccgaaaaagttaatgtgcatggtggtgctgtatccttgggacatcctctaggttgcagtggagcccgaatcttggtcacacttttgggggtactgaggcagaaagatgggaaatatggagtcggtggtgtttgcaatggtggaggtggtgcatcagcactagttgtagagcttgtgtaa

SEQ ID NO: 2760 - protein, 404 aa, Vitis vinifera
MAPAAAASIKPRDVCIVGVARTPMGGFLGTLSSLSATKLGSIAIEAALKRANVDASLVQEVFFGNVLSANLGQAPARQAALGAGIPNSVVCTTINKVCASGMKATMLAAQSIQLGVNDIVVSGGMESMSNVPKYLAEARKGSRFGHDSLVDGMLKDGLWDVYSDTGMGVCAELCADNHVISREEQDAYAIHSFERGIAAQDGGAFAWEIVPVEVSGGRGRPSTIVDKDEGLGKFDPVKLKKLRPSFKENGGSVTAGNASSISDGAAALVLVSGEKALQLGLSVIAKIAGYADAAQAPELFTTAPALAIPKAISNAGLEASQIDYYEINEAFAVVALANQKLLGLSPEKVNVHGGAVSLGHPLGCSGARILVTLLGVLRQKDGKYGVGGVCNGGGGASALVVELV

SEQ ID NO: 2761 - DNA, 1386 bp, Vitis vinifera
  CDS (1)..(1386)
atggagaaagccatcaacagacagagagttctgcttcagcatctctccccttcctcttctgcagccgaggatgaatcttctctatccgcatcggtttgtgtggctggggatagtgctgcataccagaggacatcagtttttggagatgatgttgtgatagtggcggcatatcgaactgccttatgcaagtcaaaacgaggaggcttcaaggatacttatcctgatgatctgctggcacctgttttgagggcactgctagagaaaaccaatctgaacccaaatgaagttggggacattgttgttggtacagtattggcgccaggctcccaaagagcaagtgaatgcaggatggctgcattctatgctggtttccctgaaactgtgcctgtcagaactgtgaacaggcaatgttcatctggtcttcaggcagttgctgatgtagctgctgcaattaaagctgggttttatgacattggcattggggcagggttggaatccatgacagcaaatccaatggcttgggaagggtcaatcaaccctaaggtaaaggaatttgtgcaagcccaagattgtcttctccccatgggtattacttcagaaaatgttgcacatcgttttggtgtaacaaggcaggagcaggaccaggctgcagttgagtctcataagcgggctgctgctgcaactgctactgggaaatttaaggatgaaataatcccagtatccaccaagattgttgaccctaaaactggagatgagaaacttgtcacaatctctgtggatgatggaataagacctaacgcaacaatgtcagatcttgcaaagctgaagcctgtatttaagaaaaatgggacaaccacagcagggaattctagccaagtgagtgatggtgctggagctgttctcctcatgaagagaagtgttgcaatgcgtaaagggttacctattcttggtgtattcaggacctttgctgctgttggtgtggatcctgccgtcatgggtattggtccagctgttgcaattccagctgcagtcaaatctgctggcctcgaacttgatgatattgatctttttgaaataaatgaggcttttgcatcccaatttgtatattgccgtaaaaagctggatcttgatccagagaagatcaatgtcaatggaggtgcaatggccattggacatcctttgggtgcaacaggtgcccgctgtgttggtactctattgcatgagatgaagcgccgtggcaaagactgtcgctttggagtggtgtcgatgtgcataggtacaggaatgggagcggcggctgtttttgaaagaggtgactgtgttgatgagcttcgcaatgctcggacggctgaaaacaataatctcttatctaaagatgctcaatag

SEQ ID NO: 2762 - protein, 461 aa, Vitis vinifera
MEKAINRQRVLLQHLSPSSSAAEDESSLSASVCVAGDSAAYQRTSVFGDDVVIVAAYRTALCKSKRGGFKDTYPDDLLAPVLRALLEKTNLNPNEVGDIVVGTVLAPGSQRASECRMAAFYAGFPETVPVRTVNRQCSSGLQAVADVAAAIKAGFYDIGIGAGLESMTANPMAWEGSINPKVKEFVQAQDCLLPMGITSENVAHRFGVTRQEQDQAAVESHKRAAAATATGKFKDEIIPVSTKIVDPKTGDEKLVTISVDDGIRPNATMSDLAKLKPVFKKNGTTTAGNSSQVSDGAGAVLLMKRSVAMRKGLPILGVFRTFAAVGVDPAVMGIGPAVAIPAAVKSAGLELDDIDLFEINEAFASQFVYCRKKLDLDPEKINVNGGAMAIGHPLGATGARCVGTLLHEMKRRGKDCRFGVVSMCIGTGMGAAAVFERGDCVDELRNARTAENNNLLSKDAQ

SEQ ID NO: 2763 - DNA, 1353 bp, Vitis vinifera
  CDS (1)..(1353)
atggagaaagccatcaacagacagagagttctgcttcagcatctctccccttcctcttctgcagccgaggatgaatcttctctatccgtgagtccaattctattttttggagatgatgttgtgatagtggcggcatatcgaactgccttatgcaagtcaaaacgaggaggcttcaaggatacttatcctgatgatctgctggcacctgttttgagggcactgctagagaaaaccaatctgaacccaaatgaagttggggacattgttgttggtacagtattggcgccaggctcccaaagagcaagtgaatgcaggatggctgcattctatgctggtttccctgaaactgtgcctgtcagaactgtgaacaggcaatgttcatctggtcttcaggcagttgctgatgtagctgctgcaattaaagctgggttttatgacattggcattggggcagggttggaatccatgacagcaaatccaatggcttgggaagggtcaatcaaccctaaggtaaaggaatttgtgcaagcccaagattgtcttctccccatgggtattacttcagaaaatgttgcacatcgttttggtgtaacaaggcaggagcaggaccaggctgcagttgagtctcataagcgggctgctgctgcaactgctactgggaaatttaaggatgaaataatcccagtatccaccaagattgttgaccctaaaactggagatgagaaacttgtcacaatctctgtggatgatggaataagacctaacgcaacaatgtcagatcttgcaaagctgaagcctgtatttaagaaaaatgggacaaccacagcagggaattctagccaagtgagtgatggtgctggagctgttctcctcatgaagagaagtgttgcaatgcgtaaagggttacctattcttggtgtattcaggacctttgctgctgttggtgtggatcctgccgtcatgggtattggtccagctgttgcaattccagctgcagtcaaatctgctggcctcgaacttgatgatattgatctttttgaaataaatgaggcttttgcatcccaatttgtatattgccgtaaaaagctggatcttgatccagagaagatcaatgtcaatggaggtgcaatggccattggacatcctttgggtgcaacaggtgcccgctgtgttggtactctattgcatgagatgaagcgccgtggcaaagactgtcgctttggagtggtgtcgatgtgcataggtacaggaatgggagcggcggctgtttttgaaagaggtgactgtgttgatgagcttcgcaatgctcggacggctgaaaacaataatctcttatctaaagatgctcaatag

SEQ ID NO: 2764 - protein, 450 aa, Vitis vinifera
MEKAINRQRVLLQHLSPSSSAAEDESSLSVSPILFFGDDVVIVAAYRTALCKSKRGGFKDTYPDDLLAPVLRALLEKTNLNPNEVGDIVVGTVLAPGSQRASECRMAAFYAGFPETVPVRTVNRQCSSGLQAVADVAAAIKAGFYDIGIGAGLESMTANPMAWEGSINPKVKEFVQAQDCLLPMGITSENVAHRFGVTRQEQDQAAVESHKRAAAATATGKFKDEIIPVSTKIVDPKTGDEKLVTISVDDGIRPNATMSDLAKLKPVFKKNGTTTAGNSSQVSDGAGAVLLMKRSVAMRKGLPILGVFRTFAAVGVDPAVMGIGPAVAIPAAVKSAGLELDDIDLFEINEAFASQFVYCRKKLDLDPEKINVNGGAMAIGHPLGATGARCVGTLLHEMKRRGKDCRFGVVSMCIGTGMGAAAVFERGDCVDELRNARTAENNNLLSKDAQ

SEQ ID NO: 2765 - DNA, 1383 bp, Populus trichocarpa
  CDS (1)..(1383)
atggagaaagcaatcaacaggcaacgtgttcttcttgaacacctccgtccttcttcttctcacaattttgaatccactctttctgcatccgcttgtttggctggagatagcgctgcgtatcaaaggacttcggcgtatggagatgatgttgtgattgttgcagcatatcgaactccgcaatgcaaatcaaagcgtggtggtttcaaggatactcatgctgatgatttactagcacctgtgttgaaggcgttaatagagaaaactaatctggatccaagagaagttggggatattgttgtgggttcagtattggctccaggatctcaaagagcaagtgaatgcaggatggctgcattctatgctggtttccctgaaactgtgccgataaggactgtcaacaggcaatgttcgtctgggcttcaggcagttgctgatgtggctgcttcaatcaaagcagggttctatgaaattggcattggagctgggctggaatccatgacaattaatcaaatgtcatgggatggagatgtgaatccaaagctaaagaattttcaaaaagcccaagattgccttctacccatgggtattacttcagagaatgttgcacatcgtttcggtgtgacaaggcaggagcaggatcaggcagcagttgattctcataggaaggctgctgctgctactgcttctggcagattcaaggatgaaatcatccctgtcgctacaaagattgtcgaccctaaaactggtgatgagaagcccatcgtagtatctgttgatgatgggattcgcccagagacatcagtagcaggtctgggaaaattaaagaccgtgtttaagaaagatgggaccaccactgctggaaattctagccaaatcagtgatggtgctggggctgtgttgctcatgaaaagaagtgttgctgtgcaaaaaggactacccattcttggtgtattcaggacatttgctgctgttggtgtggatcctgccatcatgggtgtaggcccagctgttgcaattccagctgcagtgaaggctgctggtttagaacttgaggatattgatctttttgaaataaatgaggcatttgcttcccagtttgtatattgccgcaagaagttggagcttgatccacagaagatcaatgtcaacgggggtgcaatggccattggacatcctctgggtgcaacaggtgctagatgtgtggctaccttactgcatgagatgaagcgtcgtggcagggactgtcgcttcggggtggtgtcaatgtgcataggcacaggaatgggagctgctgctgtttttgaaaggggggatggttgtgatgagctctgcaatgctcggaaagtcgaaagcaacaatctcttatccaaggattcaagatag

SEQ ID NO: 2766 - protein, 460 aa, Populus trichocarpa
MEKAINRQRVLLEHLRPSSSHNFESTLSASACLAGDSAAYQRTSAYGDDVVIVAAYRTPQCKSKRGGFKDTHADDLLAPVLKALIEKTNLDPREVGDIVVGSVLAPGSQRASECRMAAFYAGFPETVPIRTVNRQCSSGLQAVADVAASIKAGFYEIGIGAGLESMTINQMSWDGDVNPKLKNFQKAQDCLLPMGITSENVAHRFGVTRQEQDQAAVDSHRKAAAATASGRFKDEIIPVATKIVDPKTGDEKPIVVSVDDGIRPETSVAGLGKLKTVFKKDGTTTAGNSSQISDGAGAVLLMKRSVAVQKGLPILGVFRTFAAVGVDPAIMGVGPAVAIPAAVKAAGLELEDIDLFEINEAFASQFVYCRKKLELDPQKINVNGGAMAIGHPLGATGARCVATLLHEMKRRGRDCRFGVVSMCIGTGMGAAAVFERGDGCDELCNARKVESNNLLSKDSR

SEQ ID NO: 2767 - DNA, 1374 bp, Populus trichocarpa
  CDS (1)..(1374)
atggagaaggcatttaacagacaaaaagttcttcttgctcatctgcaacccacttctccttctcctcttctctctgcttcaatttgtgctgctggggacagtgctgcatatcaccggacagctgcttttggtgatgatattgtgattgtggctgcgtaccgtactgctatttgcaaagccaggcgtggtgggttcaaggatacctttcccgatgatctacttggatttgtattaaaggcagtggtagaaaaaacaaatgtgaatccaagtgaagttggggacatcgttgttggaaccgttctggcacctggttcagaaagagcaattgagtgcaggatggcagcgttttatgctggtttccctgatacggtgcccctcagaacagtgaacaggcaatgctcatctggcctccaggcagttgctgatgttgctgcttccataaaagcaggatattatgacattggtattgcagctgggttggagtgcatgacagtgaacggcattaggagtgttccccaagttaacccaagagtagaggcctttcaacaagcccgagattgtcttcttcctatgggtctgacttctgaaaatgttgctcagcgttatggcgtgacacgacaagaccaagatcaggctgctgttgattctcatagaaaagcggcagctgcaagagcatctggtaaattcaaagatgaaattatcccagttactacaaagattgtggacccagaaactggtatacagaaggttatcacaatttcagaggatgatggcattcgaccgaactcaaacctggcagagctgtccaggctgaaacctgcattcaaaaaggatggatccaccactgctggcaatgctagccaagtcagtgatggtgctggagctgtacttcttatgaaaagaagccttgctgcacagaagggacttccaattcttggagtgttcaggagttttgctgctgttggtgtagatcctgctgtaatgggtgtaggcccagctgctgcaattccagcggcagtgcaagctgctggacttgagcttaatgatattgacctgtttgaaataaatgaggcatttgcatcacaatatgtttattgtataaagaagctggagcttgaccctgagaaagttaatgtgaatggcggtgcaattgctcttgggcatcctttaggtgctacaggtgcccgctgtgttggaactcttctgaatgagatgaagcgtcgtgggaaagatagtcgctttggagtgatctcaatgtgcatagggtctggcatgggggctgctgctgttttcgagagaggagactgtgtcgacgcactatgcaatgttcgaaaggtgggaagcaacgaccttctgtcaaaagatgctcgttag

SEQ ID NO: 2768 - protein, 457 aa, Populus trichocarpa
MEKAFNRQKVLLAHLQPTSPSPLLSASICAAGDSAAYHRTAAFGDDIVIVAAYRTAICKARRGGFKDTFPDDLLGFVLKAVVEKTNVNPSEVGDIVVGTVLAPGSERAIECRMAAFYAGFPDTVPLRTVNRQCSSGLQAVADVAASIKAGYYDIGIAAGLECMTVNGIRSVPQVNPRVEAFQQARDCLLPMGLTSENVAQRYGVTRQDQDQAAVDSHRKAAAARASGKFKDEIIPVTTKIVDPETGIQKVITISEDDGIRPNSNLAELSRLKPAFKKDGSTTAGNASQVSDGAGAVLLMKRSLAAQKGLPILGVFRSFAAVGVDPAVMGVGPAAAIPAAVQAAGLELNDIDLFEINEAFASQYVYCIKKLELDPEKVNVNGGAIALGHPLGATGARCVGTLLNEMKRRGKDSRFGVISMCIGSGMGAAAVFERGDCVDALCNVRKVGSNDLLSKDAR

SEQ ID NO: 2769 - DNA, 1242 bp, Aspergillus flavus NRRL3357
  CDS (1)..(1242)
atggcatctccaattccccagggcctccgccaggtcctccagaagtcccccaatgacattgtcatcctttcctcactgcgtacccccgtcactcgtgcgaagaaaggcggtttcaaagatgcctaccccgaagaactcctcgccaatgtcctcaaggcgacccttgaagcgaaccccaaactcgacccagccctgattgaggaagtcgctatcggctccgttctccaagagctcggcggtgcaaaggctggccgtatggctcagattcacgcaggcttcccccacacggttcccttccacacaatcaacagacaatgttcgtccggtctagctgctattaccgcgatcggcaacggaatccgggcaggcgctctcaacattggtgtcggtggaggaatggagtccatgacccggaattacggatctcgcgctatccccaccgtgctgtggcccgagctcaaggagtcgccgtcgaaggactctcgggactgcatcatgcctatgggtattacctccgaaaacgttgcttctcgttacggtatctcgagggaggaccaggacgtatttgccgccgagtcgcacaagaaggctactgctgcgcagaacgctggtctgttcgactccgaaatcgtgcccgtgaagaccctctcctttgaccctgaaaaccccgatgcgcccccgaaggaaatcaccgtcacaaaggatgatggtgtccgccccaacatctccgtcgagaagatggccagtctgaagccagccttctccccgactggtgctagcaccgccggaaacagctcgcaggtcagcgacggtgctgccgctgcactgctcatgcgtcgttccaccgcgaccgaactcggactgacatcctccatcaagggccgctgggtcggcaccgctgttgctggttgtgctcccgatgagatgggtgttggacctgctgttgctattcccaagcttcttcagcagctcgacatgagcgtctccgatgttaacatctgggagatcaacgaggcttttgcctcccaggcgctctactctatccgcaagttgggtattgacgaggccaaggtcaaccctaagggtggtgctattgccatcggtcacccgctcggtgccactggagctagacagctcgccactctcctgcccgagatggagcgtaccggccaggaagtcggtgttgtcagcatgtgcattggaaccggtatgggaatggctggtatgtttgttcgggagtaa

SEQ ID NO: 2770 - protein, 413 aa, Aspergillus flavus NRRL3357
MASPIPQGLRQVLQKSPNDIVILSSLRTPVTRAKKGGFKDAYPEELLANVLKATLEANPKLDPALIEEVAIGSVLQELGGAKAGRMAQIHAGFPHTVPFHTINRQCSSGLAAITAIGNGIRAGALNIGVGGGMESMTRNYGSRAIPTVLWPELKESPSKDSRDCIMPMGITSENVASRYGISREDQDVFAAESHKKATAAQNAGLFDSEIVPVKTLSFDPENPDAPPKEITVTKDDGVRPNISVEKMASLKPAFSPTGASTAGNSSQVSDGAAAALLMRRSTATELGLTSSIKGRWVGTAVAGCAPDEMGVGPAVAIPKLLQQLDMSVSDVNIWEINEAFASQALYSIRKLGIDEAKVNPKGGAIAIGHPLGATGARQLATLLPEMERTGQEVGVVSMCIGTGMGMAGMFVRE

SEQ ID NO: 2771 - DNA, 1260 bp, Aspergillus flavus NRRL3357
  CDS (1)..(1260)
atgtcttctgctcagcagcgtcttacccaggtggcttctcacttcacccctggtggcaagaagggcgtcgccgccatcaccgagaagcaccccgatgacattgtcgtgacttgtgcccttcgttctgccctcaccaagggtggaaagggtggcttcaaggataccgcggctgctgatatcctggctggcattttcaagggtgttattgagaagagtggcatcgaccccaacgtcgtcgaggatgttgccgtcggctccgtccttgcccctggtggcggtgccaccgagttccgtgctgctgctctggttgctggtttccccgagactactgctgtcaagagcttgaaccgtcagtgctccagtggtctccaggccatcgttgacattgccaatgctatcaagtccggcatgattgaagttggtattggtgctggtgtggagagcatgtcctctcagtatggtcctggtgctgtcactgaattctcagacctcctcgagaaccaccaagagtctgccaactgcaaggttcccatgggtgttctgtcggagaacatggctaaggaccgtggcatttctcgtgctgtccaagatgctttcgccgcctcatcctaccagaaggcggttaaggctcagaaggctggtctctttaacgaggagatctatcctcttcaggtgaagtggactgaccccaagtctggcgaggagaagaccattaccgtgaaggccgatgatggtatccgtgacggtatcaccgctgaatccctgggcaagattcgccctgctttcgccaaggatggctccattcatgctggcaatgcctcccagatctccgacggtgccgctgctgttttgttaatgaagcgttccactgctgagcgcctcggtcagaagatcatcggcaagtacgtcgccgctagcgttgtgggtgttaagcccctgctcatgggcatcggcccctggaaggccatccccgtggcccttgagaaggctggcatcaccaaggatgacgttgatatctacgagatcaatgaggcctttgcctctcagtgcgtgtggtgtgtcaatgaacttggactacctcaagagaagatcaaccctaagggaggtgccattgcattcggacaccctcttggctgcaccggttctcgtcagatcagcaccctgctgacagagctgaagcgcactgacaagaagatcggtgtcactagcatgtgtgttggcactggtatgggtatggctgccgtttgggttcgcgaataa

SEQ ID NO: 2772 - protein, 419 aa, Aspergillus flavus NRRL3357
MSSAQQRLTQVASHFTPGGKKGVAAITEKHPDDIVVTCALRSALTKGGKGGFKDTAAADILAGIFKGVIEKSGIDPNVVEDVAVGSVLAPGGGATEFRAAALVAGFPETTAVKSLNRQCSSGLQAIVDIANAIKSGMIEVGIGAGVESMSSQYGPGAVTEFSDLLENHQESANCKVPMGVLSENMAKDRGISRAVQDAFAASSYQKAVKAQKAGLFNEEIYPLQVKWTDPKSGEEKTITVKADDGIRDGITAESLGKIRPAFAKDGSIHAGNASQISDGAAAVLLMKRSTAERLGQKIIGKYVAASVVGVKPLLMGIGPWKAIPVALEKAGITKDDVDIYEINEAFASQCVWCVNELGLPQEKINPKGGAIAFGHPLGCTGSRQISTLLTELKRTDKKIGVTSMCVGTGMGMAAVWVRE

SEQ ID NO: 2773 - DNA, 1266 bp, Aspergillus flavus NRRL3357
  CDS (1)..(1266)
atgtcttcgcctcaacaacgactatcttctatcgcaaaccagcttacgagccctggtgctgtgtccgcaaagtcaaagctcttggcgaagaaccctgacgatgtggtgattactctcgccctgcggactcctcttacaaaagccaggaagggtggcttgaaggatactactttggatgagcttctcatctcactgctgacggatgtgcgcgagcggtcgaaactcgatccaaaccttgtcgaagatgtctgtgtcggaaatgtccttgcccctggtcaagcttacatcgcccgttccgctgttttggcagctggtttccccgtcaccgccgcagcatcagttgccaaccgattctgttcttctggattgctggcgatccagaacattgccaaccagatcattgccggttcaattgatgttggtatcgcagttggagcagagagcatgagcaccaaccccgacaacggtgctccagagctatctgacaaaatcacatcacacccaatcgcctcgcagaacaagcaacccatgggtcagacctccgaaaatgtcgcatctcaatttggaatcactcgcgaaatgcacgaccagttcgctgccaagagctaccagaaagcagagcatgcccagaaggctggctggttcaatgacgagattgttcccgttcacaccaaggttaaggatcctaagactggagaagtgaagaatgttgtggtcgatcgtgatgatggtattcgttatggcacgactgccgaatcgctcggcaagattcgttcagccttccctcagtggaagcccagtgctacaacgggtggcaatgctagccaaattaccgacggcgccgcagcactcgtcctcatgaaacgatcccgcgcacaagagctgggccagccaattctggccaagttcggcggggccactattgccggcttagagccccgaatcatgggaattggtccctctatcgccattcctaagctcctctccaaggtcggcttgaccaaggatgacattgatatctttgagatcaacgaggcgtttgcatccatgggtacttactgtgttcaaaaactcggtcttgacgaatctaaggtgaaccctcggggtggtgcaattgctttcggccacccgttgggatgcacaggagcacgacaggttgttactgccctctccgaattgcggcgacagaacaagaaagtggcagtcacctccatgtgtgttggaactggtatgggcatggctggtattttcatctccgaggcttga

SEQ ID NO: 2774 - protein, 421 aa, Aspergillus flavus NRRL3357
MSSPQQRLSSIANQLTSPGAVSAKSKLLAKNPDDVVITLALRTPLTKARKGGLKDTTLDELLISLLTDVRERSKLDPNLVEDVCVGNVLAPGQAYIARSAVLAAGFPVTAAASVANRFCSSGLLAIQNIANQIIAGSIDVGIAVGAESMSTNPDNGAPELSDKITSHPIASQNKQPMGQTSENVASQFGITREMHDQFAAKSYQKAEHAQKAGWFNDEIVPVHTKVKDPKTGEVKNVVVDRDDGIRYGTTAESLGKIRSAFPQWKPSATTGGNASQITDGAAALVLMKRSRAQELGQPILAKFGGATIAGLEPRIMGIGPSIAIPKLLSKVGLTKDDIDIFEINEAFASMGTYCVQKLGLDESKVNPRGGAIAFGHPLGCTGARQVVTALSELRRQNKKVAVTSMCVGTGMGMAGIFISEA

SEQ ID NO: 2775 - DNA, 1197 bp, Anopheles gambiae str. PEST
  CDS (1)..(1197)
atggcagcactgacgaaaggagttttcattgtggcggccaagcgtaccgctttcggcacgttcggcggagtgttcaagaacaccaacgcaacgcagctgcagacggttgcggccaaggcggcgttggatgcggccggccttaagcccgatcaggtcgattccgtcaacattggccaggtgctggtactgtcctcgaccgatggtgccttcctgccgcgtcacgtgtcgctcggctgtggcattccgatcgagcgaccggctctcggcgtgaaccggctgtgcggttccggcttccaggcggtggtgaacggagcgcaggacatcctggtcggtgctgcccacgtttcgcttaccggaggagtcgacaacatgtcccagacaccgtacacgctgcgcaacagtcgtttcggcattccgctcggcactagcccggccctggaggatgctctgtggaccggcctgacggactcgtactgcaagctgccgatggcactgacagccgaaaatctggccgaaaagcacaaggttccgcgcgaaaaggtggacgagtttgcgtaccggtcgcagcagctctggaagaaggcgaacgacgaaggagtgttcaagacggaaatcaccccgttcaaactgaaggtgaagggcaaggaggttgactttgccgtcgatgagcatccgcgcccccagaccacgctcgaggggctgaacaagttgccgtctctgttcaagaagaatggttgcgtcactgccggcaccgcttcgggtatctgtgatggtgccgcgtcggtggtggtcgcttcggaggaagcgctcaagaagtacaacctgaccccgctggcacgactggtggcgtacagcacggtgggtgtaccgccggagattatgggcatcggaccggtgcccgcgatccagaacgtgctgaaggtggccggactgaagatggacgatattgatctgttcgagattaatgaagcgttcggtgtgcagacgctggcctgcgccggcgagctcggactggacatcaacaagctcaacctgaacggtggtgcgatcgcgctcggccatccgctcggtgcgtccggatcgcgcatcactggccacctggtgcatgagctgaaacgcaagaacctcaagcgtgccatcggatcggcctgcattggaggtggacagggtattgcgctgctgctggagtcggtctag

SEQ ID NO: 2776 - protein, 398 aa, Anopheles gambiae str. PEST
MAALTKGVFIVAAKRTAFGTFGGVFKNTNATQLQTVAAKAALDAAGLKPDQVDSVNIGQVLVLSSTDGAFLPRHVSLGCGIPIERPALGVNRLCGSGFQAVVNGAQDILVGAAHVSLTGGVDNMSQTPYTLRNSRFGIPLGTSPALEDALWTGLTDSYCKLPMALTAENLAEKHKVPREKVDEFAYRSQQLWKKANDEGVFKTEITPFKLKVKGKEVDFAVDEHPRPQTTLEGLNKLPSLFKKNGCVTAGTASGICDGAASVVVASEEALKKYNLTPLARLVAYSTVGVPPEIMGIGPVPAIQNVLKVAGLKMDDIDLFEINEAFGVQTLACAGELGLDINKLNLNGGAIALGHPLGASGSRITGHLVHELKRKNLKRAIGSACIGGGQGIALLLESV

SEQ ID NO: 2777 - DNA, 1185 bp, Anopheles gambiae str. PEST
  CDS (1)..(1185)
atgacgtcagcaggagaagttttcatcgtgtcggccgccagaaccccgatcggtaatttcatgggcacactcgcgtcgcttagtgccgccgatcttggtgcggtggccgtgaaagaggtgctgcagcgagccagcgtcgatccggccgatgtgagcgaggtcattctcggccaagccctaacggccggccagggacagaacccggcccgccaggcttccattaaagcgggcgtaccgaaggaagtcccagcgtacaacatcaacatgctgtgcggctccggtctgaaaacggttgccctcggctatcaggcgatccgggccggtgatgctaccgtcgtcgtcgctggcggacaagagtccatgtccaaggcaccgcatgtgatgcatatgcgcagtggcaccaaaatgggcgaggccaagatggtcgattcgatgctgaacgacggcctgacggatgcgttctacgatctgcacatgggcattacggcggaaaatctagccaaagagttcgacattggccgagaggcgcaggatgcattcgccgccaagagccaacagctggctgaagaatctcaacagaaaggatactttaccgaggagatcgtaccggtggaggtggcgggccgcaaggaaacgatcaagtttgcggtggacgagtacccgaagcatggtaccacggcggaagggctggccaagctgcggccgtgcttcattaaggacggtaccgttacgcccggtaacgcgtccggtattaacgattctgccgccgccgttctgctgatgtccggcgaggaggttcaaaagcggaacgccaaaccgatggcaaagatcgttgcctacgcgcaaacgggaatatgcccgaaaacgatgggcgctggcccgatctcggccgtacaggctgtgcttcaaaaagccggctggaagctggaagaggtcgatctgtttgagctgaacgaagcattcgcagcccaggcactggccgtcaacaagggtcttggtgtagacccggccaaggttaacgttggtggaggagccatcgctctcggacatcccattggagcttcgggctgccgagtactggttacgctgctctacgcactcaagcgaacaggcggcaagaagggtgttgcatccttgtgcgttggcggcggtatgggtgtcgccatggcggtggaaatggtgtga

SEQ ID NO: 2778 - protein, 394 aa, Anopheles gambiae str. PEST
MTSAGEVFIVSAARTPIGNFMGTLASLSAADLGAVAVKEVLQRASVDPADVSEVILGQALTAGQGQNPARQASIKAGVPKEVPAYNINMLCGSGLKTVALGYQAIRAGDATVVVAGGQESMSKAPHVMHMRSGTKMGEAKMVDSMLNDGLTDAFYDLHMGITAENLAKEFDIGREAQDAFAAKSQQLAEESQQKGYFTEEIVPVEVAGRKETIKFAVDEYPKHGTTAEGLAKLRPCFIKDGTVTPGNASGINDSAAAVLLMSGEEVQKRNAKPMAKIVAYAQTGICPKTMGAGPISAVQAVLQKAGWKLEEVDLFELNEAFAAQALAVNKGLGVDPAKVNVGGGAIALGHPIGASGCRVLVTLLYALKRTGGKKGVASLCVGGGMGVAMAVEMV

SEQ ID NO: 2779 - DNA, 1260 bp, Magnaporthe grisea 70-15
  CDS (1)..(1260)
atgggtgcccttgacagactccagcagattggcggccagctctccggagcgctgtcttccggcggtcgcgcaaagatcctcgagaagaaccccgacgatatcgttgtcaccgcctgcctcaggacagcgttcaccaagggtggtaagggtggcttcaaggacacacatgcggcagacctcatggccggtgccctcaagggcatcatcggccggtccaagatagacccggccttggttgaggatatctgcgtcggcaccgttctggcccccggcggtggcgccaccgagatgcgcgccgctgccctggtggccggcttccccgagagcgcctctgtccgcaccctcaaccgtcagtgctcgtctggtctgcaggcctgcgttgacgttgccaaccagatcaggtctggcatgattgagatcggtatcggcgctggcgtcgagtcgatgagcacaaactacggccccgccgccgtggccgagttctcggacctgctcgagtcccaccccgaagctgcaaactgcaaggtgcccatgggtgttctttcggagaacatggcccgtgaccgcaacgtgccgcgtgctgctcaggacgcctttgccgccgcttcatacaagaaggccgaggccgctcagaagcagggtctcttcaaggaggagatcgagccgctgcgcgtcaagtttgaggaccccaagactggcgagacccgcgagatcgtcgtcgacggcgacgatggtgtccgccccggcatcactgccgagtcgctcgccaagatcaagcctgcctttgccgagggtggtagcatccacgccggtaacgcttcgcagatatctgacggtgccgctgccgtcctgctcatgaagcgctccaccgccgagaggcttggccagcagatcctgggcaagtacgtccaggcttccatcgttggtgtcaagccgctgctcatgggtgttggtccctggaaggccatccccaagctttttgagctcactggcgtcaccaaggaggacgtcgacatctttgagataaatgaggcctttgccagtcagtgcctgtggtgcgctgatgagctcaagatcccccacgagaagattaaccccaagggaggcgccatcgcctttggccaccccctgggctgcaccggtgccaggcaggtctcaaccctgctctacgagctgaggaggacgggccagaaggttggcgttactagcatgtgtgtcggtaccggcatgggtatggctgcgctctgggttgcagagtaa

SEQ ID NO: 2780 - protein, 419 aa, Magnaporthe grisea 70-15
MGALDRLQQIGGQLSGALSSGGRAKILEKNPDDIVVTACLRTAFTKGGKGGFKDTHAADLMAGALKGIIGRSKIDPALVEDICVGTVLAPGGGATEMRAAALVAGFPESASVRTLNRQCSSGLQACVDVANQIRSGMIEIGIGAGVESMSTNYGPAAVAEFSDLLESHPEAANCKVPMGVLSENMARDRNVPRAAQDAFAAASYKKAEAAQKQGLFKEEIEPLRVKFEDPKTGETREIVVDGDDGVRPGITAESLAKIKPAFAEGGSIHAGNASQISDGAAAVLLMKRSTAERLGQQILGKYVQASIVGVKPLLMGVGPWKAIPKLFELTGVTKEDVDIFEINEAFASQCLWCADELKIPHEKINPKGGAIAFGHPLGCTGARQVSTLLYELRRTGQKVGVTSMCVGTGMGMAALWVAE

SEQ ID NO: 2781 - DNA, 1251 bp, Magnaporthe grisea 70-15
  CDS (1)..(1251)
atggccgttgaacgtcttggctccattctcaaacacctcaccccgggcaatgccctttcaaccatcacatctaaaaacgacgacgacatcgtcattacctatgccgctcgtaccccactaggcaaagcccgcaagggcggcttcaaggacacctcgctcgagtacatggtgtttgcgctcttggaccaagtgcggcaacgcagcaagatcgacccgagcctcgtcgaggacatttgcatgggcaatgtctcagatggcaaggccgcctacaagctccgcgccgccgcccttgccgccggcttccccaacacacactccgcctcgtccgtcaacaggttttgctcgtcgggcctcaaggcgacggccgatatcgcacatgccatcagcaacggcagcatcgaggtcggtattgccctaggtgccgagagcatgtccatcggcggtgacgcgttagatcagccctttgacgaggatgtcacctcgcaaaaccaggagtcgaaggactgcatgatgcccatgggctggacgtcagagaacgtttcgagcgacttcggtatcagccgcgaggaaatggacaagttcgctgccctcagcttccagaaggctgagaaggcacaaaatgccggctggttcgacgacgaaattgttccgatccgcaccaaggtcaagggccctgacggcgaggtcaaggaggtcacgctgacaaaggacgagggcatcaggcccggcacaacagcggagagtctgggaaagatccgcgccgcgttcccgcagtggggaagcacgaccacgggaggaaacgctagccaggtgacggatggtgccgcagcggtgttgctaatgaagcggtcaacggccaacaagcttgggcagcccatcatggccaagtacgtcgggtcgacgacggcaggtctggcgccgcgcatcatgggaattggccccactgtcgccattcccaaactactggccaagcacggcatcacgctggctgactgcgacgttgtcgagatcaatgaggcgtttgccagcatggcggtctactgccgcgacaacctcggtctcgacgccgagaccaagatgaacccacgcggtggtgccatcgcactcggacacccgctcggagcgaccggtacgaggcagatcgttactggtctgagcgagtgcaggcggacgggcaagaagatcttattgaccagcatgtgcatcggcacgggtatgggcatggctgggttgttcgttaatgagcagtag

SEQ ID NO: 2782 - protein, 416 aa, Magnaporthe grisea 70-15
MAVERLGSILKHLTPGNALSTITSKNDDDIVITYAARTPLGKARKGGFKDTSLEYMVFALLDQVRQRSKIDPSLVEDICMGNVSDGKAAYKLRAAALAAGFPNTHSASSVNRFCSSGLKATADIAHAISNGSIEVGIALGAESMSIGGDALDQPFDEDVTSQNQESKDCMMPMGWTSENVSSDFGISREEMDKFAALSFQKAEKAQNAGWFDDEIVPIRTKVKGPDGEVKEVTLTKDEGIRPGTTAESLGKIRAAFPQWGSTTTGGNASQVTDGAAAVLLMKRSTANKLGQPIMAKYVGSTTAGLAPRIMGIGPTVAIPKLLAKHGITLADCDVVEINEAFASMAVYCRDNLGLDAETKMNPRGGAIALGHPLGATGTRQIVTGLSECRRTGKKILLTSMCIGTGMGMAGLFVNEQ

SEQ ID NO: 2783 - DNA, 1251 bp, Gibberella zeae PH-1
  CDS (1)..(1251)
atggctgctgaacgtattggctcaatcatcaagcacttggcccctgggtcagcgcttaacagcatccagtccaagaaccccgacgatatcgtcatcactctcgccgtgcgaacaccgctcacaaaggccaagaagggcggcttcaaggacacatcacttgaatacatggtctatgctattctgaagcaagtccgagaacgatcgaaccttgaccctgcccttgttgaggatatctgcctcggaaacgtctctgatgtcaaggccgcctacaaggtccgcgcctctgctcttgcagctggtttccccaacaccgccggtgcctcttccatcaaccgattctgctcctccggtctcaaggccaccgccgatatcgcccactccatctccaatggctccatcgaagtcggtatcgccatgggtgccgaacagatgtccatcggtggcgacgcgcttgacaagcccttcgacgaggccgttacatcacaaagccaggaggctgtcgactgcatgcagcccatgggttggacaagcgagaacgtgagcaaggactttggcgttacccgtgagatgatggacaagttcgccgccggaagcttccaaaaggctgaggctgcgcaaaaggctggttggttcgcagatgagattgtgcccattaccaccaaggtcaagggccccgatggccaggagaaggaggtcactcttacacaagatgagggtatccgacccggtaccactgctgagagcctctccaagattcgcgctgctttccctcaatggggtggcgccaccaccggcggtaacgccagtcagatcaccgacggagctgccgccgtgttgttgatgaagcgatctactgccattaagctgggtcagcctatcatggctaagtatgttggatctactgttgctggtcttgcccctcgtatcatgggtattggccccagcgtcgccattcccaagctcctcgcccagcacaacatctccatggatgatattgatatcgtcgagatcaacgaggcatttgcttccatggctgtttactgccaggacaagcttggcctcacatcagaaaagcttaacccccgtggaggagctattgctctgggccaccccctgggtgctactggcgccagacagattgtgacaggtttggctgagtgcaggcggcagaagaagaagatgcttctgacaagcatgtgtatcggcacaggccagggcatggctggtctgttcgtgaacgagcaggtctag

SEQ ID NO: 2784 - protein, 416 aa, Gibberella zeae PH-1
MAAERIGSIIKHLAPGSALNSIQSKNPDDIVITLAVRTPLTKAKKGGFKDTSLEYMVYAILKQVRERSNLDPALVEDICLGNVSDVKAAYKVRASALAAGFPNTAGASSINRFCSSGLKATADIAHSISNGSIEVGIAMGAEQMSIGGDALDKPFDEAVTSQSQEAVDCMQPMGWTSENVSKDFGVTREMMDKFAAGSFQKAEAAQKAGWFADEIVPITTKVKGPDGQEKEVTLTQDEGIRPGTTAESLSKIRAAFPQWGGATTGGNASQITDGAAAVLLMKRSTAIKLGQPIMAKYVGSTVAGLAPRIMGIGPSVAIPKLLAQHNISMDDIDIVEINEAFASMAVYCQDKLGLTSEKLNPRGGAIALGHPLGATGARQIVTGLAECRRQKKKMLLTSMCIGTGQGMAGLFVNEQV

SEQ ID NO: 2785 - DNA, 1200 bp, Apis mellifera
  CDS (1)..(1200)
atgtctcttgtaacaaaaggaatatttattgtagctgcaaagcgtactccatttggttcatttggtggtaaatttatgaacaaaaatgcaactgatttatcagtaattgctgctaaatctgctttgcaatctgcaaagttaaatcctgaaaaagtagataatgttatttttggacatgtattaccaatatcatcaagtgatggaggttttttaacacgtcatgttgcattaaaatctggtataccattagaaaaaccatcattttcattaaatagattatgtggttctggatttcaatcaattgtcagtggtgcacagagtattttattaggagaatctaagatagttttaacaggaggagtagaaaacatgagtcaagttccatttagtgtaagaaatattcgatttggtacaagtttaggacaaaaatatcagtttgaggatagtttatggcttggattttcagatacttattgcaatttaagtatgggtgaaactgcagaaaaacttggatcacaatataatttaaaaagacaagaagtagatgaatttgctttaagaagtcaacaattatggaaagctgctaatgatgctggtcgttttaatgaagagattgcacctgttacaataactgtgaaaaagcaagatattgttgttaatacagatgaacatccacggcctcaaacgactcttcaaaatttaagtaaattaccttctatttttaagaaagatggtttagttacagcaggatcttcatctggtatttctgatggtgcaggagttattattttagcgagtgaagaagttattaaaacagaacaacttacaccactggcacgtttggtgggatatagtgttgtaggtgtagaacctagtattatgggaattggtccagttccagctatacaaaaacttcttaaaattacaaataaaactttaaatgatattgaacttatcgagattaatgaagcatttggaagtcaaacattggcatgtgttaaagagttgaaattggatattaataaattaaacgtggatggtggatctattgctcttggacatccattggctgcatctggtagtagaattactgcacatttagtacatgaattaagaagaagaaaaactggaagcttaggaattggttctgcttgcattggtggaggtcaaggaatagctttgatgatagaagcactttaa

SEQ ID NO: 2786 - protein, 399 aa, Apis mellifera
MSLVTKGIFIVAAKRTPFGSFGGKFMNKNATDLSVIAAKSALQSAKLNPEKVDNVIFGHVLPISSSDGGFLTRHVALKSGIPLEKPSFSLNRLCGSGFQSIVSGAQSILLGESKIVLTGGVENMSQVPFSVRNIRFGTSLGQKYQFEDSLWLGFSDTYCNLSMGETAEKLGSQYNLKRQEVDEFALRSQQLWKAANDAGRFNEEIAPVTITVKKQDIVVNTDEHPRPQTTLQNLSKLPSIFKKDGLVTAGSSSGISDGAGVIILASEEVIKTEQLTPLARLVGYSVVGVEPSIMGIGPVPAIQKLLKITNKTLNDIELIEINEAFGSQTLACVKELKLDINKLNVDGGSIALGHPLAASGSRITAHLVHELRRRKTGSLGIGSACIGGGQGIALMIEAL

SEQ ID NO: 2787 - DNA, 1230 bp, Candida glabrata CBS 138
  CDS (1)..(1230)
atggctgagaggttaaagaacattggaagtcacttgcttggtggcagtcagggtcctagtgtcaaggagcaacatccggacgatgttgttattgttgctgctaacaggtctgctattgcgaaggggtttaaaggtagtttcaaggacgtcaacactgactatctgctcactgtgtttttgaaagagttcatcgacacgttccctccacagttgagggacaacttggacttgattggggaagttacatgtggtaatgtgttgaatcctggtgctggtgcgactgaacatagaggtgctatgttggcagcaggtctgccttacaccacgcccttcatggctttgaacagacagtgctcctcgggtcttactgctgtgaacgatattgcaaacaagatcaaggctggccagattgatgtcggtctcgccgctggtgtcgagtcgatgacccagaactacgcttcttctaacccactgggccgtatctctgacgagttgaagtccgacaagaacgcacgtaagtgtctaatccctatgggtatcactaacgaaaatatagccaaggggtttgagatcactagggaaatgcaggacgagttcgctgcagcttcttaccaaaaggcctccaacgccgttcagtccggtgtcttcaaggatgaaatcttgcccatcactctaccagacggcaaagttgtagacgtcgatgagggtcctagagcaaatgtcactgccaaatcattaggcggactaaagccagctttcatcaaagaaaccggtaccactactgctggtaatgcctctcaagtgtcagatggtgttgctggtgttctattggcgcgtagatcggtggctaacaaactaaaactaccaattctaggtcgctatgttgcattccaatctgtaggtgtgccacctgagatcatgggtgtcggcccggcctacgccatcccaagagtactacaagatgttggaattactgttgatgatgttgatgttttcgaaattaacgaagcatttgcagcccaggcactatactgtataaacaagttgggaatcaacttgaagaaagttaatcctcgtggtggtgcaattgcattgggtcatccactaggttgcacaggtgccagacaaattgccacaatactacgtgaactagaaaagggacaagtcggtgttgtaagcatgtgtattggtacaggtatgggtgccgcagcggtctttgtcaaggaatga

SEQ ID NO: 2788 - protein, 409 aa, Candida glabrata CBS 138
MAERLKNIGSHLLGGSQGPSVKEQHPDDVVIVAANRSAIAKGFKGSFKDVNTDYLLTVFLKEFIDTFPPQLRDNLDLIGEVTCGNVLNPGAGATEHRGAMLAAGLPYTTPFMALNRQCSSGLTAVNDIANKIKAGQIDVGLAAGVESMTQNYASSNPLGRISDELKSDKNARKCLIPMGITNENIAKGFEITREMQDEFAAASYQKASNAVQSGVFKDEILPITLPDGKVVDVDEGPRANVTAKSLGGLKPAFIKETGTTTAGNASQVSDGVAGVLLARRSVANKLKLPILGRYVAFQSVGVPPEIMGVGPAYAIPRVLQDVGITVDDVDVFEINEAFAAQALYCINKLGINLKKVNPRGGAIALGHPLGCTGARQIATILRELEKGQVGVVSMCIGTGMGAAAVFVKE

SEQ ID NO: 2789 - DNA, 1215 bp, Kluyveromyces lactis NRRL Y-1140
  CDS (1)..(1215)
atggctagcagacttcaacaattagagaaacatttgacaggacgcagttctgaaaaggatataaagagtaagaatccggacgatgtggttgttgtagctgcgtatcgttcagctattggtaaagggttcaaaggaggattcaaagatgttaacacggattatttacttacacagtttctgaaggaattttttgagaaagttgacattgataagagtgtcattgaagaaattgcgtgtggtaatgtgttgaatcccggtgcaggtgcgacagaacatagagctgcgatgttagctgctggtttgccatatcaaactccgttagtggctattaacagacagtgttcctcagggttaactgccgttaacgacgttgcaaataagatcatttctgggcagatcaatgtagggttggctatcggggtggaatctatgtctaagaactatggtccgaaggctcttgggtctatatcaaatgagttgaaatcgaacacggctgctgctaagtgtatgataccaatgggatttactaatgaaaacgttgctaagaagttccaaatttcaagagaagaccaggacaaatttgccctggagtcattctataaagcggaaagggctgtctcacagggattgtttaaagatgaaatcatccctattgaactaccagacggatctataattgcgcaggacgaaggtcctagaaagggcgtcactttcgaatcgttacaaaagattaaacctgcatttgtgaaggaaacaggtgtgacaactgccggtaacgcttctcagatatcagatggtgttgctggtgtgttgctaatgagaagatccatggccatgaaattgggtttggaaatcgttggtaagtacgttgcgttccaggcagtaggtgttccacctgagatcatgggtgttggcccagcatatgcgattccaagagtcctcaaagactgtggtttaaatgtcaacgatgttgatgtttacgagattaatgaggcctttgcagggcaggccattttctgtgtcaaccatctaaaaatcgacaagaagaaattgaacccaaggggaggcgcgattgccttaggtcatcctttgggctgcactggtgccagacaagtcgctaccatattaagggaattagacgctggtcaaattggtgttgttagcatgtgtatcggtactggtatgggagctgctgcagtcttcgtcaaggagtga

SEQ ID NO: 2790 - protein, 404 aa, Kluyveromyces lactis NRRL Y-1140
MASRLQQLEKHLTGRSSEKDIKSKNPDDVVVVAAYRSAIGKGFKGGFKDVNTDYLLTQFLKEFFEKVDIDKSVIEEIACGNVLNPGAGATEHRAAMLAAGLPYQTPLVAINRQCSSGLTAVNDVANKIISGQINVGLAIGVESMSKNYGPKALGSISNELKSNTAAAKCMIPMGFTNENVAKKFQISREDQDKFALESFYKAERAVSQGLFKDEIIPIELPDGSIIAQDEGPRKGVTFESLQKIKPAFVKETGVTTAGNASQISDGVAGVLLMRRSMAMKLGLEIVGKYVAFQAVGVPPEIMGVGPAYAIPRVLKDCGLNVNDVDVYEINEAFAGQAIFCVNHLKIDKKKLNPRGGAIALGHPLGCTGARQVATILRELDAGQIGVVSMCIGTGMGAAAVFVKE

SEQ ID NO: 2791 - DNA, 1239 bp, Debaryomyces hansenii CBS767
  CDS (1)..(1239): transl_table=12
atggatagattaaatcaagttttagggcatttatctccatctgcaactaatcacataacttcgaaaaaccccgatgatgtggtgattgttgcatcttatcgtacagcaattggaaaagggtttaaaggaagcttcaaggatgttgggagtgactatattttattgaagtttctagaagcattccttgccaaaacccaggttaatcctaatttaattgaggatattgcttgcgctaatgtactcaaggttcgttccggtatctgtgaacatagagctgccgccataagcgctggtattccatacaccacccccattatagccataaatagacagtgtgggtctggattggtagctataggtgatatagcaaataaaataatatcgggagaaattgattgcggtctagctgttggtgtggaatcgatgactaaagactttggattgggtcaatcagttgtgtcaaaagctctcgaggatcacccagaaatgataaaatctaagattcctatggggatcaccaacgagaatattgctatcaagtacaatatctcacgcaaacaacaggatgaatttgcagctaaatctttccagaaggctgaaaaagcattggcttcaggtgtctttgctgatgaaatattgcctgttgaatcattaattgaagaaaaggatggccaaggtaatgtttcttttaaaaaaattatagttgataaagacgaaggtgttcgtaagggagtcactgcagaatccttgggcaaattacgcccatcatttaagaaggatggcctgacccatgctggtaactcttctcaagtaagtgatggagcagcaggtgttttacttatgagacgttcttttgctgaagaaaatggatttaaaattgaaggtaagtttgttagatgtgtttctgttggtgttcctccagaaatcatgggggttggtccagcaatggctattcctcatattctcaagaaaactaacttagtagtggatgatattgcagcctttgaaatcaatgaagcttttgctacacaatgtttgtactcaattaaagcctgcaatataccagaagagaaagtgaacatcaatgggggggctattgccttgggccatccagtgggtgtaactggggctagacaatatgctacaatcttaagattattgaagccaggtgatattggtttaacctcaatgtgtattggttcaggtatgggctctgctagtatagtagttaaagaataa

SEQ ID NO: 2792 - protein, 412 aa, Debaryomyces hansenii CBS767
MDRLNQVLGHLSPSATNHITSKNPDDVVIVASYRTAIGKGFKGSFKDVGSDYILLKFLEAFLAKTQVNPNLIEDIACANVLKVRSGICEHRAAAISAGIPYTTPIIAINRQCGSGLVAIGDIANKIISGEIDCGLAVGVESMTKDFGLGQSVVSKALEDHPEMIKSKIPMGITNENIAIKYNISRKQQDEFAAKSFQKAEKALASGVFADEILPVESLIEEKDGQGNVSFKKIIVDKDEGVRKGVTAESLGKLRPSFKKDGLTHAGNSSQVSDGAAGVLLMRRSFAEENGFKIEGKFVRCVSVGVPPEIMGVGPAMAIPHILKKTNLVVDDIAAFEINEAFATQCLYSIKACNIPEEKVNINGGAIALGHPVGVTGARQYATILRLLKPGDIGLTSMCIGSGMGSASIVVKE

SEQ ID NO: 2793 - DNA, 1251 bp, Debaryomyces hansenii CBS767
  CDS (1)..(1251): transl_table=12
atggacagattaaatcaactttctggacaattgaacccatcttctaaacaagccttacttgaaaagaacccagacgatgttgttatcgtagctgcttacagaactgccattactaagggtcttaaaggtggattcaaggacgttcattccgattatatcttgagaaactttttagtggaatttatcaagaaaaccaatgttgacccaaacttaattgaagatgttgcatgtggtaacgttttaaatagaggtgcaggtgcgaatgagcatcgtggtgcttgtctttccgctggtattccatacaccgctggtttcatcgctttgaacagattatgttcttctggtttgatggcgatttctgaaattgccaacaagattaagtgtggtgaaatcgactgtggattagctgcaggttccgaatcgatgactgccaactggggtcctcaagcactttctaagtctgatccaaacttagctgatgacccagaaatggaaaagtgtatgattccaatgggtatcactaacgaaaatgttgctgccaaattcaacatttcaagagctgtccaagatgaattcgctgccaagtcttacgctaaggcaagtgcagcagtcaaacgtggtgcattcaaggatgaaattttgccaattgaaaccgcgtttaaggaaggagatgatgatgatgatgatgaagatgtcaaatacacgaaggctattattgacactgacgaatgtccaagagaaggtgtcactgctgcctctttatctaagattaaacctgctttcaagtcagatggttctactcacgctggtaactcttcccaagtctcagatggtgcgtctggtgtcttattaatgagaagatctttagctgaacaaaagggttacccaatcgaagctaagtacgttttatgctctactgttggtgttccaccagaaatcatgggtattggtccagctgttgccatcccacaagtcttaaagaagactggcttaactgttagtgatgttgatgtattcgaaatcaacgaagctttcgctgctcaatgtttatactcagcgcaagtatgcaaggttccagaagaaaaattaaatataaacggtggtggaatttctcttgggcatccattaggtggtacaggtaccagacaatacgcaactatcttaagattgttaaagaagggtgaaatcggtctcacctctatgtgtatcggttccggtatgggtgctgcttctattcttgttagagaataa

SEQ ID NO: 2794 - protein, 416 aa, Debaryomyces hansenii CBS767
MDRLNQLSGQLNPSSKQALLEKNPDDVVIVAAYRTAITKGLKGGFKDVHSDYILRNFLVEFIKKTNVDPNLIEDVACGNVLNRGAGANEHRGACLSAGIPYTAGFIALNRLCSSGLMAISEIANKIKCGEIDCGLAAGSESMTANWGPQALSKSDPNLADDPEMEKCMIPMGITNENVAAKFNISRAVQDEFAAKSYAKASAAVKRGAFKDEILPIETAFKEGDDDDDDEDVKYTKAIIDTDECPREGVTAASLSKIKPAFKSDGSTHAGNSSQVSDGASGVLLMRRSLAEQKGYPIEAKYVLCSTVGVPPEIMGIGPAVAIPQVLKKTGLTVSDVDVFEINEAFAAQCLYSAQVCKVPEEKLNINGGGISLGHPLGGTGTRQYATILRLLKKGEIGLTSMCIGSGMGAASILVRE

SEQ ID NO: 2795 - DNA, 1245 bp, Yarrowia lipolytica CLIB122
  CDS (1)..(1245)
atggaccgacttaacaacctcgccacccagctcgagcagaaccccgccaagggcctcgacgctatcacctccaagaaccccgatgacgttgtcatcaccgccgcctaccgaactgcccacaccaagggaggcaagggtctgttcaaggacacctcttcttccgagctgctcgcctctctgctggagggcctcgtcaaggagtccaagatcgaccccaagctcatcggtgatgtcgtctgcgggaacgttctcgctgccggtgccggtgccactgagcaccgagctgcctgccttgttgccggcatccccgagaccgttcccttcgtcgctctcaaccgacagtgctcctctggtctgatggccgtcaacgacgttgccaacaagatccgagccggccagattgacattggtatcggctgtggtgtcgagtccatgtccaaccagtacggtcccaactccgtcacccccttctccaacaagttccagaacaacgaggaggctaagaagtgcctgatccccatgggtatcacttccgagaacgttgccgccaagtacaacgtgtcccgaaaggcccaggacgcctttgctgccaagtcctacgagaaggccgccgctgcccaggccgccggcaagttcgaccaggagatcctccccatcaagaccactgttctcgatgatgatgacaacgagaaggaggttaccgtcaacaaggacgacggtatccgacctggtgtcaccgccgagaagctcggcaagctcaagcctgctttctccgccgagggaaccacccacgctggtaacgcctctcagatctccgacggtgccggagccgttctcctcatgcgacgatctgttgccgagaagcttggccagcccatccttgccaagtttgtccactgcaagaccgtcggtgttccccccgagctcatgggaattggccccgcttacgccattcctgctgtccttgaggaccttggtctgaccgtcaacgacgttgacgttttcgagatcaacgaggctttcgcttcccaggctctgttctccatccagcattgtggaatcgacgagtccaaggtcaacccccgaggtggtgccattgctattggccaccctctgggagccaccggtgctcgacagtttgccactctgctctccgagcttaaggagtctggcaagaaggtcggtgtcacctccatgtgcattggtaccggtatgggtgccgcttctctggttgttgccgagtaa

SEQ ID NO: 2796 - protein, 414 aa, Yarrowia lipolytica CLIB122
MDRLNNLATQLEQNPAKGLDAITSKNPDDVVITAAYRTAHTKGGKGLFKDTSSSELLASLLEGLVKESKIDPKLIGDVVCGNVLAAGAGATEHRAACLVAGIPETVPFVALNRQCSSGLMAVNDVANKIRAGQIDIGIGCGVESMSNQYGPNSVTPFSNKFQNNEEAKKCLIPMGITSENVAAKYNVSRKAQDAFAAKSYEKAAAAQAAGKFDQEILPIKTTVLDDDDNEKEVTVNKDDGIRPGVTAEKLGKLKPAFSAEGTTHAGNASQISDGAGAVLLMRRSVAEKLGQPILAKFVHCKTVGVPPELMGIGPAYAIPAVLEDLGLTVNDVDVFEINEAFASQALFSIQHCGIDESKVNPRGGAIAIGHPLGATGARQFATLLSELKESGKKVGVTSMCIGTGMGAASLVVAE

SEQ ID NO: 2797 - DNA, 1254 bp, Aspergillus nidulans FGSC A4
  CDS (1)..(1254)
atggccaccgaacgcctaaactccatcctctctcacctccgcccaggaaataagggcgtcgccgctatcacgcaaaagaatcctgacgacgtcgtcataaccctctccctccgcacgcctctcacaaaagctcgcaagggcggctttaaagacacagaactcgattaccttgtctacgccttgctgaaggaagtgatcgcgaagtcccagatcgaccctaacttgatcgaagacgtctgcctcggcaatgtcaatgatggcaaagctgcctatctcgtccgggccgcctccctcgccgctggaattccacacacagccggcgcatcctcggtgaaccgcttctgttcttccggattgaaagcagtccaggatatcgcaaatcagatttcgctgggggccattgatatcggtgtcgctgttggtgcggagatcatgtccgctggcggtgacaggcttaacaagcctttcaatgaagaggtgctgaagaaccaggaggcggcggactgtatgcagccgatggggcagacaagcgagaatgtcggcaaggacttcaacatcagccgagcacagcaggatgtgtacgcggcggaatctttccggagagctgaggtcgcgcagaaggcgggctggttcgatgatgagatcgtgccgataacgacccgcgtcaaggatccgaagaccggcgaggaacgatctgtgactcttaccaaggacgacggtgttcgctatggaacaaccgtcgaatccctctcaaagattcgacctgcgttcccccagttcggtgataagagtaccggcggaaactcgagccaggttacggacggtgcggcggctgtccttctcatgagacgcagcaaggcgattgaacttgggcagccgatcctggcgaaattcgtcggcgcgactgttgcgggtgtcccgccgcgcgtcatgggcattggacccacggctgcgattccgaagctgttgagcaagttcaatctcgacaagaatgacgtagatatctacgaaattaatgaggcctttgcgtcgatggcggtgtattgcgttgaaaagttgggtctggaccatgcgaaggttaatcctaggggtggtgcaattgcgttgggacacccgctcggcgcgactggggcgaggcaaatcgcgactattctaagcgaagcgaggagaacgaaggccaaggtacttgttacgagtatgtgcattggcactggtcaaggcatggctggattatttgtaaacgagcaggtttaa

SEQ ID NO: 2798 - protein, 417 aa, Aspergillus nidulans FGSC A4
MATERLNSILSHLRPGNKGVAAITQKNPDDVVITLSLRTPLTKARKGGFKDTELDYLVYALLKEVIAKSQIDPNLIEDVCLGNVNDGKAAYLVRAASLAAGIPHTAGASSVNRFCSSGLKAVQDIANQISLGAIDIGVAVGAEIMSAGGDRLNKPFNEEVLKNQEAADCMQPMGQTSENVGKDFNISRAQQDVYAAESFRRAEVAQKAGWFDDEIVPITTRVKDPKTGEERSVTLTKDDGVRYGTTVESLSKIRPAFPQFGDKSTGGNSSQVTDGAAAVLLMRRSKAIELGQPILAKFVGATVAGVPPRVMGIGPTAAIPKLLSKFNLDKNDVDIYEINEAFASMAVYCVEKLGLDHAKVNPRGGAIALGHPLGATGARQIATILSEARRTKAKVLVTSMCIGTGQGMAGLFVNEQV

SEQ ID NO: 2799 - DNA, 1254 bp, Aspergillus nidulans FGSC A4
  CDS (1)..(1254)
atgtctggtgcgcagcagcgtttgatccaagtggcttcccacatcgggcccaagaagggcgtttccgccatcacagaaaagaaccccgatgatgtcgtcgtaacatgtgcactccgcagcgctctgaccaaaggcggtaagggagggttcaaggataccgctgcagccgatattctggccggtgttttcaagggcgtgattgaccgcagcggtatcgatcctagcctcgttgaggatatttcagtcggtaccgtcctcgcccctggaggcggagctacggagttccgggctgcggcgctcgttgctggcttccctgagaccacagccgtcaagggtctgaaccgtcaatgctcgagcggtctgcaggctattgtggacattgccaatgcgatcaagacgggtatgattgaagttggtattggtgccggtgtggagagcatgacttcgcaatatggccccggcgccgttactgagttctctgaactcctcgaaaaccacgaagaagctgccaactgcaaagttcccatgggtgtcctctccgagcagatggccaaagaccgaaacatctcccgcgccgcacaagacgcctttgccgcgtcatcataccaaaaggccgtaaaggcccaaaaagcaggcctcttcaacgaagaaatccttccccttgatgtcaagtggacagaccccaagacgaacgaggagaagaccattaccgtcaaggctgatgacggcatccgcgacggcatcaccgcggagtcgctcggtaaaatccgcccggcctttgccaaggacggatccatccacgctggtaacgcgtcgcaaatctctgatggcgctgccgctgtcctgcttatgaagcgctcgaccgctgaacgtcttggccagaagatcatcggcaagttcgtctgcgctagcgttgtcggcgtcaagccgctgcttatgggcattggtccctggaaggctatccctgttgcacttcagaaggcgggcatcacgaaggacgatgtcgacatctttgagatcaacgaggccttcgcgtcgcagtgtgtgtggtgcatcaatgaacttgggctacctgaggagaagatcaaccctaagggtggtgctattgcctttggtcacccgcttggatgcacgggagcacgtcagatcagcacgttgctcacggagctgaagcgcacagacaagaaggttggcgttactagtatgtgtgttggaactggtatgggtatggctgccgtctgggttagggagtaa

SEQ ID NO: 2800 - protein, 417 aa, Aspergillus nidulans FGSC A4
MSGAQQRLIQVASHIGPKKGVSAITEKNPDDVVVTCALRSALTKGGKGGFKDTAAADILAGVFKGVIDRSGIDPSLVEDISVGTVLAPGGGATEFRAAALVAGFPETTAVKGLNRQCSSGLQAIVDIANAIKTGMIEVGIGAGVESMTSQYGPGAVTEFSELLENHEEAANCKVPMGVLSEQMAKDRNISRAAQDAFAASSYQKAVKAQKAGLFNEEILPLDVKWTDPKTNEEKTITVKADDGIRDGITAESLGKIRPAFAKDGSIHAGNASQISDGAAAVLLMKRSTAERLGQKIIGKFVCASVVGVKPLLMGIGPWKAIPVALQKAGITKDDVDIFEINEAFASQCVWCINELGLPEEKINPKGGAIAFGHPLGCTGARQISTLLTELKRTDKKVGVTSMCVGTGMGMAAVWVRE

SEQ ID NO: 2801 - DNA, 1242 bp, Aspergillus nidulans FGSC A4
  CDS (1)..(1242)
atggcctctccaatcccccgcggccttcgccaggtcctccaaaaatcgccttcggacatcgttatcctctcatctctccgcactcccgtcactcgtgcaaagaagggcggttttaaggatgcttatccggaagagcttctcgctcatgttttacgcgcgacgctggaggccaacccaaatcttgaccccgctctgatcgaggatgtgtgcatcggctccgtgcttcaagaactcggaggcgcgaaggcaggccgaatggcccagatccacgccggtttccctcacagcgtccccttccacacaatcaaccggcaatgttcatctggtttggctgctatttcaactattgggaacagcattcgggcaggagctctcaacattggtgttggtggaggaatggagtcgatgaccagaaactacggctcgcgcgctatccccactgttctgtggcctgagctcaaggaatcgccctcaaaggattcgagggattgtatcatgcctatgggaatcacctctgagaacgtcgcttctcggtacggtatcagcagggaggaccaggacgcgttcgctgccaactcgcacaagaaggctgcggctgcgcaaaatgctggactattcgactcggagatcgttcccgtaaagactctttcctacgatgctcagaaccctgaagccccgcctacggagataactgtcactaaggatgacggtgttcgcgccaacatttctgtcgagaagatggcctctttgaagccggctttctctgaaactggctccagcactgccggaaacagctcccaggttagcgatggtgctgccgctgctctgttgatgcgtcgatctaccgccacggaactcggcctgacttcgtccatcaaggcccgctgggtcggcacagccgttgctggttgtgcccctgatgagatgggtgttggccctgcagttgccattcccaagctccttcagatgcttgacgttaatatttcggacgttggcatctgggagctcaacgaggctttcgcgtcccaggctctgtactgtgctcgtaagttgggtattgatgaggccaagattaaccccaagggtggcgccattgcgattggtcaccctcttggtgccactggagccagacaggtcgcgaccctgttacctgagcttgagcgtaccggccaggaaatcggtgttgttagcatgtgtatcggaactggcatgggtatggccggcatgtttgttcgggagtaa

SEQ ID NO: 2802 - protein, 413 aa, Aspergillus nidulans FGSC A4
MASPIPRGLRQVLQKSPSDIVILSSLRTPVTRAKKGGFKDAYPEELLAHVLRATLEANPNLDPALIEDVCIGSVLQELGGAKAGRMAQIHAGFPHSVPFHTINRQCSSGLAAISTIGNSIRAGALNIGVGGGMESMTRNYGSRAIPTVLWPELKESPSKDSRDCIMPMGITSENVASRYGISREDQDAFAANSHKKAAAAQNAGLFDSEIVPVKTLSYDAQNPEAPPTEITVTKDDGVRANISVEKMASLKPAFSETGSSTAGNSSQVSDGAAAALLMRRSTATELGLTSSIKARWVGTAVAGCAPDEMGVGPAVAIPKLLQMLDVNISDVGIWELNEAFASQALYCARKLGIDEAKINPKGGAIAIGHPLGATGARQVATLLPELERTGQEIGVVSMCIGTGMGMAGMFVRE

SEQ ID NO: 2803 - DNA, 1266 bp, Aspergillus nidulans FGSC A4
  CDS (1)..(1266)
atgtcatcaccccagcagcgactctcttctatttcaaaccagctctcgggctcgagtgctgccgcctccagggagaaactgttggccaagaaccctgacgatgtggtaatcacgctcgctgttcgaacgccgctcaccaaggcgagaaagggtggtctcaaggacactcgtcttgatgacctgcttatctcgttactgacgagtgtgcgtgaaaggtccaagctggatccgaatctcgtcgaagatgtctgcgtcggcaacactctctgccctggccaggcatatgttgcgcgctctgccgtgctcgcagcaggattccctataacaaccgctgcatcagttgccaaccgtttctgctcttctggattgctggcgattcagaacatcgcaaaccagatcattgccggctcaattgatatcggaattgcagtaggtgctgagagcatgagcaccaatgccgacggtggcgcaccggacctgtccgaggcgatcttgtcgcaccccatcgcgtcgcaaaacacgcaacccatgggccagacatccgagaatgtggccggtcagttcggtatcgcccgcgagcagcacgatcaattcgctgccaaaagctatcagaaggcggagcgtgcccagaaggcgggatggttcgaggacgagatcgtccccgtcaagacgcagatcaaggaccccaagactggcgaaatcaaatccatcatcgttgatagggatgacggtatccgctatggcacaacagctgagtctctggggaagattcgctctgcgttccctcagtggaagccaagcaacactactggtggaaatgccagtcaaatcactgatggtgcagcggcgcttgtgctcatgaagcgatctcgtgcacaggagcttggccagcctattctaggcaagtttgccggagcaaccgttgttggtttggaacccaggatcatgggaattggccctacctatgccattcccaagattctctcgaagttcggtttgaccaacaatgaagtcgacatttttgaaatcaatgaggcgtttgcatcaatgggcgtttactgcgttcagaaacttggtttggatgaggctaaggttaaccctcgtggtggtgctattgccttcggtcatcccctcggtgccacaggcgctcgacaggttgtgactgccctatccgagttgcgacgaacgaacaaaagggtagccgtcacctccatgtgtgttggaacaggcatgggtatggctggtatctttgtttccgaacattag

SEQ ID NO: 2804 - protein, 421 aa, Aspergillus nidulans FGSC A4
MSSPQQRLSSISNQLSGSSAAASREKLLAKNPDDVVITLAVRTPLTKARKGGLKDTRLDDLLISLLTSVRERSKLDPNLVEDVCVGNTLCPGQAYVARSAVLAAGFPITTAASVANRFCSSGLLAIQNIANQIIAGSIDIGIAVGAESMSTNADGGAPDLSEAILSHPIASQNTQPMGQTSENVAGQFGIAREQHDQFAAKSYQKAERAQKAGWFEDEIVPVKTQIKDPKTGEIKSIIVDRDDGIRYGTTAESLGKIRSAFPQWKPSNTTGGNASQITDGAAALVLMKRSRAQELGQPILGKFAGATVVGLEPRIMGIGPTYAIPKILSKFGLTNNEVDIFEINEAFASMGVYCVQKLGLDEAKVNPRGGAIAFGHPLGATGARQVVTALSELRRTNKRVAVTSMCVGTGMGMAGIFVSEH

SEQ ID NO: 2805 - DNA, 1227 bp, Candida albicans SC5314
  CDS (1)..(1227): transl_table=12
atggatagattaaatcaattaagtggtcaattaaaaccaacttcaaaacaatcccttactcaaaagaacccagacgatgttgtcatcgttgcagcatacagaactgccatcggtaaaggtttcaaagggtctttcaaatctgtgcaatctgaattcatcttgactgaattcttgaaagaatttattaaaaagactggagtcgatgcatctttgattgaagatgttgctattggtaacgttttgaaccaagctgctggtgccaccgaacacagaggtgctagtttggctgcaggtattccttacactgcagctttccttgccatcaacagattgtgttcctcagggttaatggccatttctgacattgccaacaaaatcaaaaccggtgaaatcgaatgtggtcttgctggtggtattgaatccatgtctaaaaactatggtagtccaaaagttattccaaagattgacccacacttggctgatgacgaacaaatgagtaaatgtttgattccaatgggtatcaccaacgaaaatgttgctaatgaattcaacattccaagagaaaaacaagatgcctttgctgctaaatcttatagtaaagccgaaaaagccatctcctctggagctttcaaagatgaaatcttaccaatcagatccattatcagatccccagacggttctgaaaaagaaatcattgtcgataccgacgaaggtccaagaaagggtgttgacgctgcttccttgagcaaattgaaaccagcatttggtggtactaccactgccggtaacgcttctcaaatttcagatggtgctgctggtgttttattgatgaagagaagtttggctgaagccaaaggttacccaattgttgctaaatacattgcttgttcaactgttggtgttccgccagaaatcatgggtgttggtccagcttacgccattccagaagtgttgaagagaactggattgactgtggatgacgttgatgtgtttgaaatcaacgaagcttttgctgctcaatgtctttactcagctgaacaatgtaatgttccagaagaaaaattgaacataaacggtggtgccatcgctttaggtcatcctcttggttgtactggtgccagacaatatgccactatcttgagattgttgaaaccaggtgaaattggtttgacttctatgtgtatcggtagtggtatgggtgctgcctccatattgattaaggaatag

SEQ ID NO: 2806 - protein, 408 aa, Candida albicans SC5314
MDRLNQLSGQLKPTSKQSLTQKNPDDVVIVAAYRTAIGKGFKGSFKSVQSEFILTEFLKEFIKKTGVDASLIEDVAIGNVLNQAAGATEHRGASLAAGIPYTAAFLAINRLCSSGLMAISDIANKIKTGEIECGLAGGIESMSKNYGSPKVIPKIDPHLADDEQMSKCLIPMGITNENVANEFNIPREKQDAFAAKSYSKAEKAISSGAFKDEILPIRSIIRSPDGSEKEIIVDTDEGPRKGVDAASLSKLKPAFGGTTTAGNASQISDGAAGVLLMKRSLAEAKGYPIVAKYIACSTVGVPPEIMGVGPAYAIPEVLKRTGLTVDDVDVFEINEAFAAQCLYSAEQCNVPEEKLNINGGAIALGHPLGCTGARQYATILRLLKPGEIGLTSMCIGSGMGAASILIKE

SEQ ID NO: 2807 - DNA, 1233 bp, Candida albicans SC5314
  CDS (1)..(1233): transl_table=12
atgtcatccaaacaacaatacttgaagaagaatcctgacgatgtcgttgtcgttgcagcatacagaactgctttaaccaaaggtggaagaggtggattcaaagatgttggatctgatttccttttgaaaaaattgactgaagaatttgttaaaaaaactggtgttgaccctaaaatcattcaagatgctgccattggtaatgtcttgaacagaagagctggtgatttcgaacatagaggtgcattattatctgctggattaccttattcagttccatttgttgcccttaacagacaatgttcatctgggttaatggccatttctcaagtggccaacaagatcaagactggtgaaattgaatgtggtttagctggtggtgttgaaagtatgacaaaaaactatggtccagaagcattgattgctattgaccctgcttatgaaaaagacccagaatttgttaaaaacggtattccaatgggtattactaatgaaaatgtttgtgccaaattcaatatttcaagagatgttcaagatcaatttgctgctgaatcttatcaaaaagctgaaaaggcacaaaaagaaggtaaatttgatgatgaaattttaccaattgaagttttccaagaagatgaagatgctgaagatgaagacgaagatgaagatgaagatgctgaaccaaaagaaaaattggttgttattagtaaagatgaaggtattagaccaggtgttactaaagaaaaattggctaaaattaaaccagctttcaaatctgatggtgtatcttcagctggtaactcttcacaagtttccgatggtgctgccttggtgttattgatgaaacgttcatttgctgaaaagaatggattcaaaccattggctaaatacatttcttgtggtgttgctggtgtcccaccagaaattatgggtattggtccagctgttgccattccaaaagttttgaaacaaactggattatcagtcagtgatattgatatttatgaaatcaatgaagcatttgccggtcaatgtttgtactcaattgaaagttgtaatattccaagagaaaaagtcaatcttaatgggggtgctattgccttgggtcaccctcttggttgtactggtgctagacaatacgctactattttaagattgttaaaaccaggtgaatttggtgtgacttctatgtgtattggtactggtatgggtgctgcttctgttttggttagagaataa

SEQ ID NO: 2808 - protein, 410 aa, Candida albicans SC5314
MSSKQQYLKKNPDDVVVVAAYRTALTKGGRGGFKDVGSDFLLKKLTEEFVKKTGVDPKIIQDAAIGNVLNRRAGDFEHRGALLSAGLPYSVPFVALNRQCSSGLMAISQVANKIKTGEIECGLAGGVESMTKNYGPEALIAIDPAYEKDPEFVKNGIPMGITNENVCAKFNISRDVQDQFAAESYQKAEKAQKEGKFDDEILPIEVFQEDEDAEDEDEDEDEDAEPKEKLVVISKDEGIRPGVTKEKLAKIKPAFKSDGVSSAGNSSQVSDGAALVLLMKRSFAEKNGFKPLAKYISCGVAGVPPEIMGIGPAVAIPKVLKQTGLSVSDIDIYEINEAFAGQCLYSIESCNIPREKVNLNGGAIALGHPLGCTGARQYATILRLLKPGEFGVTSMCIGTGMGAASVLVRE

SEQ ID NO: 2809 - DNA, 1260 bp, Aspergillus fumigatus Af293
  CDS (1)..(1260)
atgtcttctgctcaacagcgtctttctcaagtctcctcccacttcacgtcgggaggcaagaagggcgtcgccgccatcaccgagaagcatcccgatgatatcgttgtcacatgtgccctgcgtactgccctgaccaagggtggaaagggaggtttcaaggataccgctgccgctgatcttttggccggtgttttcaagggcctcatcgaccgcagtggcatcgaccccaaggtggtggaagatgttgctgttggttccgttcttgcccctggtggcggtgctaccgagttccgtgctgctgcccttgttgccggcttccccgagtcgaccgctgtcagaagcttgaacagacagtgctccagtggtcttcaggccattgtggacatcgccaacgcgatcaagtccggcatgattgaagttggcattggcgcaggtgtggagagcatgtcctctcagtacggacctggcgccgttaccgagttctctgagctccttgagagccatcccgagtccgccaactgcaaggtcccgatgggtgtcttgtcagaacagatggctaaggaccgtaacatttctcgcgccgtccaagatgctttcgctgcctcttcataccagaaggccgtcaaggctcagaaggccggtctcttcaacgaggagattgttcctctccaggtcaagtggactgatcccaagaccggtgaggagaagaccattaccgtcaaggccgacgatggcatccgtgacggcatcacccccgagtccctcggcaagattcgtcccgctttcgccaaggatggttccatccacgccggtaacgcctctcagatctccgacggtgctgccgccgtgctgctgatgaagcgttccaccgctgagcgcctcggccagaagatcatcggcaagtatgttgccgccagcgttgtcggtgtcaagcccctgctcatgggtatcggcccttggaaggccattcccgtcgccctggagaaggctggcatcaccaaggatgaggttgacatctatgagatcaacgaggcctttgcttcccagtgtgtgtggtgcgtcaacgagcttggcctgccccacgagaagatcaaccccaagggaggtgctatagcctttggccaccctctcggctgcaccggtgctaggcagatcagcacccttctgacagagcttaagcgcaccaacaagaaggtcggtgtcaccagcatgtgtgtgggtacgggtatgggtatggccgctgtctgggtcgccgaataa

SEQ ID NO: 2810 - protein, 419 aa, Aspergillus fumigatus Af293
MSSAQQRLSQVSSHFTSGGKKGVAAITEKHPDDIVVTCALRTALTKGGKGGFKDTAAADLLAGVFKGLIDRSGIDPKVVEDVAVGSVLAPGGGATEFRAAALVAGFPESTAVRSLNRQCSSGLQAIVDIANAIKSGMIEVGIGAGVESMSSQYGPGAVTEFSELLESHPESANCKVPMGVLSEQMAKDRNISRAVQDAFAASSYQKAVKAQKAGLFNEEIVPLQVKWTDPKTGEEKTITVKADDGIRDGITPESLGKIRPAFAKDGSIHAGNASQISDGAAAVLLMKRSTAERLGQKIIGKYVAASVVGVKPLLMGIGPWKAIPVALEKAGITKDEVDIYEINEAFASQCVWCVNELGLPHEKINPKGGAIAFGHPLGCTGARQISTLLTELKRTNKKVGVTSMCVGTGMGMAAVWVAE

SEQ ID NO: 2811 - DNA, 1257 bp, Aspergillus fumigatus Af293
  CDS (1)..(1257)
atggccgcagatcgcctaagctcacttctgaaccaccttcgcccttccgggggaagcggagtctccgccatcacacagaagaaccccgatgacgttgtcatcacccttgcgctgcggacgccacttaccaaggccgccaagggcggcttcaaggacaccgacctggactacatgatctacgctctattgaaggaggtagtgcagaagtcgaagctcgatcctgccctcatcgaggacgtctgtctgggcaatgtcaacgacggcaaagcggcctacctcgtgcgcgcggccgccctcgccgccggcatcccccacacagccggcgcgtcgtcggtcaaccggttctgctcctctgggctgaaggccgtgcaagacatcgcgaaccagatccagctgggcgcgatcgacgtgggcatcgcggtcggcgcggagctgatgtctgcaggcggcgaccggctgccgcggccgttcaacgaggaggtgctcaagaaccaggaagcggcggactgcatgcagccgatgggccagacgtcggagaacgtgggcgcggacttcaacatcacgcgcgagatgcaggatacgtacgcggcggagtcgttccggcgggccgaggcggcgcagaaggcgggctggttcgatgatgagatcgtccccatcacgactaaggtgaaggatcccaagactggagaggtcaagactgtgacccttacccgcgacgagggcattcggtatggtaccactgttgaagcgctgagcaagatccggcctgcgttcccgcagtttggaacccggacgacgggcggtaatgccagtcaggttactgatggagctgctgctatcctactcatgcgccgctccaaggccatcgagctcaaccagcccatcctggccaagttctgcggcgcgactgtcgccggtgtgccgccgcgcgtgatgggcatcggtcccaccgcggcgatccccaagttgctgtccaagttcaacctcagcaaggacgacattgacatctacgagatcaacgaggcctttgcctcgatggctgtgtactgcctgaagaacctcggcctggaccatgccaaggtcaacccgcgcggtggtgcgattgcgctcggccacccgttgggcgcgacgggtgcccgtcagatctgcacaattctcagcgaagcgcggcggacgaagagcaagatcctggttacgagtatgtgcatcggcactggccagggaatggctggtttgtttgtgaacgagcaggtttaa

SEQ ID NO: 2812 - protein, 418 aa, Aspergillus fumigatus Af293
MAADRLSSLLNHLRPSGGSGVSAITQKNPDDVVITLALRTPLTKAAKGGFKDTDLDYMIYALLKEVVQKSKLDPALIEDVCLGNVNDGKAAYLVRAAALAAGIPHTAGASSVNRFCSSGLKAVQDIANQIQLGAIDVGIAVGAELMSAGGDRLPRPFNEEVLKNQEAADCMQPMGQTSENVGADFNITREMQDTYAAESFRRAEAAQKAGWFDDEIVPITTKVKDPKTGEVKTVTLTRDEGIRYGTTVEALSKIRPAFPQFGTRTTGGNASQVTDGAAAILLMRRSKAIELNQPILAKFCGATVAGVPPRVMGIGPTAAIPKLLSKFNLSKDDIDIYEINEAFASMAVYCLKNLGLDHAKVNPRGGAIALGHPLGATGARQICTILSEARRTKSKILVTSMCIGTGQGMAGLFVNEQV

SEQ ID NO: 2813 - DNA, 1263 bp, Aspergillus fumigatus Af293
  CDS (1)..(1263)
atgtctacgccacagcaacggttgtcctcgatcgctaaccaggtcgctggttcgaacgtctcggcgaagagcaagctattggccaagaaccctgatgatatcgtaatcacgcttgctgttcggacccctctcacaaaggccagaaaaggtggtctcaaggacaccacagtagataatctcctgatttcattacttacatctatccgcgaaaagtccaacctcgaccccaacctggttgaagatgtctgtgttggtaacgtgcttgcgcctggttccgcatacatcgcccgctccgcggtgcttgcagctggcttccctgtgacggccgccgcctccattgccaaccggttctgttcttctggattgctggcgatccagaacgtcgctaatcagatcatggctgggtctatcgatatcggtatcgcggtcggggccgagagcatgagcaccaacgccgatggaggggccccagagatgtcggctcagatcctgtcgcatcctattgcctcccagaacacccaacccatgggccagacctcagagaacgtcgcagcccagttcaacatttcccgagagcaacacgatcagtttgccgccaagagttatcagaaggccgagcgcgcgcaaaagtccggttggactgccgacgagattgtgcccgtcaagactcaagtcaaagatcccaagacgggcgaggtgaaggacgtcgtcgttgatcgtgacgatggcattcgatatggcaccaccgttgagtccctcagcaagattcgctctgcattccctcaatggaagcccagtgccacaaccggtggaaatgccagtcagatcacggatggcgccgccggtgtcattcttatgaagcggtctcgtgcccaggaactcggacaacccatcattggcaagttttgcggagctactgttgcgggtttggagcctcggatcatgggtattggcccttccattgctattcccaagatcttgtccaagttcaacctgagcaaggatgatatcgatattttcgagattaacgaagcatttgcgtccatgggcgtctactgtgttaacaaactgggtcttgatgagagcaaggtcaatcccaggggtggagcgatcgcactgggtcacccgctgggctgcaccggagctcgccaggttgttactgctctgtctgagctgcgccgccagaacaagagaatcgctgtcacctcgatgtgtgtcggaactggcatgggcatggccgggatctttgtttcggagcattaa

SEQ ID NO: 2814 - protein, 420 aa, Aspergillus fumigatus Af293
MSTPQQRLSSIANQVAGSNVSAKSKLLAKNPDDIVITLAVRTPLTKARKGGLKDTTVDNLLISLLTSIREKSNLDPNLVEDVCVGNVLAPGSAYIARSAVLAAGFPVTAAASIANRFCSSGLLAIQNVANQIMAGSIDIGIAVGAESMSTNADGGAPEMSAQILSHPIASQNTQPMGQTSENVAAQFNISREQHDQFAAKSYQKAERAQKSGWTADEIVPVKTQVKDPKTGEVKDVVVDRDDGIRYGTTVESLSKIRSAFPQWKPSATTGGNASQITDGAAGVILMKRSRAQELGQPIIGKFCGATVAGLEPRIMGIGPSIAIPKILSKFNLSKDDIDIFEINEAFASMGVYCVNKLGLDESKVNPRGGAIALGHPLGCTGARQVVTALSELRRQNKRIAVTSMCVGTGMGMAGIFVSEH

SEQ ID NO: 2815 - DNA, 1212 bp, Ustilago maydis 521
  CDS (1)..(1212)
atgtccgccgcccagcagcgccacggaaagaagaacattcttgccgagcacgatgacgatgtggtcattgtctcggctctgcgaacgcccatcaccaaggccaagaagggcggtctctcacagtgtgctcccgaggagatgctcggctggacgctcaagggtgtccttgctgagtccaagatcgaccccaagttgattgaggatgtcgccgtcggaactgtcctcgctcccggtggtggttccactcaggcacgtatgggctcgctttgggccggcattcctaacactgccggttgcaacagtttgaaccgtcagtgctcgtctggtcttgcagccgtcaaccagattgccaaccagatcgccctaggccagatcgatatcggcattggctctggtgtcgagtcgatgacgctcaactacggcgctggtgtcatgccctccaagatgtcggacgccgtcatggagaacgaggaagccgccgactgcttgatgcccatgggtatcacttcggagaatgtcgccaagaagtacaacattgaccgaaccaagcaagacactttcgctgccgagtccttcgctcgcgccgcagctgcgcaaaaggccggcaaattcaagagcgaaattgtcacagtcaagtacacggacgacgatggcaacgagcgaaccgtcgatgctgacgatggcatccgcgagggtgtcactgttgagtcgctcgccaagcttaagcccgccttcgccaaggacggcttcacccacgctggtaacgcttcgcaagtcagtgacggagctgcctcggtcttgctcgctcgtcgcagcgccgccaagaagcacggtctgcccatcctcggcaagttcgtcacctgtgccgttgtcggtgttccccccaacattatgggcgttggtcccgcgtacgccatccctcgcctctttgagctgacaggtctcaccaaagatgacattgacatctatgagatcaacgaggcatttgcctcgcaggcgctcttttcgattgagcacattggaatcgacaagaagaaggtcaaccctgtcggaggtgctatcgctatgggccaccctctcggtgccaccggtgcgcgacaaattgccaccggtcttgccgaggccaagcgccagggaggcaagaagctcattgtcacctctatgtgcgtcggtaccggtatgggttgtgccgctctcatcgtgtcggcttga

SEQ ID NO: 2816 - protein, 403 aa, Ustilago maydis 521
MSAAQQRHGKKNILAEHDDDVVIVSALRTPITKAKKGGLSQCAPEEMLGWTLKGVLAESKIDPKLIEDVAVGTVLAPGGGSTQARMGSLWAGIPNTAGCNSLNRQCSSGLAAVNQIANQIALGQIDIGIGSGVESMTLNYGAGVMPSKMSDAVMENEEAADCLMPMGITSENVAKKYNIDRTKQDTFAAESFARAAAAQKAGKFKSEIVTVKYTDDDGNERTVDADDGIREGVTVESLAKLKPAFAKDGFTHAGNASQVSDGAASVLLARRSAAKKHGLPILGKFVTCAVVGVPPNIMGVGPAYAIPRLFELTGLTKDDIDIYEINEAFASQALFSIEHIGIDKKKVNPVGGAIAMGHPLGATGARQIATGLAEAKRQGGKKLIVTSMCVGTGMGCAALIVSA

SEQ ID NO: 2817 - DNA, 1257 bp, Cryptococcus neoformans var. neoformans B-3501A
  CDS (1)..(1257)
atggcctctactattcagaatattacaaactctatcccctctctcggtagagcgaggcttttgattaactcttccgacgacgttgtcattgtcagcgctgtcagaacacctattgccaaggcaaagaagggaggtttcaaagattgctgtcctgaagaccttctcgccgccgtctttaccgaagcggtgaagcgaggcaaagtcaatccatcacaaattcaagacgtcgccgtgggaaatgtgctgcctcccggtggaggtgccaatgtggctagaatggcacagctatacgcagggatcccttacacgctgatatatagcagcactcccatcaataccgttaatagacaatgttcgtcaggcttgaccgctgttgttcagatcgccaacgaaatcaaggctggagagattgacattggcgccggtgttgaacacatgaccgctcattacggtgctggcgttctccctgagaagatgtccgaagaaattctctccaacccagagtcagcagactgtctcactcccatgggcatcacctctgaaaacgttgctaagcaatacaacatttcacgagacgtacaagatacttttgctgcgaacagttttggcaaggctgctgctgctcagaaggctggtaaattcaaagaggaaattgtccccgtcaaggtgcggtggactgatcctaagactaacgacgaaaaagaaatcattatagattctgatgaaggcatccgagaaggtgtgactgcagagtctcttgccaagctcaaaccagcatttgccaaggacggcagcactcatgccggcaatgcgtcccaggtgtccgatggcgcagctgctgtcatccttgccaggcgttcggtcgctcaaaagttgggattgccaattttgggcaagtttgtcatctctgccgtcgttggtgtacctcctaaactcatgggtattggccccgcatttgctatccccaaggtccttgagaaggctggcatatccaaggatgatgtcgacttctttgagatcaacgaagccttcgcatctcaagcagtcatgtccatccaacacctccatattcctttcgaaattgtcaatcctgtcggtggcgccatcgctattggtcaccccttgggctgcacgggcgccagacagatcgccacagcattttctgaggccaaacgtgaaaagaagaagatttttgtgacgagcatgtgtatcggaagcggtatgggtatggctgctgtctttgttaacgagcaataa

SEQ ID NO: 2818 - protein, 418 aa, Cryptococcus neoformans var. neoformans B-3501A
MASTIQNITNSIPSLGRARLLINSSDDVVIVSAVRTPIAKAKKGGFKDCCPEDLLAAVFTEAVKRGKVNPSQIQDVAVGNVLPPGGGANVARMAQLYAGIPYTLIYSSTPINTVNRQCSSGLTAVVQIANEIKAGEIDIGAGVEHMTAHYGAGVLPEKMSEEILSNPESADCLTPMGITSENVAKQYNISRDVQDTFAANSFGKAAAAQKAGKFKEEIVPVKVRWTDPKTNDEKEIIIDSDEGIREGVTAESLAKLKPAFAKDGSTHAGNASQVSDGAAAVILARRSVAQKLGLPILGKFVISAVVGVPPKLMGIGPAFAIPKVLEKAGISKDDVDFFEINEAFASQAVMSIQHLHIPFEIVNPVGGAIAIGHPLGCTGARQIATAFSEAKREKKKIFVTSMCIGSGMGMAAVFVNEQ

SEQ ID NO: 2819 - DNA, 1194 bp, Strongylocentrotus purpuratus
  CDS (1)..(1194)
atgtctgatccagttgttatcgtttcagccgttcgcactgcgattggcagtctgaatggagtactgtcgactattccagctcatgatctgggaaccatagtcatcaaggaagccctgcagaggtcaaaggtcagaagcagtgatgtgtcagaggtcatcatgggtcaggtgtacacagcaggtcaaggccagaaccctgctagacaggccagtatgaatgcagggataccagtcgaggtaccagcatataacatgaacttgctgtgtggttctggcctgaagacaattattctaggggcacaggcaatcatgtgtggggaatcttccattgtggttgcagggggtcaggaaagcatgagccaggtgccccatgcagtccatcttcgtagtggtttatctggcgtcagtgacaagcctttggttgatttaatagtgcacgatggcctgatggatgcattcaataactaccacatgggaattacagctgaaaacctggccaagaaatggaaaatcacacgtgaacagcaggaccagttcgctctggggtcgcagctcaaggccgagaaggcccagaaagacggcgtcttcgctacagagattgtcaccgtgccgaccaagagccgcaagcgcaaggccacggtagagtacgacgttgatgagtacccaaggaaggggtcaaccatcgagggaatggctaaactcagatcctgctttatcgaggatgcgacaggaacagttactgcgggaaattcatgcggtatgaatgacggagcagcagcagtggttctcatgaagcagtccgaggctcagaaaaggggcgtggcacctctagcaaggatagcctcgtggggccaggccggggtggatccagctatcatggggtctggtcctattcctgccatcaagaaagctcttgagaaagcaggctggaacattggtgatgttgatctgttcgagttgaatgaggtatttgcagcacaggctctcacagtcacgaaggagcttggtattgacatgtccaaggtcaatatctatgggggagccatagccctgggccaccccttagccatgtcaggaactcgcatcgtggtcaccctactcaacgccatgaaaaggaccaatgtcacgaagggcttggctgctatctgcgtagggggagggatgggcattgccatttgtgtagaagcattttag

SEQ ID NO: 2820 - protein, 397 aa, Strongylocentrotus purpuratus
MSDPVVIVSAVRTAIGSLNGVLSTIPAHDLGTIVIKEALQRSKVRSSDVSEVIMGQVYTAGQGQNPARQASMNAGIPVEVPAYNMNLLCGSGLKTIILGAQAIMCGESSIVVAGGQESMSQVPHAVHLRSGLSGVSDKPLVDLIVHDGLMDAFNNYHMGITAENLAKKWKITREQQDQFALGSQLKAEKAQKDGVFATEIVTVPTKSRKRKATVEYDVDEYPRKGSTIEGMAKLRSCFIEDATGTVTAGNSCGMNDGAAAVVLMKQSEAQKRGVAPLARIASWGQAGVDPAIMGSGPIPAIKKALEKAGWNIGDVDLFELNEVFAAQALTVTKELGIDMSKVNIYGGAIALGHPLAMSGTRIVVTLLNAMKRTNVTKGLAAICVGGGMGIAICVEAF

SEQ ID NO: 2821 - DNA, 1248 bp, Neurospora crassa OR74A
  CDS (1)..(1248)
atggccgtcgaacgtctcggttccatcctcaagcacctgaccccaggtaccgctctgagcaacatcacagccaagaaccccgacgacattgtcatcaccctcgccatccgcacccctctcaccaaggccaagaagggcggcttcaaggacacctcgctcgagtatctcgcctatgccaccctcaaggaggtcaaagagcgctgcaacatggatcccgcgcttgtcgaggatattgccatgggtaatgtctccgatggcaaggccgcctacaagcttcgtgccgctgcccttgctgccggcttccccaacaccgctggtgcctactcgctcaaccgcttctgctcctcgggcctcaaggccgtcgccgacattgcccacgccatctcgtgcggctccatcgaggtcggtatcgccatgggcgccgagtccatgagcgttggcggcgacgccctcgagcagcccttcgacgaggccgttacctcccagtcccaggagtcggccgactgcatgcagcccatgggctggacctcggagaacgtcagtcgtgacttcggcatcacccgcgaggaaatggacaagtacgccgccgagtccttccagcgtgccgagcgcgcccaaaaggccggcctcttcgacgacgagatcgtccccatcaagacccgcgtcaaggacgctaatggcgagtggaaggacgtcaccctcaccaaggatgagggtatccgccccggcactactgccgagagcctctccaagatccgcgttgccttcccccagtggggtcccaccaccacgggcggtaacgcctcccaggttaccgatggcgccgctgctatcttgctcatgaagcgctctaccgccgtcaagctcggccagcccattctcggcaagtacgtcggctccaccgttgctggtctggctcctcgcatcatgggcatcggcccctccatcgccatccccaagcttctcaaccagtacggcctcaccctcaacgatgtcgatgtcgtcgagatcaacgaggctttcgcttccatggctgtctactgccgtgacaagctccagctcgactggaacaagatgaacccccgcggtggtgccattgccctcggccatcccctcggtgccactggtgctagacagattgtcactggcttggccgagtgcaggaaatcgggcaagaaggttctgttgacgagcatgtgcattggtactggcatgggcatggctggtcttttcgtcaacgagcagtaa

SEQ ID NO: 2822 - protein, 415 aa, Neurospora crassa OR74A
MAVERLGSILKHLTPGTALSNITAKNPDDIVITLAIRTPLTKAKKGGFKDTSLEYLAYATLKEVKERCNMDPALVEDIAMGNVSDGKAAYKLRAAALAAGFPNTAGAYSLNRFCSSGLKAVADIAHAISCGSIEVGIAMGAESMSVGGDALEQPFDEAVTSQSQESADCMQPMGWTSENVSRDFGITREEMDKYAAESFQRAERAQKAGLFDDEIVPIKTRVKDANGEWKDVTLTKDEGIRPGTTAESLSKIRVAFPQWGPTTTGGNASQVTDGAAAILLMKRSTAVKLGQPILGKYVGSTVAGLAPRIMGIGPSIAIPKLLNQYGLTLNDVDVVEINEAFASMAVYCRDKLQLDWNKMNPRGGAIALGHPLGATGARQIVTGLAECRKSGKKVLLTSMCIGTGMGMAGLFVNEQ

SEQ ID NO: 2823 - DNA, 1260 bp, Neurospora crassa OR74A
  CDS (1)..(1260)
atgggtgctctcgacagactttctcagatcggcaaccagatctccgctggtgttaccggtggtggccgtgaccagattctccagaagaacgccgatgatatcgtcgtcacctgcgctctccgcactcccttcaccaagggtggcaagggtggcttcaaggacactcacgctgctgacctgatggccggtgccctccgcggcctcatcgagcgctccaagatcgacccctccctcgtcgaggacatcaaggtcggcaccgtcctcgcccccggcggtggtgcgaccgagatgcgcgccgccgctctcgtcgccggcttccccgagtccaccgccgtccacaccctcaaccgccagtgctcctcgggtctccaggcctgcgtcgacatcgccaacgcgatccgctccggtatgatcgaagtcggtgtcggtgccggtgtcgagtccatgtccaccaactacggccccgccgccgtcgccgagttctcggacctgctcgagtcccacaaagaggccgccaactgcaaggtgcccatgggtgtcctgtccgaggacatggccaaggacaagggcgtctcgcgcaaggaccaggacgccttcgctgcctcttcgttccaaaaggctgtcaaggcccaaaaggagggtctcttcaaggaggaaatcctcccgctcaaggccaagttcgaggaccccaagtcaggcgagaccaaggagatcctggttgaccgcgacgacggcatccgcgacggtgtcacggccgagtccctcggcaagatccgcgcggcttttgccaaggatggctccatccacgccggcaacgcctcgcaggtctcggacggtgccgccgccgtcctgctcatgaagcgctctaccgccgagaagcttggtcagcccattctcggcaagtttgtcgccgcttccgtcgtgggcgtcaagcctcttctcatgggcatcggcccctggaaggccattcccaaggtgtttgagctcacgggcatcaacaaggacgacgtcgacatctttgagatcaacgaggcgtttgcttcgcagtgcttgtggtgcgctaacgagcttggtattcccatggagaagatcaaccccaagggcggtgccattgctttcggtcacccgcttggctgcaccggtgcccgccaggtttctacccttctctatgagttgaagaggacaggcaagaaggttggtgttacgtccatgtgcgttggtaccggtatgggtatggctgccgtttgggtggccgagtaa

SEQ ID NO: 2824 - protein, 419 aa, Neurospora crassa OR74A
MGALDRLSQIGNQISAGVTGGGRDQILQKNADDIVVTCALRTPFTKGGKGGFKDTHAADLMAGALRGLIERSKIDPSLVEDIKVGTVLAPGGGATEMRAAALVAGFPESTAVHTLNRQCSSGLQACVDIANAIRSGMIEVGVGAGVESMSTNYGPAAVAEFSDLLESHKEAANCKVPMGVLSEDMAKDKGVSRKDQDAFAASSFQKAVKAQKEGLFKEEILPLKAKFEDPKSGETKEILVDRDDGIRDGVTAESLGKIRAAFAKDGSIHAGNASQVSDGAAAVLLMKRSTAEKLGQPILGKFVAASVVGVKPLLMGIGPWKAIPKVFELTGINKDDVDIFEINEAFASQCLWCANELGIPMEKINPKGGAIAFGHPLGCTGARQVSTLLYELKRTGKKVGVTSMCVGTGMGMAAVWVAE

SEQ ID NO: 2825 - DNA, 1263 bp, Neurospora crassa OR74A
  CDS (1)..(1263)
atgggcgtcctaccaaaaggcctctcctccgtcctagccaaagcgcccactgacgtcgtcatcctctcctctctccgcacccccatcacccgctcctacaagggtcacctcaaggatgcctacccggaagagctcctctccgtcgtcctgcgcgccaccctcgacaaagttcctgagctcaacccatccaaaatcgaagacgtcgccgtcggcgtcgtcctctccgagcttggcggctccaaagccgcccgcatggccctgaaccacgtcggctttgactcttcgtctacctctctctacaccgtcaaccgcgcctgctcctcctcactgcaagccatcgcctccatcgcggcctcgatccgcaccgaggctatcgatgtcggcatcggcgccggcatggagagcatgacgcgcaactacggctcgcgcgcgatcccgacttcgtactggcctgctctcaaggagagccctgtcaaggacgcgcgggactgcgtcatgcccatgggtttgacttcggaaaacgtcgcgagccggtatggtgtctcgcgcgaggaccaggatgcgtttgccgtcaagtcgcaccagttggctgcgcaggcgcgcgctgagggccggttcaaggaggaaatcgttccggtgacgacgcagtatcaggaggtcgacaaggccgggaacaaggtgggcgaaccgcaaacggtcacggtcacggaggacgacggcatcaggccgacggcgtcgctggagggcatggcgaagctgaagcctgctttcaagccggacggcgccagcacggcgggtaattcgagccaggtcagcgatggtgcggcggcgacgctgttgatgaggaggagcacggccacggcgttgggattgggagaccgcattatcggcaagtttgtggctgccaacacggtggggtgcaagccggatgagatgggcatcggccccgcggtggctatccccaagttgttgggccagctggggttggagaacaaggacgtcgataggtgggagatcaacgaggcttttgccagtcaggcgatctactgcttgagggagctggggcttgaggaggcttggaaggatggtaaggttaacccggatggtggtgcgattgctttgggtcaccccttgggcgccactggtgcgagaatggtgagcactctgttgcatggtctcggaaggacgggtggtgaggtgggtgtggtcagcatgtgtgttggtactggcatgggcatggctggtgtctttgttagggagtaa

SEQ ID NO: 2826 - protein, 420 aa, Neurospora crassa OR74A
MGVLPKGLSSVLAKAPTDVVILSSLRTPITRSYKGHLKDAYPEELLSVVLRATLDKVPELNPSKIEDVAVGVVLSELGGSKAARMALNHVGFDSSSTSLYTVNRACSSSLQAIASIAASIRTEAIDVGIGAGMESMTRNYGSRAIPTSYWPALKESPVKDARDCVMPMGLTSENVASRYGVSREDQDAFAVKSHQLAAQARAEGRFKEEIVPVTTQYQEVDKAGNKVGEPQTVTVTEDDGIRPTASLEGMAKLKPAFKPDGASTAGNSSQVSDGAAATLLMRRSTATALGLGDRIIGKFVAANTVGCKPDEMGIGPAVAIPKLLGQLGLENKDVDRWEINEAFASQAIYCLRELGLEEAWKDGKVNPDGGAIALGHPLGATGARMVSTLLHGLGRTGGEVGVVSMCVGTGMGMAGVFVRE

SEQ ID NO: 2827 - DNA, 1197 bp, Tribolium castaneum
  CDS (1)..(1197)
atgaccgctttagttaaaggtgtggtaattgtcgcagccaaacgtacccctttcggtacctatggtggcaaattcacaaaaacctcagccgtggaactccaaactgttgctgcgaaagcagccctggcttctggaaacgtaaaaccggaattaatcgataccgtagtcgtcggtaacgtattaaccagttcttcagcggatggtgctttcattccaaggcatacggccctgagatgcggcattcctcaagaacggcctgctttcctcgtcaatagactttgcggttccggctttcagtctatagtaaatggagttcaggatattttaacaggcgctgctgaaatttccctaaccggaggtacagacaacatgtcccaaactccacacactgccagaaacgtccggtttggggttcccctcggccaggatatcgtactggaggactcgctgtggctcggcttgactgattcctactgcaaaatgccgatggctcttacagccgaaaaattgggagcacaatttaatatcacacgcgacgaagtcgacgaattttctttgagatctcaacagttatggaaagctgcacaagacggcggccgatttaaagaagaaatcgcccctgttcccattaaagtgaaaaaggaaaccgtcaacttggaggttgatgagcatccgcgcccccaaactacgttagacggccttaagaaacttccaactttgtttaaacaaaatggtttggttaccgcaggctcggcatctggcatttgtgacggtgcaggtgccgttatcgtggccagtgaacaagcggcaagcaaacacaatctgacacccttggctcgaattgtggctttttctgccgttggtgttgaccccaccattatgggcattggcccagcaccagccatccgaaatgtgcttaaagccagtggcaaaactctcgatgatattgacctaattgagatcaacgaggcttttgcggcacaaacacttgcctgtgccaaagacttgaaactggatatcaataaactgaatgtggatggtggagcgattgctcttggacatcctttgggtgcttctggtgccagaataactgcacatttggtgcatgaattgaggagaaggaaggccaaatttggaattggatcagcatgtattggaggcggacaaggtatcgctatcatgattgaagctttgtaa

SEQ ID NO: 2828 - protein, 398 aa, Tribolium castaneum
MTALVKGVVIVAAKRTPFGTYGGKFTKTSAVELQTVAAKAALASGNVKPELIDTVVVGNVLTSSSADGAFIPRHTALRCGIPQERPAFLVNRLCGSGFQSIVNGVQDILTGAAEISLTGGTDNMSQTPHTARNVRFGVPLGQDIVLEDSLWLGLTDSYCKMPMALTAEKLGAQFNITRDEVDEFSLRSQQLWKAAQDGGRFKEEIAPVPIKVKKETVNLEVDEHPRPQTTLDGLKKLPTLFKQNGLVTAGSASGICDGAGAVIVASEQAASKHNLTPLARIVAFSAVGVDPTIMGIGPAPAIRNVLKASGKTLDDIDLIEINEAFAAQTLACAKDLKLDINKLNVDGGAIALGHPLGASGARITAHLVHELRRRKAKFGIGSACIGGGQGIAIMIEAL

SEQ ID NO: 2829 - DNA, 1182 bp, Methylibium petroleiphilum PM1
  CDS (1)..(1182): transl_table=11
atgaccaccgacatcgtgatcgtcagcgccgcccgcaccgccgtgggcaagttcggcggcacgctcgccaagaccccggcgccggaactcggcgccgcagtgatccaggccctgctggcgcgcagcggcctgtccggcgagcagatcagcgaggtgatcctcggtcaggtgctcactgcaggcagtggccagaacccggcgcgccaatcggtcatcaaggccggcctgccgcagggcgtgccggccatgaccatcaacaaggtctgcggctccggcctgaaggccgtgatgctggcagcccaggccatccgcgacggcgatgccgagatcgtgatcgccggcggccaggagaacatgagcctggcgccgcacgtgctgccgggttcacgcgacggtcagcgcatgggggactggaagctgatcgacacgatgatcgtcgacggcctgtgggatgtgtacaaccagtaccacatgggcatcaccgccgaaaacgtggcgaagaaatacggcatcacgcgcgaacagcaggacgcattggcgttgggttcgcagcagaaggcggccgcagcccaggatgccggcaagttcaaggacgagatcgtgccgttcagcatcgcccagaagaagggcgacccgatcgtgttcgcggccgacgagttcatcaaccgcaagaccaacgccgacgtgctggccggcctgcgcccggccttcgacaaggcgggcggcgtgaccgccggcaacgcctcgggcctgaacgacggcgcggccgcggtgctggtcatgagcgcgaagaaggccgaccagctcggcctgaagccgcttgcacgcatcgcctcctacgcgagcgccggcctcgacccgtcgctgatgggcatgggcccggtgcctgccagcaagcgtgccttggagcgggcgggctggaagccggccgacctggatctgctggagatcaacgaggccttcgctgcccaggcctgcgcggtcaacaacgagatgggctgggacaccagcaaggtcaacgtcaacggaggggcgatcgccatcggccacccgatcggtgcgtcgggttgccgcgtgctggtgacgctgctgcacgagatgcagcgccgcggcagcaagcgcggcattgcgtcgctgtgcatcggcggcggcatgggtgttgcattgaccgtggagcgctga

SEQ ID NO: 2830 - protein, 393 aa, Methylibium petroleiphilum PM1
MTTDIVIVSAARTAVGKFGGTLAKTPAPELGAAVIQALLARSGLSGEQISEVILGQVLTAGSGQNPARQSVIKAGLPQGVPAMTINKVCGSGLKAVMLAAQAIRDGDAEIVIAGGQENMSLAPHVLPGSRDGQRMGDWKLIDTMIVDGLWDVYNQYHMGITAENVAKKYGITREQQDALALGSQQKAAAAQDAGKFKDEIVPFSIAQKKGDPIVFAADEFINRKTNADVLAGLRPAFDKAGGVTAGNASGLNDGAAAVLVMSAKKADQLGLKPLARIASYASAGLDPSLMGMGPVPASKRALERAGWKPADLDLLEINEAFAAQACAVNNEMGWDTSKVNVNGGAIAIGHPIGASGCRVLVTLLHEMQRRGSKRGIASLCIGGGMGVALTVER

SEQ ID NO: 2831 - DNA, 1197 bp, Herminiimonas arsenicoxydans
  CDS (1)..(1197): transl_table=11
atgagcaaacaacttcaagatgcctacatcgttgcagcgacccgtacgcctatcggcaaggcgccgcgcggcatgttcaggaatacgcggcctgacgatctgctggtgcgcgtgctgcagtcggtcttgtcacaagtgccggatctcgatcccaatctgatcgaagatgcgatcatcggctgctcctttccggaagcggagcagggtttgaatatggcgcgcatgggtgtgttgctggcaggtttgccgaagacggtcggcggcgtcaccgtcaaccgttactgtgcttccggcctgaccgcgattgcgatggcggctgaccgcatccgcgtcggcgaagcagatgtgatgattgcaggtggtgccgagtccatgtccatggtgccgatgatgggacaccatccggccatgaatatgggcatcttcaaggatgaaaacataggcatggcttacggtatggggctgactgccgaacgcgttgccgagcaatggaaagtatcgcgcgaagcgcaggatcagtttgcgctgaattcgcatctgaaggcattggcggcgcagcagagcggcgaattcaacaatgagatgacgtcggtcgatatcgttgaacgctttccgaatctgtccagcggagaaatcgatatcacgacacgcatggtcaacatggatgaaggcgcgcgcgccgataccagcctggaagcgctggcaaaactgcgaccggtatttgcgccgaaaggttcggtcaccgccggcaatagttcgcaaacctcggatggtgcgggcgcgctgatactggtcagtgaaaaaatcctcaggcaattcaacctgacgccactggcgcgcttcgtttcatttgcagtacgcggtgtgccgccggaaatcatgggcataggacctaaggaagcgatccctgcagccttgcgcgctgccggcctgaagcaggatcagatggactggatagaattgaatgaagcgtttgccgcgcaggcgctggcagtgatacaggatctcggtcttgatccggccagggtcaatcctgtgggcggtgcgattgcgctcggtcatccgctcggcgcaaccggcgcgatacgttcggcgactgtagtccatgcattgcgccgcaaaaatatgaagtacggcatggtcacgatgtgcgtcggaaccggcatgggggccgccggtatattcgagcgcatgtaa

SEQ ID NO: 2832 - protein, 398 aa, Herminiimonas arsenicoxydans
MSKQLQDAYIVAATRTPIGKAPRGMFRNTRPDDLLVRVLQSVLSQVPDLDPNLIEDAIIGCSFPEAEQGLNMARMGVLLAGLPKTVGGVTVNRYCASGLTAIAMAADRIRVGEADVMIAGGAESMSMVPMMGHHPAMNMGIFKDENIGMAYGMGLTAERVAEQWKVSREAQDQFALNSHLKALAAQQSGEFNNEMTSVDIVERFPNLSSGEIDITTRMVNMDEGARADTSLEALAKLRPVFAPKGSVTAGNSSQTSDGAGALILVSEKILRQFNLTPLARFVSFAVRGVPPEIMGIGPKEAIPAALRAAGLKQDQMDWIELNEAFAAQALAVIQDLGLDPARVNPVGGAIALGHPLGATGAIRSATVVHALRRKNMKYGMVTMCVGTGMGAAGIFERM

SEQ ID NO: 2833 - DNA, 1179 bp, Desulfotomaculum reducens MI-1
  CDS (1)..(1179): transl_table=11
atgcgagaagctgtaattgttagtgcggtgcgtactgccgtaggtaaagcaccgcgaggaaaattaaagaatacacgccctgaattcatgggggctgaagtaataaaggaattaattaaaagaacacccggccttaaccctgctgagattgacgatgctgtatttggttgtgccttcccggaaggcgagcaggggatgaacatggcaagattacttctcttaaaggctggtatacctatcgatgtttccggtcttaccattaatcgttactgttcttctggactggagtccattgccatcggtgccaccagaattatgactggattagctgatgtttatatttgcggtggtgttgagagtatgagtgtagttcctatgggcggcaacaaggttgctccagacccggaacttatggtgacataccccgaggcttatatgggcatgggatatactgctgaaaacgtggctgagaaatactgcatttccagggaagagcaagatcaatttgcggtagatagccatgccaaagcagccagggcaattaccgaaggatgctttaaggatcagattgtgccccttactattcgtgaaaaaacttggtcaaagggcaaactgcttataaaagaaagtgtatttgatacagatgaaggtgtaagagcagacaccaaaattgaaggactagcaaaattaaagcctgcctttaagcagggtggcagcgtaaccgccgggaatagctcgcaaaccagtgacggtgctgctgctgtaatggttatgagcagcgaaaaagccaagtcccttggacttaagcctatggctgtatttcgttcctatgctgtgggtggctgtgcgccagaattaatgggcattggacctacagtagctattcccaaggcacttaaattggcgggtattactaaagaacaggtggatttgtttgaactgaatgaggcatttgcagttcaggccttagcatgtatcaaagatctggagctggatccgactaagattaatgttaacggtggagcgatagcgttgggtcacccgctgggttgtacgggggctaaattaacgacccagttgctgtatgaaatgaagcgtcaacaggcgcactacggagtagtaagtatgtgcatcggtggtggtatgggggcagccggtgtattcgagatagttaactaa

SEQ ID NO: 2834 - protein, 392 aa, Desulfotomaculum reducens MI-1
MREAVIVSAVRTAVGKAPRGKLKNTRPEFMGAEVIKELIKRTPGLNPAEIDDAVFGCAFPEGEQGMNMARLLLLKAGIPIDVSGLTINRYCSSGLESIAIGATRIMTGLADVYICGGVESMSVVPMGGNKVAPDPELMVTYPEAYMGMGYTAENVAEKYCISREEQDQFAVDSHAKAARAITEGCFKDQIVPLTIREKTWSKGKLLIKESVFDTDEGVRADTKIEGLAKLKPAFKQGGSVTAGNSSQTSDGAAAVMVMSSEKAKSLGLKPMAVFRSYAVGGCAPELMGIGPTVAIPKALKLAGITKEQVDLFELNEAFAVQALACIKDLELDPTKINVNGGAIALGHPLGCTGAKLTTQLLYEMKRQQAHYGVVSMCIGGGMGAAGVFEIVN

SEQ ID NO: 2835 - DNA, 1203 bp, Novosphingobium aromaticivorans DSM 12444
  CDS (1)..(1203): transl_table=11
atgcgtgaagccgccatcgtttcgaccgcccgcactggcgtgggcaaggcctaccgcggtgccttcaatgacaccgaggcccctgtcctttcctcgcacgtggtcaatgccgcgatcgagcgtgcgggcattgacccggcgcgggtcgacgacgtttacctcggcgtcggcaaccactggaacacgcagagctacaacctcggtcggttgaccgtgcacggttcggtcctgcccgacacgaccgccggcttcactctggaccgcaagtgctcatccgggctcaacgccatcgcgctggccgcgcgggggatcatgtgcaacgagatcgacgttgcggtggccgggggcatggaaagcatctcgctgaccatcaacaagcacgcgcccgccttccgcaaccggtccgaattcatcaaggcggcggacccgcacgcctacatggtgatgatcgagaccgccgagatcgtggccgagcgctatggcgtgagccgcgaggatcaggaccgattcgctgcactgtcgcagcagcgcgcggcggccgcgcaggaggcgggccggttcgacgacgaaatcgtgcctatcacggtgacgaaggcgctgttcgacaaggaaggcaacgagaccggcaaggaacaggtcacactggaccgcgacgagggcgtgcgcgcgggcacgacctatgaggctcttgctggcctgaagccggtgttcaagggtggtcaggtcattgcagagggccgccatgtcactgccgggaacgcctcgcagctttccgatggcgcttcggcgcaggtactgatggatctcgacactgcgcgtgccgaaggacgtccagtgctgggcatctatcgcgggttccaggtcgctggttgcggcgccgaggaaatgggcattggcccggtcttcgccatccccaagctgctcgaccgcgcggggcttaaggtcgaggacatcggtctgttcgaaatcaacgaggctttcgcttcgcaggcggtctattgccagcagaagctggatatcgaccccgaaaggctcaacgtgaatggcggcggaatcgccattggccatccgttcgggatgaccggttcgcgccttgtcggccatgcgctgatcgagggcaggcgccgcggcgtgaagtacgccgtcgtgtcgatgtgcgtggcgggtggcatgggcgccgccggcctgttcgaagtggcctga

SEQ ID NO: 2836 - protein, 400 aa, Novosphingobium aromaticivorans DSM 12444
MREAAIVSTARTGVGKAYRGAFNDTEAPVLSSHVVNAAIERAGIDPARVDDVYLGVGNHWNTQSYNLGRLTVHGSVLPDTTAGFTLDRKCSSGLNAIALAARGIMCNEIDVAVAGGMESISLTINKHAPAFRNRSEFIKAADPHAYMVMIETAEIVAERYGVSREDQDRFAALSQQRAAAAQEAGRFDDEIVPITVTKALFDKEGNETGKEQVTLDRDEGVRAGTTYEALAGLKPVFKGGQVIAEGRHVTAGNASQLSDGASAQVLMDLDTARAEGRPVLGIYRGFQVAGCGAEEMGIGPVFAIPKLLDRAGLKVEDIGLFEINEAFASQAVYCQQKLDIDPERLNVNGGGIAIGHPFGMTGSRLVGHALIEGRRRGVKYAVVSMCVAGGMGAAGLFEVA

SEQ ID NO: 2837 - DNA, 1179 bp, Enterobacter sp. 638
  CDS (1)..(1179): transl_table=11
atgaaagatgtcgtgatagtgggtgcgttacgtacggctatcggctgttttcagggggcgctggcacggcattctgcggtggatctgggcagtgtggtgcttaaagctctggtagagcgcagtggaattgccgcacatgaaatcgacgaagtgattttgggccaggtgctgacggcaggcgccgggcaaaatcctgcgcgtcaggccgcactcaaaggtgggttacccaacacggtgtcggccattacgattaacgatgtttgcggatcgggtctaaaagcgctgcatctggcgacacaggcgattcagtgcggtgaagcagatgtcatcattgcaggcggccaggaaaacatgagccgtgccccgcacgttctcaccgacagccgtaccggcgcgcagctcggcaacagtcagcttctggacagcctggtgcacgatggtttatgggacgctttcaatgattatcacatgggcgtaacggccgaaaacctggcccgcgaatacggcatcagccgtgaattacaggatgattacgcgctcaattcgcagcacaaagcgcgcgccgcaatcgactccggtcgctttcgtgatgaaattgtcccggtaaaaaccgtgcgacaaaatggcgaaccgctgattgtagacaccgacgaacaaccgcgcacggatgccagcgcagaagggctggcgaaactgaatcctgcgtttgagacgctgggctcggtgacggcgggaaacgcctcttctattaacgacggcgcagctgccgtgatgatgatgagcgaaagcaaagcggaagagctgaatctgccggtgctggctcgtatcaaagcctttgccagcgtcggggtcgatccggctctgatgggcatcgcgccggtttacgccacgcgtcgttgtctggaacgtgcgggctggcagcttggcgatgtcgatctgattgaagtcaacgaggcgtttgccgctcaggcgttatccgtggggaaaatgctggagtgggatcctcgccgtgtgaacgtcaacggcggggcgattgccctcggccacccaattggtgcctccggatgccgtattttagtttcactggttcatgaaatgatcaagcgcgatgcacggaaaggtctggcgacgctgtgtattggcggcggtcagggtgtggcattagccatcgaaagataa

SEQ ID NO: 2838 - protein, 392 aa, Enterobacter sp. 638
MKDVVIVGALRTAIGCFQGALARHSAVDLGSVVLKALVERSGIAAHEIDEVILGQVLTAGAGQNPARQAALKGGLPNTVSAITINDVCGSGLKALHLATQAIQCGEADVIIAGGQENMSRAPHVLTDSRTGAQLGNSQLLDSLVHDGLWDAFNDYHMGVTAENLAREYGISRELQDDYALNSQHKARAAIDSGRFRDEIVPVKTVRQNGEPLIVDTDEQPRTDASAEGLAKLNPAFETLGSVTAGNASSINDGAAAVMMMSESKAEELNLPVLARIKAFASVGVDPALMGIAPVYATRRCLERAGWQLGDVDLIEVNEAFAAQALSVGKMLEWDPRRVNVNGGAIALGHPIGASGCRILVSLVHEMIKRDARKGLATLCIGGGQGVALAIER

SEQ ID NO: 2839 - DNA, 1182 bp, Flavobacterium johnsoniae UW101
  CDS (1)..(1182): transl_table=11
atgaaaacagcatatatagtaaaagcatatagaacagcagttggaaaagctccaaaaggtgtttttagatttaaaagacctgatgaattagctgcagaaaccattcagtttatgatggacgaactgcctaatttcgataaaaaacgtatcgatgatgttatggtaggaaatgccatgccggaggcggaacaaggtcttaacgttggacgtttaatctctttaatgggattaaaagtagaagacgttcctggagttacagtaaaccgctattgcgcatctggattagaaactatcggaatggcaactgctaaaatccaatcaggaatggcagattgtatcatcgctggtggtgcagaaagtatgagttatattccgatgggaggttacaaaccaactccggattataaagttgctgcagcgggtcacgaagattactattggggaatgggtttaactgctgaggcggtggctaaccaatacaaaatctctagagaagatcaggatgagtttgcttacaactctcacatgaaagcattaaaagcgcaggcagaagggaaattcgataaacaaatcgttccaattactgttgagcagactttcatcaatgaaaatggtaaaaaagaaacaaaatcatacgttgtaaacaaagacgaaggaccaagagcaggaacttctaaagaagctttagcaggtttaaaaccagtttttgctgctgacggaagtgtaacagctggtaactcttctcaaatgagcgacggtgctgcattcgttttaatcatgagcgaagaaatggtaaaagaattaaaccttgaaccaattgcacgtttggtaaactttgcttcttctggtgttgagccaagaattatgggtatcggtcctgtaaaagcaattccgaaagcgttgaaacaagcaggattaacattgaacgatattgagttaattgaattaaatgaggcttttgcttcacaagctttagcagtaactcgcgaattaaacataaacccagaaatcgtaaacgtaaatggtggagcaattgctttaggtcaccctctgggatgtactggagctaaactttctgttcagttgtttgatgaaatgaaacgtagaggcaataagtacggaatcgtttctatgtgtgtaggaactgggcaaggaagcgcggggatttacgaagtgttgtaa

SEQ ID NO: 2840 - protein, 393 aa, Flavobacterium johnsoniae UW101
MKTAYIVKAYRTAVGKAPKGVFRFKRPDELAAETIQFMMDELPNFDKKRIDDVMVGNAMPEAEQGLNVGRLISLMGLKVEDVPGVTVNRYCASGLETIGMATAKIQSGMADCIIAGGAESMSYIPMGGYKPTPDYKVAAAGHEDYYWGMGLTAEAVANQYKISREDQDEFAYNSHMKALKAQAEGKFDKQIVPITVEQTFINENGKKETKSYVVNKDEGPRAGTSKEALAGLKPVFAADGSVTAGNSSQMSDGAAFVLIMSEEMVKELNLEPIARLVNFASSGVEPRIMGIGPVKAIPKALKQAGLTLNDIELIELNEAFASQALAVTRELNINPEIVNVNGGAIALGHPLGCTGAKLSVQLFDEMKRRGNKYGIVSMCVGTGQGSAGIYEVL

SEQ ID NO: 2841 - DNA, 1188 bp, Bradyrhizobium sp. ORS278
  CDS (1)..(1188): transl_table=11
atgaccgatgccgtcatcgtttccaccgcccgcacgccgatcggcaaggcctatcgcggcgcgctcaacgccaccggcggcgcgacgctgctcggccacgccatcggcgaagccgtcaagcgcgccaagatcgatccggccgaggtcgaggacgtcgtgatgggcgcggccctgcagcagggctcgaccggcggcaacatcgcacgcaaggcgctgttgcgcgccggcctgccggtgtcggtcggcggcaccaccatcgaccggcaatgcgcttcgggtctgcaggcgatcgcgctcgcggcgcgctcggtgatcttcgacggcgtcgagatcgcggtcggcggcggcggcgagtcgatctcgctggtccagaacgacaagatgaacagctttcaggccaccgatgcggcgctgcttgagatcaagggcgacgtctacatgccgatgatcgacaccgccgaggtggtcgccaagcgctacggcatctcgcgcgagaagcaggacgaatatgcgctggagagccagcgccgcaccgcggccgcgcagcagggcggcaagttcaacgaggaactggcgccgatctcgaccaagatggcggtgacagacaaggcgaccggcaacatctcgttcaaggacatcacgctgtcgcaagatgagggcccgcgcccggagaccaccgccgaaggtctcgccggcctcaaggccgtgcgcggcgacggcttcaccatcaccgccggcaatgccagccagctgtcggacggcgcctcggcctcggtgatcatgagcgacaaggaagccgccaagcgcggcctgcagccgctcggcatcttccgcggcttcgtcgcgcatggctgcgagccggacgagatgggcatcggcccggtgttcgcggtgccgcgcctgctgaagcgccacggcctcaccgtcgacgacatcggcctgtgggagctcaacgaggccttcgcagtgcaagtgttgtattgccgcgacaagctcggcatcgaccccgacaagatcaacgtcaatggcggcgccatctcggtcggccatccctacggcatgtcgggcgcgcgcctcaccggccacgccctgatcgagggccgccgccgcaaggccaaatacgccgtcgtcaccatgtgcgtcggcggcggcatgggcgccgccggcctattcgaggtgctgcaataa

SEQ ID NO: 2842 - protein, 395 aa, Bradyrhizobium sp. ORS278
MTDAVIVSTARTPIGKAYRGALNATGGATLLGHAIGEAVKRAKIDPAEVEDVVMGAALQQGSTGGNIARKALLRAGLPVSVGGTTIDRQCASGLQAIALAARSVIFDGVEIAVGGGGESISLVQNDKMNSFQATDAALLEIKGDVYMPMIDTAEVVAKRYGISREKQDEYALESQRRTAAAQQGGKFNEELAPISTKMAVTDKATGNISFKDITLSQDEGPRPETTAEGLAGLKAVRGDGFTITAGNASQLSDGASASVIMSDKEAAKRGLQPLGIFRGFVAHGCEPDEMGIGPVFAVPRLLKRHGLTVDDIGLWELNEAFAVQVLYCRDKLGIDPDKINVNGGAISVGHPYGMSGARLTGHALIEGRRRKAKYAVVTMCVGGGMGAAGLFEVLQ

SEQ ID NO: 2843 - DNA, 1173 bp, Geobacter uraniireducens Rf4
  CDS (1)..(1173): transl_table=11
atgagaaacgcatatattttagctgcctttcgtacccccggttgtaaggctaaaaaggggaaattcaaggatgtgcggcctgacgacctggctgcggtagcaatcagaggccttttggagaaaacaggaatagatcccctcgctgttgaagacatcatcatggggtgtgcatttccggaaggggagcaggggatgaacatggcaagggtggcggccatgaaggccggcgtcccttaccaggtgccggcccagaccgtcaaccggttctgctcttccggattgcagagcattgcttctgctgctgagcgaatcatggccggtttcagtgactgcatcattgccggcggctcggaaagcatgagcatggttcccatggggggcaataaatacagtgccaaccctgggctggtagcgtcctggccggagtcgttcgcctccatggggatcaccgccgaattggttgccgagcagtacacggtttcccgcgaggagcaggatttctttgctgcggagagccatagaaaggcagccgcagccatagcgcaggggaaattcgcagaggaaatcctgccggttgaagtggaaagctgcgctctggtgaacggcaagatgaaacggagtaaggagttggtcaccgttgatgacggtgtgcgtggtgaaacgacccggcatgggctcggcaagctgaagccggcgttcagcgccaccgggacggtaacggcagggaactcatcccagatgaccgacggcgccgcagcggtgttggtggtgtcggaagagttcctgaaaaaatgcggtaaagtgcccattggccgctttgtttcgttcgcagtgcgcggtgtgccgccggaaatcatgggaatcggccccatcgaggcgatcccggcagccctcaagctggcggggctcaagctggaggatatcggactgtacgagctgaacgaagcgtttgccgcccagtccattgcctgcgtgaaaaccttggggatcgatccggcccgggttaacgtcaacggcggcgccatagccctcggccaccccttggggtgcaccggcgcaaaactgaccacgtcgctccttcatgagatgcagcgcagcaatacccgctatggcgtcgtttccatgtgcatcggcggcgggatgggcgcagcgggaattttcgagaagatgtaa

SEQ ID NO: 2844 - protein, 390 aa, Geobacter uraniireducens Rf4
MRNAYILAAFRTPGCKAKKGKFKDVRPDDLAAVAIRGLLEKTGIDPLAVEDIIMGCAFPEGEQGMNMARVAAMKAGVPYQVPAQTVNRFCSSGLQSIASAAERIMAGFSDCIIAGGSESMSMVPMGGNKYSANPGLVASWPESFASMGITAELVAEQYTVSREEQDFFAAESHRKAAAAIAQGKFAEEILPVEVESCALVNGKMKRSKELVTVDDGVRGETTRHGLGKLKPAFSATGTVTAGNSSQMTDGAAAVLVVSEEFLKKCGKVPIGRFVSFAVRGVPPEIMGIGPIEAIPAALKLAGLKLEDIGLYELNEAFAAQSIACVKTLGIDPARVNVNGGAIALGHPLGCTGAKLTTSLLHEMQRSNTRYGVVSMCIGGGMGAAGIFEKM

SEQ ID NO: 2845 - DNA, 1173 bp, Acidiphilium cryptum JF-5
  CDS (1)..(1173): transl_table=11
atggacgacatcgtcatcgccgcggccgcccgcacgccggtcggcagcttcaacggcgcctttgccgccaccccggcgcatgtgctgggcgaggttgccatcagggccgccatggagcgtgccggactttccgccgacgaggtcgacgaggtgatcctcggccaggtgctctccgccggcgcgggccagaaccccgcccgccaggccgcgcgcaatgccggcatcccggatgccaagaccgcgttcggcatcaaccaggtctgcggctccggcctgcgcgccgtcgcgctggccgcgcagcaggtgatgtccggccagtccgatatcgtcatcgccggcggccaggagagcatgtcgctcagcacccatgtcgcccatctgcgggccggcaccaagatgggcgatgtcaagttcatcgactccatgatcaaggacgggctgtgggatgccttcaacggctaccacatgggcaccaccgccgagaacgtcgcccggtcctatcagatcacccgcgaggagcaggacgccctcgccctcgcctcgcagcagaaggcctcggcggcgcagaagtccggccgcttccgcgacgagatcgcgccggtgacgatcgtcacacgcaagggcgaggtcgtgatcgccgatgacgaatacatccgccatgacgcctcggccgagagcatggcgaagctcaagcccgccttctcgaaggacggcaccgtgaccgccggcaacgcctccggcatcaacgacggcgccgccgccctcgtcgtcatgtcggcgaaggaagcggcgaagcgcggcctgacgccgctggcccgcatcgccagcttcgccaccgccggcgtcgatcccgcggtgatgggcaccgggccgatcccctcctcgcagaaagcgctcgcccgcgccggctggtcggtcgccgatctcgacctgatcgaggcgaacgaggccttcgcggcacaggcctgcgcggtgaacaagggcctcaatctcgacccggcgaaggtcaacgtgaacggcggcgccatcgccatcggccacccgatcggcgcttcgggcgcgcgggtgctcaccacgctccttttcgagatgcagaagcgcgacgcccgcaaggggctcgccacgctgtgcatcggcggcggcatgggcgtggccatgtgcgtcgaacgctga

SEQ ID NO: 2846 - protein, 390 aa, Acidiphilium cryptum JF-5
MDDIVIAAAARTPVGSFNGAFAATPAHVLGEVAIRAAMERAGLSADEVDEVILGQVLSAGAGQNPARQAARNAGIPDAKTAFGINQVCGSGLRAVALAAQQVMSGQSDIVIAGGQESMSLSTHVAHLRAGTKMGDVKFIDSMIKDGLWDAFNGYHMGTTAENVARSYQITREEQDALALASQQKASAAQKSGRFRDEIAPVTIVTRKGEVVIADDEYIRHDASAESMAKLKPAFSKDGTVTAGNASGINDGAAALVVMSAKEAAKRGLTPLARIASFATAGVDPAVMGTGPIPSSQKALARAGWSVADLDLIEANEAFAAQACAVNKGLNLDPAKVNVNGGAIAIGHPIGASGARVLTTLLFEMQKRDARKGLATLCIGGGMGVAMCVER

SEQ ID NO: 2847 - DNA, 1188 bp, Bradyrhizobium sp. BTAi1
  CDS (1)..(1188): transl_table=11
atgaccgatgccgtcatcgtttccaccgcccgcacgccgatcggcaaggcctatcgcggcgcgctcaacgccaccggcggcgccaccctgctcggccacgccatcggcgaggccgtcaagcgcgccaaggtcgatccggccgaggtcgaggacgtcgtgatgggcgcggccctgcagcagggctcgaccggcggcaacatcgcgcgcaaggcgctgttgcgcgccggcctgccggtgtcggtcggcggcaccacgatcgaccgccaatgcgcctccggcctgcaggcgatcgcgctcgccgcgcgctcggtgatcttcgacggtgtcgagatcgcggtcggcggcggtggcgaatcgatctcgctggtccagaacgacaagatgaatgcgttccaggccaccgatccggcgctgctggagatcaagggcgacgtctacatgcccatgatcgacaccgccgagatcgtttccaagcgttatggcatctcgcgcgagaagcaggacgaatatgcgctggaaagccagcgccggacggcagcggcgcagcagggcggcaagttcaacgacgagctggcgccgatcaccaccaagatggccgtgacggacaaggccaccggcaacgtctcgttcaaggacatcacgctatcgcaggacgagggtccgcgcccggagaccacggctgaaggccttgccggcctgaaggcggtgcgcggcgacggcttcaccatcaccgccggcaatgccagccagctgtccgatggcgcctcggcctgcgtgatcatgagcgatgccaccgccgccaagcgcggcctgcagccgctcggcatcttccgcggcttcgttgcgcatggctgcgagcccgacgagatgggcatcggccccgtctttgctgtgccgcgtctgttgaagcgccacggcctgaccgtcgacgacatcggcctgtgggagctgaacgaggcgttcgccgtgcaggtgctgtattgccgtgacaagctcggcatcgacccggacaagatcaacgtcaatggcggcgccatctcggtcggccatccctatggcatgtcgggcgcccgcttgaccggccatgcgctgatcgaaggccgccgccgcaaggcgaagtatgccgtcgtcaccatgtgcgtcggcggcggcatgggcgccgccggcctgttcgaggtgctgcagtaa

SEQ ID NO: 2848 - protein, 395 aa, Bradyrhizobium sp. BTAi1
MTDAVIVSTARTPIGKAYRGALNATGGATLLGHAIGEAVKRAKVDPAEVEDVVMGAALQQGSTGGNIARKALLRAGLPVSVGGTTIDRQCASGLQAIALAARSVIFDGVEIAVGGGGESISLVQNDKMNAFQATDPALLEIKGDVYMPMIDTAEIVSKRYGISREKQDEYALESQRRTAAAQQGGKFNDELAPITTKMAVTDKATGNVSFKDITLSQDEGPRPETTAEGLAGLKAVRGDGFTITAGNASQLSDGASACVIMSDATAAKRGLQPLGIFRGFVAHGCEPDEMGIGPVFAVPRLLKRHGLTVDDIGLWELNEAFAVQVLYCRDKLGIDPDKINVNGGAISVGHPYGMSGARLTGHALIEGRRRKAKYAVVTMCVGGGMGAAGLFEVLQ

SEQ ID NO: 2849 - DNA, 1176 bp, Roseiflexus sp. RS-1
  CDS (1)..(1176): transl_table=11
atgcgagaagcagtgattgtcagcgcagttcgcacagccgtcggcaaagcgccgcgcggtgcactgcgcagtgttcatccgaccgatctggcggcaaccgtgatccggtcggcagtcgagcgcgttcccggtctcgacccgaaagagatcgatgatgttattctgggatgcgccatgcccgaggcggaacagggcttgaatatggcgcgtgtcgcgctcctgcgcgcgggtctgcccacggatgtgccaggtcagacggtcaaccggttctgcgcgtcgggtttgcagaccatcgcccttgcagcgcaacaggtgatgagcggcatgggtgatgtggtcgtcgccgggggcgccgagagcatgagcgccgtacccatgggagggcatcacttcgcgcccaacccggcaatggcggagatgagtcccgatgtatacctcggcatgggtttgaccgctgagaatgtcgccaggcggtacgaggtcagtcgtgaggatcaggatgcctttgcgctacgctcacaccagcgcgcgattgccgccatcgacgccggtctgttcaaggacgagattgtgccgatcgaagtggagcacgtctggttcgaaaacggcagggtacagcgttcaacgatgatcttcgacaccgatgaaggtccgcggcgcgacacctcggctgaagcgctggcgaaactcaaaccggtctttgcgatcaacggcacggtcactgctggcaactcctcgcagaccagcgatggggcagcggcagtggtggttatgagccgcgagaaggctgatgcactcggggtgaagccgctggcgcgcttcgtatcgttcgcggttgcgggtgtgccgccggaaataatggggatcggtccggttgccgccatcccgaaggcacttaagcaagccggcttgaccatcgaccagatcgacctgatcgaactgaacgaagcgtttgcggcacaggcgctggcggtgattcgcgcgctcgaacttgacgaagagaaagtcaacgtcaacggcggcgctattgcgctcgggcatccactgggatgcactggcgccaagttgacagtgcagatcctgcacgaactgcggcgtcgcggcgggcgctacggtctgatcaccatgtgcatcggcggcggcatgggagctgccggcatcgtcgagatgctgtga

SEQ ID NO: 2850 - protein, 391 aa, Roseiflexus sp. RS-1
MREAVIVSAVRTAVGKAPRGALRSVHPTDLAATVIRSAVERVPGLDPKEIDDVILGCAMPEAEQGLNMARVALLRAGLPTDVPGQTVNRFCASGLQTIALAAQQVMSGMGDVVVAGGAESMSAVPMGGHHFAPNPAMAEMSPDVYLGMGLTAENVARRYEVSREDQDAFALRSHQRAIAAIDAGLFKDEIVPIEVEHVWFENGRVQRSTMIFDTDEGPRRDTSAEALAKLKPVFAINGTVTAGNSSQTSDGAAAVVVMSREKADALGVKPLARFVSFAVAGVPPEIMGIGPVAAIPKALKQAGLTIDQIDLIELNEAFAAQALAVIRALELDEEKVNVNGGAIALGHPLGCTGAKLTVQILHELRRRGGRYGLITMCIGGGMGAAGIVEML

SEQ ID NO: 2851 - DNA, 1185 bp, Pseudomonas aeruginosa PA7
  CDS (1)..(1185): transl_table=11
atgcgtgaagtggtgatcgtcgacagcgtccggaccggcctggccaagtccttccgcggcaagttcaacctgacccggccggacgacatggccgcccattgcgtcgacgcgctgctggcgcgcaacgacctcgacccgctgctggtggacgactgcgtcgtcggcgccggttccaacgaaggcgcccagggccacaacatcggacgcaacgtggcggtgctctccggcctcggcatccaggtgccgggtatgaccctcaaccgctattgctcatccggcctgcaggcgatcgccatcgccgccaaccagatcgcctcgggctgcagcgacgtgatcgtcgccggcggcgtcgagtcgatcagcctgaccctgaagagcgtcaacaccgatcacctggtgaacccgctgctgcaaagggaggtgccgggcatctactacccgatggggcagaccgcagaagtcgtcgcccgccgctacggcgtcacccgcgaggcgcaggacgcctacgccctgcagagccagcagcggatggcgcgggcccaggccgcggggctgttcgccgacgagatcgtgccgatgaccacccgctacgccgtggaggacaaggccacgggcgagaaacagctgctcgacggagtggtcgaccgcgacgactgcaaccgcccggacaccaccctagaaggcctggcttcgctgaaaccggcgttcgccgaagacggttcggtcaccgccggcaacgcctcgcagctctccgacggcgcctcgatgaccctgctgatgagcctggacaaggcgctggagctagggctcgaacccaaggccttgttccgcggcttcaccgtggccggctgcgagccggacgagatgggcatcggcccggtgttctcggtgcccaagctgctcaaggcgaagggcctgaagatcgccgacatcgacctctgggagctcaacgaggccttcgcctcgcagtgcctgtactgccgcgaccggctggagatcgacaacgagaagtacaacgtcaacggcggctccatcgccatcggccacccgttcggcatgaccggctcgcgccaggtcggccacctggtccgtgaactgcgtcggcgcaatctgcgctacggcgtggtgaccatgtgcgtgggcggcggcatgggcgccagcgggctgttcgaagcgctgcgctga

SEQ ID NO: 2852 - protein, 394 aa, Pseudomonas aeruginosa PA7
MREVVIVDSVRTGLAKSFRGKFNLTRPDDMAAHCVDALLARNDLDPLLVDDCVVGAGSNEGAQGHNIGRNVAVLSGLGIQVPGMTLNRYCSSGLQAIAIAANQIASGCSDVIVAGGVESISLTLKSVNTDHLVNPLLQREVPGIYYPMGQTAEVVARRYGVTREAQDAYALQSQQRMARAQAAGLFADEIVPMTTRYAVEDKATGEKQLLDGVVDRDDCNRPDTTLEGLASLKPAFAEDGSVTAGNASQLSDGASMTLLMSLDKALELGLEPKALFRGFTVAGCEPDEMGIGPVFSVPKLLKAKGLKIADIDLWELNEAFASQCLYCRDRLEIDNEKYNVNGGSIAIGHPFGMTGSRQVGHLVRELRRRNLRYGVVTMCVGGGMGASGLFEALR

SEQ ID NO: 2853 - DNA, 1197 bp, Janthinobacterium sp. Marseille
  CDS (1)..(1197): transl_table=11
atgagcaaacaacttcaagatgcctacatcgttgccgcgacgcgtacccctatcggtaaggcgccgcgcgggatgttcaagaatacgcggccggatgatttgttggtgcatgccttgcaatcggcattgtcgcaagtgccgtcgctggatccgaatctgattgaagacgcgatagtgggttgttccttcccggaagcagagcagggtttgaacatggcgcgcatgggtgtgttgctggcgggtttgcccaagacggttggtggcgtaacggtaaatcgttattgcgcatccggcctgaccgcgattgcaatggcggcggatcgtatccgcgttggtgaagccgacgtcatgattgcggccggtgccgagtccatgtccatggtgccgatgatgggccatcatccatcaatgaatatgggcatcttcaaggaagaaaacataggcatggcctacggcatgggcctgactgccgaaaaggttgccacgcaatggaaagtcagccgcgaagcgcaagaccagttcgcactgaattcacatcttaaggcattggcagcgcagcaaagcggtgaattcaataatgaaatgacggcagtcgagatcgttgaacgttttccgaatctctccagcggccagatcgacgtcacgacgcgcttggtgaatatggatgaaggagcacgtgccgataccaacctcgaagcactcgccaaactacgcccggtgttttcaccgaaaggctcagtcacagcaggcaacagctcgcaaacttcggatggcgcgggtgcattgatcctcgtcagcgaaaaaatcctcaagcaattcaacctgacaccgctggcgcgcttcgtctccttcgccgtgcgcggtgtgccgccggagatcatgggcataggacctaaggaagcaatacctgccgccttgcgtgtcgccggcctgaagcaggaccagatggactggatagaattgaacgaagccttcgccgcacaagcgctggcagtcatccaggacctcggtcttgatccggccaaggtcaatcctatgggtggtgcgattgcgctgggtcatccattgggtgcgaccggcgcgatccggtcagctactgttgttcacgcactgcgtcgcaaaaatctgaagtacgggatggtaacgatgtgcgttggtaccgggatgggggctgcggggatttttgaaaagatgtaa

SEQ ID NO: 2854 - protein, 398 aa, Janthinobacterium sp. Marseille
MSKQLQDAYIVAATRTPIGKAPRGMFKNTRPDDLLVHALQSALSQVPSLDPNLIEDAIVGCSFPEAEQGLNMARMGVLLAGLPKTVGGVTVNRYCASGLTAIAMAADRIRVGEADVMIAAGAESMSMVPMMGHHPSMNMGIFKEENIGMAYGMGLTAEKVATQWKVSREAQDQFALNSHLKALAAQQSGEFNNEMTAVEIVERFPNLSSGQIDVTTRLVNMDEGARADTNLEALAKLRPVFSPKGSVTAGNSSQTSDGAGALILVSEKILKQFNLTPLARFVSFAVRGVPPEIMGIGPKEAIPAALRVAGLKQDQMDWIELNEAFAAQALAVIQDLGLDPAKVNPMGGAIALGHPLGATGAIRSATVVHALRRKNLKYGMVTMCVGTGMGAAGIFEKM

SEQ ID NO: 2855 - DNA, 1173 bp, Bacillus cereus subsp. cytotoxis NVH 391-98
  CDS (1)..(1173): transl_table=11
atgagagaagctgtcattgttgcaggagcaagaactccggttggaaaagcaaaaaaaggttcattaaaaacagttcgtccagatgatttaggagcgttagtcgtaaaagaaacgttaaaacgtgcgaattatgaaggaccgattgatgatttaatttttggatgtgcgatgccagaagctgaacaaggcttaaatatggcacggaatatcggtggattagcaggcctttcttatgatgttccagctattacaattaaccgctactgctcttcaggcttgcaaagtatcgcttacggtgcagagcgcattatgctaggacactctgaggcggtattatctggcggagctgaatcgatgagtttagttccgatgatggggcatgttgttcgtcctaatagccgacttgttgaagtagcaccagaatattatatgggaatgggacatacagcagagcaagttgcgatgaaatacggaatttctcgcgaggagcaagatgcatttgcagttagaagtcatcaacgtgctgcaaaggcattagctgaagggaaatttacggatgaaacagtgcctgtagaagtaacgttgcgcattgttaacgaaaataacaaattggaagaagaaactattacgttttcacaagatgaaggagtaagagcagatacaacgctagaggtacttgggaaattacgtccggctttcaacgttcgtggttccgtaacggctggtaattcatcgcaaatgagcgatggtgcagcatctgtactactaatggatcgtgaaaaagcagtgagcgatggcatgaagccaatggcgaaattccgctcttttgcagtagccggtgtgccgccagaagtaatgggaatcggtccaattgcggcgattccaaaagctttaaaattagcgggattagagctatctgatattggtttatttgaactaaacgaagcttttgcttctcaatcgattcaagtcattcgtgagcttggattagatgaggaaaaagtaaacgtaaatggcggtgcaattgcacttggacatccactcggttgtacaggagcgaaattaacattatctcttattcatgagatgaaacgacgcaatgagcaattcggtatcgtaacgatgtgcatcggcgggggaatgggagctgcgggagtgtttgaacttctataa

SEQ ID NO: 2856 - protein, 390 aa, Bacillus cereus subsp. cytotoxis NVH 391-98
MREAVIVAGARTPVGKAKKGSLKTVRPDDLGALVVKETLKRANYEGPIDDLIFGCAMPEAEQGLNMARNIGGLAGLSYDVPAITINRYCSSGLQSIAYGAERIMLGHSEAVLSGGAESMSLVPMMGHVVRPNSRLVEVAPEYYMGMGHTAEQVAMKYGISREEQDAFAVRSHQRAAKALAEGKFTDETVPVEVTLRIVNENNKLEEETITFSQDEGVRADTTLEVLGKLRPAFNVRGSVTAGNSSQMSDGAASVLLMDREKAVSDGMKPMAKFRSFAVAGVPPEVMGIGPIAAIPKALKLAGLELSDIGLFELNEAFASQSIQVIRELGLDEEKVNVNGGAIALGHPLGCTGAKLTLSLIHEMKRRNEQFGIVTMCIGGGMGAAGVFELL

SEQ ID NO: 2857 - DNA, 1173 bp, Anaeromyxobacter sp. Fw109-5
  CDS (1)..(1173): transl_table=11
atgagtggagcctggattctcggcgccgtccgcacacccggctgcaaggcgaagaaggggaagctgaaggacgtccgccccgacgacctcgcggccatcgcgatccgcgcgctgctcgagcggaccggggtcgagccggggcgcgtcgaggacgtcatcatgggctgcgcgttccccgagggcgagcagggcatgaacctcgggcgggtggcggccatgcgcgccggcctgccggtggaggtgccggggcagacggtgaaccgcttctgcgcctcggggctgcaggcgatcgcgacggcggccgagcggatcctggccggccacgccgacgtgatcgtggccggcggggcggagagcatgagcctcgtgcccatgggcggcgcgaggttcagcgcgaaccccgggctcgtcgcctcctggcccgagtcgtacgccgcgatggggatcacggccgagctcgtcgcgtcacgctaccgcgtctcgcgcgaggaccaggacgccttcgccgcgcagagccacgcgcgcgcggcggcggcgcaggcgcagaggctcttcgccggcgagctcgtcccggtggacgtggagcgggtcgcgctcgtcgacgggaagctcgcgcgcgggcgggagcgcgtggaggccgacgacggggtgcgggccgacaccacgccggaggcgctcgcgcggctcgcgccggcgttcaaggcgaacggcagcgtcaccgccggcaacgcctcccagatgacggacggggcggccgcggtcctcgtggtctcggaggcgttcctcgcccggacggaggtcgctccgctcggccgcttcgtctcgtacgcggtgcggggtgtgccgccggaggtcatggggatcggaccggtggaggcgatcccgctggcgctcgcgcgcgccgggatcctcgaggagcagctcgggcaggtggagctgaacgaggccttcgcggcccaggcgatcacctgcgtgcgagcgctcgggctcgacccggcgcgggtgaacccgaccggcggggccatcgcgctcggccacccgctcggctgcaccggcgcgaagctcaccgccacgctgctgcacgggctgcgcaggaccggcgagcggtacggagcggtgtcgatgtgcgtgggcggcgggatgggcgcggcggcggtcttcgagcgcgcgtag

SEQ ID NO: 2858 - protein, 390 aa, Anaeromyxobacter sp. Fw109-5
MSGAWILGAVRTPGCKAKKGKLKDVRPDDLAAIAIRALLERTGVEPGRVEDVIMGCAFPEGEQGMNLGRVAAMRAGLPVEVPGQTVNRFCASGLQAIATAAERILAGHADVIVAGGAESMSLVPMGGARFSANPGLVASWPESYAAMGITAELVASRYRVSREDQDAFAAQSHARAAAAQAQRLFAGELVPVDVERVALVDGKLARGRERVEADDGVRADTTPEALARLAPAFKANGSVTAGNASQMTDGAAAVLVVSEAFLARTEVAPLGRFVSYAVRGVPPEVMGIGPVEAIPLALARAGILEEQLGQVELNEAFAAQAITCVRALGLDPARVNPTGGAIALGHPLGCTGAKLTATLLHGLRRTGERYGAVSMCVGGGMGAAAVFERA

SEQ ID NO: 2859 - DNA, 1221 bp, Parvibaculum lavamentivorans DS-1
  CDS (1)..(1221): transl_table=11
atgtccagagaagcagtcattgtgtccaccgcccgcaccggcctcgccaagtcgggtcgcggtggcttcaacaacacccatggcgccgccatggccggccacgcgatcaagcacgccatcgagcgcgcgaagatcgacccggccgccgtcgaagacgtcatcatgggttgcggcgcgcctgaaggcgccaccggcatgaatgtcggccgtctcgccgccatctgggccggctgcccggtcacgacctccggcaccacggtcaaccgcttctgctcctcgggcctgcagaccatcgccatggccgccggccgcattgtcaatgaaggcgtgcccgtcatggtcggcgccggcgtcgagtcgatctcgctcgtccagatgggcggccagaacctcaatcgcctgaccgaagaaaagctcatgcaggaaaagcctgagctctggatggcgatgatcgagaccgccgaaatcgttgccgagcgttacaacgtcagccgcgactaccaggacgaatacgccctccgcagccagcagcgcatcgccgccgcgcagcaggccggcctcttcaaggacgaaatcgtcccgatgaagaccaagatgaaggtcgtgaacaaggagacgggcgaggaatccctggtcgattacgtcgtcgagaaggacgagtgcaaccgtccggagacgacgcttgaatcgctccagggtctgaagccggtcttcaagaacggccagaagatcaaggaaggcaaatacatcaccgccggcaatgcctcgcagctttcggacggcgccgccgccgtcgtgctcatggagcgcaaggaagccgaaaagaacggctccgacattctcggcgtcttccgcggcttcgccgtcgccggttgcgaacccgacgagatgggcatcggcccggtcttcgccgtgccgcgcctgctcgagcgccacggcctcaaggtagacgacatcgacctctgggagctgaatgaagccttcgcgagccagtgcctctacagccgcgaccgcctcggcatcgaccccgagaagtacaacgtcaatggcggctccattgccatcggccatcccttcggcatgactggcgcgcgctgcaccggccacatcctgctcgaaggccgccgccgcaagcaggccggccagaacgtgaagtacggcgttgtcaccatgtgcatcggtggcggcatgggcgccgccggtctcttcgaattcgcgtaa

SEQ ID NO: 2860 - protein, 406 aa, Parvibaculum lavamentivorans DS-1
MSREAVIVSTARTGLAKSGRGGFNNTHGAAMAGHAIKHAIERAKIDPAAVEDVIMGCGAPEGATGMNVGRLAAIWAGCPVTTSGTTVNRFCSSGLQTIAMAAGRIVNEGVPVMVGAGVESISLVQMGGQNLNRLTEEKLMQEKPELWMAMIETAEIVAERYNVSRDYQDEYALRSQQRIAAAQQAGLFKDEIVPMKTKMKVVNKETGEESLVDYVVEKDECNRPETTLESLQGLKPVFKNGQKIKEGKYITAGNASQLSDGAAAVVLMERKEAEKNGSDILGVFRGFAVAGCEPDEMGIGPVFAVPRLLERHGLKVDDIDLWELNEAFASQCLYSRDRLGIDPEKYNVNGGSIAIGHPFGMTGARCTGHILLEGRRRKQAGQNVKYGVVTMCIGGGMGAAGLFEFA

SEQ ID NO: 2861 - DNA, 1176 bp, Bacillus amyloliquefaciens FZB42
  CDS (1)..(1176): transl_table=11
atgagagaagcagtcattgtggccggtgcgagaaccccggtcggtaaagcgaaaaaaggatcgcttgcagccgttcgtcctgatgatttaggcgcgctttgtgtaaaagaaacgctgaaacgggcaggcggatatgaaggaaatatcgatgacttaattatcggatgtgcaacacctgaagccgaacaaggattaaatatggcgcggaatatcggtgcgctggcggggcttcctcatacggtgccggccattacggtgaaccgctactgctcttccgggctccaatccatcgcttacggtgctgaaaaaatcatgatcggcgcgggtgacaccgtcattgcgggcggtgcggaatccatgtcgcaagttccgatgatggggcatgtgacccgcccgaatatcgttttggcggagcatgcgcctgagtattacatgagcatggggcacacagcggagcaggtagccgaaacgtacggcgtatccagagaagaccaggatgcatttgccgtccgcagccatcagaatgccgcaaaagcccttaaagaagggaaattcaatgacgaaatcgtgccggttgaagtatcgctgacagaagtcggtgatgaccataagccgcggaaaaaacaatttaccttttctcaagatgaaggcgttcgtcccggcacatcggctgacgtcttggcgaagctccgtccggctttttctaaaacgggaaccgtgacggccgggaactcttcacaaacaagtgacggcgcggcggctgtcatgctgatggatcgcgaaaaagcatcgtcgctcgggttggccccgcttgtcaaattccgttcctttgccgtagggggcgttccgcctgaggtaatggggatcggtccgattgaagccatcccgcgggcgctcaagcttgccggactcgaattgcaggatatcgggctttttgaattgaatgaggcctttgcttcacaggccattcaagtcatcagatcgcttgggatagatgaagaaaaggtgaacgtcaacggaggcgccatcgcgctcggacatccgctcggatgcaccggaacgaagctgaccctgtcactcattcatgaaatgaaacggagaaacgagcaattcggcgtggtgacgatgtgcatcggaggcggcatgggcgctgccggcgtatttgaactcatttaa

SEQ ID NO: 2862 - protein, 391 aa, Bacillus amyloliquefaciens FZB42
MREAVIVAGARTPVGKAKKGSLAAVRPDDLGALCVKETLKRAGGYEGNIDDLIIGCATPEAEQGLNMARNIGALAGLPHTVPAITVNRYCSSGLQSIAYGAEKIMIGAGDTVIAGGAESMSQVPMMGHVTRPNIVLAEHAPEYYMSMGHTAEQVAETYGVSREDQDAFAVRSHQNAAKALKEGKFNDEIVPVEVSLTEVGDDHKPRKKQFTFSQDEGVRPGTSADVLAKLRPAFSKTGTVTAGNSSQTSDGAAAVMLMDREKASSLGLAPLVKFRSFAVGGVPPEVMGIGPIEAIPRALKLAGLELQDIGLFELNEAFASQAIQVIRSLGIDEEKVNVNGGAIALGHPLGCTGTKLTLSLIHEMKRRNEQFGVVTMCIGGGMGAAGVFELI

SEQ ID NO: 2863 - DNA, 1176 bp, Roseiflexus castenholzii DSM 13941
  CDS (1)..(1176): transl_table=11
atgcgggaagcagtgattgtcagcgccgttcgcaccgccgtcggcaaagcgccgcgcggcacgctgcgcagcgtgcatccgaccgacctggcagcgacggtgattaaggcggcagtcgagcgcgcagccggtctcgatccgaaagagatcgatgacgtcattctgggatgcgccatgccggaagcggagcaggggctgaacatggcgcgtgtcgcgctgctgcgcgccggtctgccgaatgatgtcccggggcagacggtcaaccgtttctgcgcctcgggattgcagacgattgcgttggcggcacaacaggtgatgagcgggatgggtgatgtgatcgttgccggaggtgtggagagcatgagcgccgtgccaatgggcgggcatcatttcgcgccaaacccagccatggcggaaatgaatcccgatgtgtaccttggcatggggttgaccgccgagaatgtggcaaagcgctatgaggtcagccgtgcggatcaggatgcttttgcgctacgatcccaccggcgcgcgattgccgccatcgacgccggggtgttcaaagaggaaatcgtgccggtcgaggtcgaaaacgtctggtttgagaacggcaaggtgcagcgcacgaccacaatcttcgacacggacgaaggaccacgccgcgacacgtcggctgaggcgctggcaaagttgaagccggtctttgcggtaaacggcacggtcaccgccggcaactcgtcgcagacgagcgacggcgcggcggcagtggtggtgatgagccgcgacaaagccgatgcgctgggactgaagccgctggcgcgcttcgtgtcgttcgccgttgccggcgtgccgcctgagatcatggggatcggtccggttctcgctgtgccgaaggcgctgaagctggccgggttgagcctcgatcagatcgacctgatcgagctgaatgaagcctttgccgcgcaggcgctggcggtcatccgcgcgctcgaactcgatgaggaaaaggtcaacgtcaatggcggcgccatcgccctggggcatccgctgggatgcaccggcgcgaagttgaccgtgcagatcttgcacgaactgcggcggcgcggtggacggtacggcttgatcaccatgtgcatcggcggcggcatgggcgcggcaggcgttgtcgagatggtgtga

SEQ ID NO: 2864 - protein, 391 aa, Roseiflexus castenholzii DSM 13941
MREAVIVSAVRTAVGKAPRGTLRSVHPTDLAATVIKAAVERAAGLDPKEIDDVILGCAMPEAEQGLNMARVALLRAGLPNDVPGQTVNRFCASGLQTIALAAQQVMSGMGDVIVAGGVESMSAVPMGGHHFAPNPAMAEMNPDVYLGMGLTAENVAKRYEVSRADQDAFALRSHRRAIAAIDAGVFKEEIVPVEVENVWFENGKVQRTTTIFDTDEGPRRDTSAEALAKLKPVFAVNGTVTAGNSSQTSDGAAAVVVMSRDKADALGLKPLARFVSFAVAGVPPEIMGIGPVLAVPKALKLAGLSLDQIDLIELNEAFAAQALAVIRALELDEEKVNVNGGAIALGHPLGCTGAKLTVQILHELRRRGGRYGLITMCIGGGMGAAGVVEMV

SEQ ID NO: 2865 - DNA, 1185 bp, Staphylococcus aureus subsp. aureus Mu3
  CDS (1)..(1185): transl_table=11
atgcaagaagcatacattgtagcttatgggcgttcagccgcagcgaaagcaaagcaaggcgcattattccacgaaagacctgatgatgtcgcagccaaagtattacaaggcgtattgaaacgtattgacggaaaattcaataagaatatgattgaagatgtcattgttggtacggcttttccagaaggattacaaggacaaaacattgcacgaacgattgcattgcgtgcgggattatctgacacggtaccgggtcaaacagtgaatcgctactgctcatcaggattacaaaccatcgcgattgcagccaatcaaattatggctggtcaaggagatatacttgtagctggtggcgttgaattgatgagtgccgtaccaatgggtggcaacgagcccacaaacaatccaaccttacaatatgatgatataggtgcgtcatatcctatgggtttaactgctgaaaatgtagcatcccaatttgacgtatcacgcgaagatcaagatgcttatgctgtcagaagtcatcaacgtgcctatgacgcacaacgtgatggtcggttcaaagatgaaattattccaatacgggtaaactcagttgaatatacaaacgcaggaccaaaagtacacacaaatatctttgaccaagatgaatttatacgccctgacaccacgatggaggcattagccaaattacgtacagtatttaaagctgacggcactgtgactgcgggaacatctgccccactttctgatggtgcaggatttgtagttttaatgtctggagataaagtgaaagaactaggcgtgacacctattgcacgattcgttggttataaggcagtaggcgttgacccgaaaattatgggtattgggcctgcatatgcgattcctgaagtattgtcactcagcaatctatctgttgaagacattgatttgatcgaattgaacgaagcatttgcttctcaaacgattgcatctattaaagaagtaggtctagatatatcacgtacgaatgtgaatggtggcgctattgctttaggtcatccattaggtgctacaggggcaatgttaaccgcgcgtttacttaatgaaatgggtagacgtcccgatagccgttacggcatggttacgatgtgtattggtgtcggcatgggtgcagctgctatatttgagtatgtgcgttag

SEQ ID NO: 2866 - protein, 394 aa, Staphylococcus aureus subsp. aureus Mu3
MQEAYIVAYGRSAAAKAKQGALFHERPDDVAAKVLQGVLKRIDGKFNKNMIEDVIVGTAFPEGLQGQNIARTIALRAGLSDTVPGQTVNRYCSSGLQTIAIAANQIMAGQGDILVAGGVELMSAVPMGGNEPTNNPTLQYDDIGASYPMGLTAENVASQFDVSREDQDAYAVRSHQRAYDAQRDGRFKDEIIPIRVNSVEYTNAGPKVHTNIFDQDEFIRPDTTMEALAKLRTVFKADGTVTAGTSAPLSDGAGFVVLMSGDKVKELGVTPIARFVGYKAVGVDPKIMGIGPAYAIPEVLSLSNLSVEDIDLIELNEAFASQTIASIKEVGLDISRTNVNGGAIALGHPLGATGAMLTARLLNEMGRRPDSRYGMVTMCIGVGMGAAAIFEYVR

SEQ ID NO: 2867 - DNA, 1179 bp, Serratia proteamaculans 568
  CDS (1)..(1179): transl_table=11
atgcgtgatgccgttattgtttctacagcccgaactccgattggcaaagcctatcgtggcgctttcaatgccaccccatctgcaacactggctgggcatgcaattaagcatgctgtcgagcgagcaggaattttaggtagtgaagtggatgatgtgttactcggttcagccttgcagcaaggtgtgcaaggtttgaacattggccgcctggctgcattgcgggccgggttgcccacgtcagtttcaggtatgtcgttggatcgccagtgcgcctcgggtcttatggctgttgccacggctgccaaacaaatcattgtcgatggtatgagcattgccgttgcgggaggtgtggaatccatctcgatggtgcagactgaccggatacgcattgagccggatatggagcttttcgcgctgtatccagctgcatatatgcaaatggtggatacggctgacatagtggcaaagcgctatgagatcagccgggaagcctgtgacgaatactcgctgcgctcccagcaacgaacggcagcagcacaattagaagggctgttcgacaaggaaattgttcctatgcgttctttgatggcctacaacgatcaggaaaccggcgtattggcttataaagaggtattgctggagcgtgacgaaggcaatcgcccacaaagtacccttgaggatttgcaggctctctattccgtcaaaggacctggcaaaaatgttaccgccggcaacgccagtcaactctccgatggtgcctcagcgctagtgctgatggaagccaaagaggccgaacgaaggggcctgcagccgttaggtcgctatgtaggtatggccgtagcgggtgttgatccggacgagatgggaattggcccagtggcggcggtgcctaaattgctgcatagcaatggtctaaagattgatgatatcggattatgggagctcaatgaggcatttgcagtacaagtactctattgccgagaccgactgggcattccggacgacaggctgaacgtgaacggcggcgcaattgcaatcgggcacccctacggcatgtccggcgcccgtatgacaggccatgcgctgatagaaggaaagcgtagaggcgaacgctacgccgtagtgacgatgtgtatcggtgggggaatgggggcagcgggtttattcgaaatttattga

SEQ ID NO: 2868 - protein, 392 aa, Serratia proteamaculans 568
MRDAVIVSTARTPIGKAYRGAFNATPSATLAGHAIKHAVERAGILGSEVDDVLLGSALQQGVQGLNIGRLAALRAGLPTSVSGMSLDRQCASGLMAVATAAKQIIVDGMSIAVAGGVESISMVQTDRIRIEPDMELFALYPAAYMQMVDTADIVAKRYEISREACDEYSLRSQQRTAAAQLEGLFDKEIVPMRSLMAYNDQETGVLAYKEVLLERDEGNRPQSTLEDLQALYSVKGPGKNVTAGNASQLSDGASALVLMEAKEAERRGLQPLGRYVGMAVAGVDPDEMGIGPVAAVPKLLHSNGLKIDDIGLWELNEAFAVQVLYCRDRLGIPDDRLNVNGGAIAIGHPYGMSGARMTGHALIEGKRRGERYAVVTMCIGGGMGAAGLFEIY

SEQ ID NO: 2869 - DNA, 1176 bp, Bacillus pumilus SAFR-032
  CDS (1)..(1176): transl_table=11
atgagagaagcagtcattgtcgctggcgcaagaacaccagtagggaaggcgaaaaaaggatcgttaaaacatgttcggcctgatgatatgggcgcattgtgtgtaaaagaaacattaaagcgtgctggtgattacgacggacagatagatgatttgatcatcggatgtgcgacaccagaagcggagcaggggttaaatgtggctcggaatattggagcgttagcaggacttccgtatacagtccctgccatcaccattaaccgctactgttcatctggtcttcagtccatcgcttatgcgggtgaacgaatcatgctcggtcaggcagaaacaatcttagccggtggagtcgaatcaatgtcacaagtaccaatgatgggtcattccattcgtccgaatgctcatttggcagagcaagcacctgaatactatatgagcatgggccacacggcagagcaggtggcgcaaaagtatcaggtcactcgtcaagatcaggacgcctttgcggtaagaagtcatcaaaaggcagccaaagcattacaggaagggaaatttacagatgaaattgtatccgttgatgtaacagagcgacgggtaggggagcaatttcaattagaagaacatcaattcacgttctcacaggatgaaggcgtaagagcggggacaacggaagagattctttccactttgcgtccggctttttcaacaaaaggcacggtgaccgcagggaactcttcacaaacaagtgacggcgctgcgtgtgtgatgatgatggatcgagagaaagcatcgtcactttcccttcagccgctcgccaagttcagagcgtttgctgttggcggtgtaccgcctgaagtgatggggatcggtccaattgaagccattccacgtgcgctgaaaatcgctggacttgagctgaaggatatcggactgtttgaattaaacgaagcgtttgcctctcaggccattcaagtcattcgtcatttaggaattgatgaagagaaagtgaatgtcaatggcggggcaatcgcactaggacatccgctcggctgtacaggaacgaaattgacactgtcactcattcatgaaatgaaacggcgaaacgagcaatttggcatcgtcacaatgtgtatcggcgggggcatgggagcagcaggaatttttgaattgatctaa

SEQ ID NO: 2870 - protein, 391 aa, Bacillus pumilus SAFR-032
MREAVIVAGARTPVGKAKKGSLKHVRPDDMGALCVKETLKRAGDYDGQIDDLIIGCATPEAEQGLNVARNIGALAGLPYTVPAITINRYCSSGLQSIAYAGERIMLGQAETILAGGVESMSQVPMMGHSIRPNAHLAEQAPEYYMSMGHTAEQVAQKYQVTRQDQDAFAVRSHQKAAKALQEGKFTDEIVSVDVTERRVGEQFQLEEHQFTFSQDEGVRAGTTEEILSTLRPAFSTKGTVTAGNSSQTSDGAACVMMMDREKASSLSLQPLAKFRAFAVGGVPPEVMGIGPIEAIPRALKIAGLELKDIGLFELNEAFASQAIQVIRHLGIDEEKVNVNGGAIALGHPLGCTGTKLTLSLIHEMKRRNEQFGIVTMCIGGGMGAAGIFELI

SEQ ID NO: 2871 - DNA, 1182 bp, Acaryochloris marina MBIC11017
  CDS (1)..(1182): transl_table=11
atgaataacgcatatatcgtcagtagtgtccgcactgccgttggcaaagcccccaaaggtgcactgcaccatagccgccccgatgacttgggtgccgttgctgttaagggcgcactagataccgtccccaaacttgagatcgatcaagttgatgatctgataatcggctgttccttccctgaagctgaacaggggttcaacttggggcgcgtgattgccctgcgggcagggcttccccactccgttgctggctgcaccgtgaatcgcttttgttcgtcggggttacaaaccattgttatggccacgcaagcgattatgacaggtcaggcagaggtgatcgtggctgggggagctgaatctatgagtctgatcccgatggggggacattacctgacgcccaatccagatctactgtctgagattcctgaagcctatttatcgatggggctaacggcagagaatgtggccgaagaattccagatttctagaactgatcaggatgcttttgccttgcgatcgcatcaaaaagccctggctgcccttgagaagggacggttcaaagacgagattattccctttatggtcaaggcaaccaccttagtagaaggacaactccacaccacccaaaccgtgttcgacgtcgatgaaggcccccgtgctgacaccagccttgaagccttagctcagctcaagccggtctttaaggtcgatggtaccgtcacggcgggcacctcttcccaaatgtcggatggggcagcagcaacagttgtaatgagtgagcgtaaggtcagagaattggcccttgcaccgctaggccgaatgctgggctactccgtggtaggggtaccaccggaactgatgggtatgggtccagtggaggcagtacccaaggtactgaagcaggtggggttatccctcagtgatattggcttgattgagctgaatgaagcctttgcggcccaggccttagcggttatgcgaaagctaggtttggatgaaggcattgtcaatgtgaatggtggtgcgatcgcacttggtcacccattgggctgcacaggagcaaaattgactgccaccctactgcatgagatgaagcgtcggggcattcgctatggtctggtgactatgtgtgttggaggcggcatgggtgctgcaggtgtctttgaaaacttgatgttgtag

SEQ ID NO: 2872 - protein, 393 aa, Acaryochloris marina MBIC11017
MNNAYIVSSVRTAVGKAPKGALHHSRPDDLGAVAVKGALDTVPKLEIDQVDDLIIGCSFPEAEQGFNLGRVIALRAGLPHSVAGCTVNRFCSSGLQTIVMATQAIMTGQAEVIVAGGAESMSLIPMGGHYLTPNPDLLSEIPEAYLSMGLTAENVAEEFQISRTDQDAFALRSHQKALAALEKGRFKDEIIPFMVKATTLVEGQLHTTQTVFDVDEGPRADTSLEALAQLKPVFKVDGTVTAGTSSQMSDGAAATVVMSERKVRELALAPLGRMLGYSVVGVPPELMGMGPVEAVPKVLKQVGLSLSDIGLIELNEAFAAQALAVMRKLGLDEGIVNVNGGAIALGHPLGCTGAKLTATLLHEMKRRGIRYGLVTMCVGGGMGAAGVFENLML

SEQ ID NO: 2873 - DNA, 1179 bp, Herpetosiphon aurantiacus ATCC 23779
  CDS (1)..(1179): transl_table=11
atgaatgaagctgtgattgtagctggtgcgcgaaccgccgtcggcaaatccaagcgtggaatgtttcgcaatagccggcctgatgatttggcagcagcagcgattaaagctgtggttgaacaagcgccaggcctcgaccctcgcgaaatcgaagatttgattttgggttgtgctatgcccgagggcgagcaaggcctgaatatggcacggatcgcatcgctccgcgctggtttaccaatcgatgtgcccgctcaaaccgtcaatcgtttttgcgcttcaggtttgcaaacaattgccttgggtgctgaacgaattatggctggcggcgctgatgtgatcatcgctggtggcgctgaatcgatgagcatggttccaatgtcgggcaataaatttgcaccaaacccatggatggctgaacactaccccgaaatttacatcaacatgggcttgaccgccgaaaatgttgctcgacagttcaatatcagccgcgaagatgccgatgccttctcgtatcgctcgcatatgaaggcgatcgaagcaattcaagcaggtcgctttgctgacgaaattgtaccagtcgatgttgagtttgccgaggccgaagctggcggtgcaatcaagcgcagcaccgcaaccgtcaaggtcgatgaaggcccacgccgtgacacgaccttagaaggcttggccaaattgcgcccagtgtttcatgccaaaggcacagtcactgctggcaattcatcgcaaaccagcgatggcgctgccgctgtgctcttgatgaaccgccaaaaagccgatgaacttgggctaaaaccgttggctcgctttattggctttgcagttggtggcgttgggcctgaagtcatgggcattggcccagtcgtggcgattccaaaagttttgaagaaaactggcttgaatctcagcgacattgatttgattgaattgaacgaggcttttggtgcgcaagctttggcggttattcgcgagcttggcatcgacgaaagcaaaaccaacgtcaatggtggcgcaatcgccttgggtcacccacttggctgtactggcgcgaaactgaccgtccaaatcattaatgaacttcgtcgccgcaatggccgctacggcatggtaacgatgtgtatcggcggtggtatgggcgctgcgggcattttcgagttgttgtaa

SEQ ID NO: 2874 - protein, 392 aa, Herpetosiphon aurantiacus ATCC 23779
MNEAVIVAGARTAVGKSKRGMFRNSRPDDLAAAAIKAVVEQAPGLDPREIEDLILGCAMPEGEQGLNMARIASLRAGLPIDVPAQTVNRFCASGLQTIALGAERIMAGGADVIIAGGAESMSMVPMSGNKFAPNPWMAEHYPEIYINMGLTAENVARQFNISREDADAFSYRSHMKAIEAIQAGRFADEIVPVDVEFAEAEAGGAIKRSTATVKVDEGPRRDTTLEGLAKLRPVFHAKGTVTAGNSSQTSDGAAAVLLMNRQKADELGLKPLARFIGFAVGGVGPEVMGIGPVVAIPKVLKKTGLNLSDIDLIELNEAFGAQALAVIRELGIDESKTNVNGGAIALGHPLGCTGAKLTVQIINELRRRNGRYGMVTMCIGGGMGAAGIFELL

SEQ ID NO: 2875 - DNA, 1197 bp, Delftia acidovorans SPH-1
  CDS (1)..(1197): transl_table=11
atgaaacaaatccaagacgcctacatcgtcgccgccacgcgcacgcccatcggcaagtcgcacaagggctttttccgcaactaccgtcccgacgacctgctggcgaccacgctgaaggccgcgctggcccaggtgccggggctggacccggctgccatcgaggacatcatctgcggctgcgccatccccgaggcccagcagggcctgaacgtggcgcgcatcagcgccgtgctggcgggcctgcccaccagcgtgggtggcatcaccgtgaaccgcttctgcgcctcgggcctgtcggccgtggccatggcggcggaccgcatccgcgtgggcgaggccgacgtgatgatcgcggccggcgtcgagagcatgagcatggtgcccatgatgggcaacgcgccctcgctgtcgccgtccatcttcgagcgcgatggcgacgtgggcattgcctatggcatgggcctgacggccgagaaggtggcccagcagtggaaggtctcgcgcgatgcgcaggacgcctttgcgctggagtcgcaccgccgtgccctggccgcgcagcaggccggcgagttcaaggacgagatcacgcccatcgaggtcaccgaccggggcctggacctggccaagggcgaacccgtggtgcgcacgcgcaccgtggagctggacgagggcgcacgccccgacaccagcctggaaggcctggccaagctgcgcaccgtgttcgcggcgcgcggctcggtgacggccggcaacagctcgcagaccagcgatggcgcaggcgcgctgatcctggccagcggcgcagccgtgcagcgcttcggcctcacgccgctggcgcgcttcgtgagctatgccagcaagggcgtgccgccggccatcatgggcatcggccccatcgaagccatcccggccgcgctgcgctatgcgggcctcaagcaggacgacatcgactggttcgaactcaacgaagcttttgccgcccagtcactggccgtggtcaacacgctggggctggaccccgccaaggtcaatcccatgggcggtgccatcgccctgggccacccgctgggtgccacgggcgccatccgctctgccaccgtggtgcatgcgctgcgccgcaagcaattgcgctacggcatggtgacgatgtgcgtcggaatgggccagggcgccgccggcatcttcgagcgggtctga

SEQ ID NO: 2876 - protein, 398 aa, Delftia acidovorans SPH-1
MKQIQDAYIVAATRTPIGKSHKGFFRNYRPDDLLATTLKAALAQVPGLDPAAIEDIICGCAIPEAQQGLNVARISAVLAGLPTSVGGITVNRFCASGLSAVAMAADRIRVGEADVMIAAGVESMSMVPMMGNAPSLSPSIFERDGDVGIAYGMGLTAEKVAQQWKVSRDAQDAFALESHRRALAAQQAGEFKDEITPIEVTDRGLDLAKGEPVVRTRTVELDEGARPDTSLEGLAKLRTVFAARGSVTAGNSSQTSDGAGALILASGAAVQRFGLTPLARFVSYASKGVPPAIMGIGPIEAIPAALRYAGLKQDDIDWFELNEAFAAQSLAVVNTLGLDPAKVNPMGGAIALGHPLGATGAIRSATVVHALRRKQLRYGMVTMCVGMGQGAAGIFERV

SEQ ID NO: 2877 - DNA, 1182 bp, Sorangium cellulosum 'So ce 56'
  CDS (1)..(1182): transl_table=11
atggtcgacgtcgtaattgcagaggccgtccgctcggccgttggccgggcccacaaagggtcgctcgcgctgaagcgccccgacgagctcgccggcgaggtcgtcgccgcgctgctccagcgcgtcccccaggtgaagccggaggacgtcgaggacctcgtcctcggctgcgccatgccggaaggtgagcaggggctcaacatcgcgcgcgtcgtctcgctcctcggcgggatggcgcaggaagggtcggcgatcaccatcaaccgcttctgctcgagcgggctccaggcgatcgcgagcgcggcgggcagcatcgcgatgggatcgctcgacatcgccatcgccggcggtgtcgagtcgatgacgatggtgccgatgaccggcaacaagctgagcgcgtcgccggaggcgatggagcggtgtccgacggtgtacacgccgatgggcatcaccgcggagaacgtggcgaaccgcttccaggtgagccgcgccgaccaggacgcgttcgcgctgaagagccaccagaaggcggcggcggcgcgcgcggccgggcgcttcgaggacgagatcgtcaccgtgaagggggtgcgcttcgagaacggcaagcgcgcgttcttcgacttccgcaccgatgagctgatccgcaaggagacgacggcggaggcgctcgcggggctgaagccggcgttctcggcgaaggggagcgtcacgccgggcaacagctcgccgctgtcggacggcgccgccgcggcgctcgtgatgagcaaggcgaaggcggacgcgctcggggtgaagccgctcgggtacttccgggcgttcgtgaccgtcggcgtcgaccccgccatcatgggcatcggcccggtgcccgcggtgcgcaagctgctcgcgaggacggggctgaagatggccgacatcgacctcttcgaggtcaacgaggcgttcgcctcgcaggccgtctacgtgcagcggacgctcgagatccccgaggagaagctcaacgtgaacggcggcgcgatcgcgctcggccacccgctcgggtgcaccggcgcgaagctcaccgcgaccgcgctctacgagctgcgccggcgcggcggccggtacgccatcgtgacgatgtgcatcggcggcggcatgggcgcggccggcctcatcgagctggccggcgcgaccgcgcgcgcctga

SEQ ID NO: 2878 - protein, 393 aa, Sorangium cellulosum 'So ce 56'
MVDVVIAEAVRSAVGRAHKGSLALKRPDELAGEVVAALLQRVPQVKPEDVEDLVLGCAMPEGEQGLNIARVVSLLGGMAQEGSAITINRFCSSGLQAIASAAGSIAMGSLDIAIAGGVESMTMVPMTGNKLSASPEAMERCPTVYTPMGITAENVANRFQVSRADQDAFALKSHQKAAAARAAGRFEDEIVTVKGVRFENGKRAFFDFRTDELIRKETTAEALAGLKPAFSAKGSVTPGNSSPLSDGAAAALVMSKAKADALGVKPLGYFRAFVTVGVDPAIMGIGPVPAVRKLLARTGLKMADIDLFEVNEAFASQAVYVQRTLEIPEEKLNVNGGAIALGHPLGCTGAKLTATALYELRRRGGRYAIVTMCIGGGMGAAGLIELAGATARA

SEQ ID NO: 2879 - DNA, 1173 bp, Bacillus weihenstephanensis KBAB4
  CDS (1)..(1173): transl_table=11
atgagagaagctgtcattgttgcgggagcaagaacaccaattggaaaagcaaagaggggttcattaaaaacagttcgtcctgacgatctaggggcgttagtagtaaaagaaacgttaaagcgtgcgaattatgaaggaccaatcgatgatttaattttcggttgtgcgatgccagaagcagagcaaggtttaaatatggctcgtaatatcggcgggctagcaggactttcttacgatgttccagctattacaattaaccgttactgttcttcaggtttacaaagtatcgcttacggagcagagcgcattatgcttggtcactctgaagctgtattatcaggcggagcggaatcaatgagtttagttccaatgatggggcacgttgttcgtccgaacagtcgccttgtagaagctgctccagaatattatatgggtatgggacatacagcagagcaagttgctgtgaaatatggaatttctcgtgaagaacaagatgcatttgcagtaagaagtcatcaacgtgctgcgaaagcattagctgcagggaactttgcggatgaaacagtatctgtagatgtgacattacgctcggttggatcaaacaacaaactgcaagaagaaacaatcattttcgcacaagacgaaggtgtaagagcagagacgacgctagacattttaggtaaattacgtccagcatttaacgttcgcggttctgtaacggctggtaactcttcacaaatgagtgacggtgcagcatctgtactattaatggatcgtgaaaaagcagtgagcgatggcatgaagccacttgcaaaattccgttcattcgcagtagctggagtaccaccagaagtaatgggaatcggcccaattgctgcaattccgaaagcgttaaaattagctggtttagagctatctgatatcggtctatttgaactaaatgaagcattcgcttctcaatctatccaagttattcgtgaacttggtctagatgaagaaaaagtaaacgtaaacggcggtgcaatcgcacttggacatccacttggctgtacaggagcaaaactaacactatctcttattcacgaaatgaaacgtcgcaaccaacaattcggtatcgtaacaatgtgtatcggcggcggaatgggagcagcgggagtgtttgaattactataa

SEQ ID NO: 2880 - protein, 390 aa, Bacillus weihenstephanensis KBAB4
MREAVIVAGARTPIGKAKRGSLKTVRPDDLGALVVKETLKRANYEGPIDDLIFGCAMPEAEQGLNMARNIGGLAGLSYDVPAITINRYCSSGLQSIAYGAERIMLGHSEAVLSGGAESMSLVPMMGHVVRPNSRLVEAAPEYYMGMGHTAEQVAVKYGISREEQDAFAVRSHQRAAKALAAGNFADETVSVDVTLRSVGSNNKLQEETIIFAQDEGVRAETTLDILGKLRPAFNVRGSVTAGNSSQMSDGAASVLLMDREKAVSDGMKPLAKFRSFAVAGVPPEVMGIGPIAAIPKALKLAGLELSDIGLFELNEAFASQSIQVIRELGLDEEKVNVNGGAIALGHPLGCTGAKLTLSLIHEMKRRNQQFGIVTMCIGGGMGAAGVFELL

SEQ ID NO: 2881 - DNA, 1194 bp, Pseudomonas putida GB-1
  CDS (1)..(1194): transl_table=11
atgaccctcgccaatgacccgatcgttatcgtcagcgccgtgcgcacgcccatgggtgggctgcagggcgacctcaaaagcctgacagcgccgcaactgggcagcgcggccattcgcggcgccgtggagcgcgccggcatcgacgccgccagtgtcgagcaagtgttgttcggctgcgtgctgccggccgggcaaggccaggccccggcgcgccaggccgcgctgggcgccgggctggacaagcacaccacctgcaccaccctgaacaagatgtgtggctcgggcatgcaagccgcgatcatggcccatgacttgctgctggccggcactgcagacgtggtggtagcggggggcatggaaagcatgaccaatgccccgtacctgctggacaaagcccgtggtggttaccgcatgggacacggcaagatcatcgaccatatgttcatggacggcctggaagacgcctacgacaaaggccgcctgatgggtaccttcgctgaagactgcgctcaggccaacgccttcagccgcgaagcccaggaccagttcgccatcgcctcgctgacccgtgcccaggacgcgatcagcagcggccgctttgccgccgagatcgtgccggtggaagtcgccgagggcaaggaaaaacgcgtgatcaaggatgacgagcagccgcccaaggcgcgcttggacaagatcccgcagctcaagccggcgttccgtgaaggtggcaccgtgacggcggccaactccagttcgatttccgacggcgctgccgcgctggtgctgatgcgccgctccgaagctgacaagcgcggcctcaagcccctggcagtcatccatggccatgctgccttcgccgacgccccggcgttgttcccgaccgcgccgatcggggccatcgacaaactgctgaaacgcaccggttggaacctggcagaagtcgacttgttcgagatcaacgaggcctttgcggtggtcacgctggcggccatgaagcacctcgacctgccccacgaaaaggtcaacatccacggcggcgcctgcgcactcgggcacccgattggcgcttctggcgctcgcatcctggtaaccctgttgtcggccttgcgccagaacaacctgcgccgaggtgtggccgccatctgcatcggcggtggcgaggccacggccatggctgtcgaatgcctgtactga

SEQ ID NO: 2882 - protein, 397 aa, Pseudomonas putida GB-1
MTLANDPIVIVSAVRTPMGGLQGDLKSLTAPQLGSAAIRGAVERAGIDAASVEQVLFGCVLPAGQGQAPARQAALGAGLDKHTTCTTLNKMCGSGMQAAIMAHDLLLAGTADVVVAGGMESMTNAPYLLDKARGGYRMGHGKIIDHMFMDGLEDAYDKGRLMGTFAEDCAQANAFSREAQDQFAIASLTRAQDAISSGRFAAEIVPVEVAEGKEKRVIKDDEQPPKARLDKIPQLKPAFREGGTVTAANSSSISDGAAALVLMRRSEADKRGLKPLAVIHGHAAFADAPALFPTAPIGAIDKLLKRTGWNLAEVDLFEINEAFAVVTLAAMKHLDLPHEKVNIHGGACALGHPIGASGARILVTLLSALRQNNLRRGVAAICIGGGEATAMAVECLY

SEQ ID NO: 2883 - DNA, 1185 bp, Pseudomonas putida GB-1
  CDS (1)..(1185): transl_table=11
atgagcagcgcagaaatctacgtcgtcagtgccgtccgttcagccattggtggcttcggcggttccctcaaggacctgccgctggccgacctggccagtgccgtgacccgcgccgccatcgagcgttcgggccttgccgccgagcaagtcggccacctggtgatgggcacggtgatccctaccgaaccacgtgacgcgtaccttgcgcgggtagcggcaatgaacgccggcatccccaaggaaaccccggcattcaacgtcaatcgcctgtgcggctctggcctgcaggccatcgtctcggcagcgcaaggcttgctgttgggcgacaccgaggtggccgtggcggccggcgccgaatccatgagccgtggcccgtacctgttgccacaggcccgctggggggcgcgcatgggtgacttgcaaggcatcgactacaccgtcggcgtactgcatgacccgttccagcacttccacatgggcatcaccgccgaaaacgtctcggccaagcacggcatcacccgcgaaatgcaggacgaactggccctgaccagccagcgccgcgccgcccgtgccattgccgaaggccgcttcgacagccagatcgtgcctctggagctgaaaacccgcaaaggcagtgtgcagttcagtgtcgacgaacacgtacgtggcgatgtcaccgccgaacaactggccggcatgaagccggtgttcaagaaagacggcaccgttaccgccggcaacgccagcggtatcaacgatggcgccgccagcctggtgctggccactggtgacgcggtgcgccgcctgggcctgaagccgctggcacgcctggtgggttatgcccacgccggtgtcgaacccgaattgatgggccttgggccgatcccggccacccgcaaggtgctggaaaagaccggcctgaagctgcaggacctggacgtgatcgagtccaacgaagctttcgccgcccaggcctgcgccgtggcccgcgagttgggcttcgacccggaaaaggtcaaccccaacggctcgggcatttccctgggccacccggtaggcgccactggcgcgatcatcgccaccaaggccatccatgagctgcagcgcatccagggccgctacgccctggccaccatgtgcatcggtggcggccaaggcatcgccgttgtcttcgagcgcgtttga

SEQ ID NO: 2884 - protein, 394 aa, Pseudomonas putida GB-1
MSSAEIYVVSAVRSAIGGFGGSLKDLPLADLASAVTRAAIERSGLAAEQVGHLVMGTVIPTEPRDAYLARVAAMNAGIPKETPAFNVNRLCGSGLQAIVSAAQGLLLGDTEVAVAAGAESMSRGPYLLPQARWGARMGDLQGIDYTVGVLHDPFQHFHMGITAENVSAKHGITREMQDELALTSQRRAARAIAEGRFDSQIVPLELKTRKGSVQFSVDEHVRGDVTAEQLAGMKPVFKKDGTVTAGNASGINDGAASLVLATGDAVRRLGLKPLARLVGYAHAGVEPELMGLGPIPATRKVLEKTGLKLQDLDVIESNEAFAAQACAVARELGFDPEKVNPNGSGISLGHPVGATGAIIATKAIHELQRIQGRYALATMCIGGGQGIAVVFERV

SEQ ID NO: 2885 - DNA, 1221 bp, Pseudomonas putida GB-1
  CDS (1)..(1221): transl_table=11
atgactgaaccgaccctcgccgatgccttgatcatcgacgccgtgcgcacccccattggccgctatgccggcgccttgagcagcgttcgcaccgacgacctcgcggccgtcccgctcaaggcgttgatccagcgccaccccgaactggactggaaggccgttgatgacgtgatcctcgggtgcgccaaccaggcaggcgaagacaaccgcaacgtggcccacatggccagcctgctggccgggctaccgctcgaagtgccggggactaccatcaaccgcctgtgcggttctggcctggatgccatcggcaatgcggcccgcgccctgcgctgtggcgaggctgggctgatgctggctggcggcgtggagtcgatgtcgcgtgcgccgtttgtaatgggtaagtcggaacaggcattcggccgcacggcggaactgttcgacaccaccatcggctggcgtttcgtcaacccacggatgaaggccgcctacggtaccgattcgatgccggaaactgccgagaacgtggctgagcagtttggtatttcccgcgccgaccaggatgttttcgccctgcgcagccagcacaaggctgccgcagcgcaggcccgaggccgcctggcccgggaaatcgtgccggtcgagattgcgcagcgcaaaggcccggccaaagtggtcgagcatgacgagcacccacgcggcgacacgacgctggagcagttggccaagctgggtactccattccgagagggggggagcgtaaccgccggcaatgcctccggggtcaatgacggcgcgtgcgccctgctactggccagcagcgacgctgcccgcctgcatggtctgaaagcgcgcggtcgcatcctcggcatggccgtggccggggttgagccgcggctgatgggcatcggcccggtgccggcaacccgcaaggtacttgaaatgactgggttgtcgctggctgacctggatgtcatcgagctcaacgaggccttcgccgcacaaggtctggccgtgttgcgcgagctaggcctgactgacgacgacgcgcgggtcaaccgcaacggtggcgcgattgccctgggccatccgctgggcatgagcggtgcgcggctggtgaccacggcgctgcacgagctggaagagacgggcggtcgttacgccttgtgcaccatgtgcatcggcgttggccagggcattgccatggtcatcgagcgcctctga

SEQ ID NO: 2886 - protein, 406 aa, Pseudomonas putida GB-1
MTEPTLADALIIDAVRTPIGRYAGALSSVRTDDLAAVPLKALIQRHPELDWKAVDDVILGCANQAGEDNRNVAHMASLLAGLPLEVPGTTINRLCGSGLDAIGNAARALRCGEAGLMLAGGVESMSRAPFVMGKSEQAFGRTAELFDTTIGWRFVNPRMKAAYGTDSMPETAENVAEQFGISRADQDVFALRSQHKAAAAQARGRLAREIVPVEIAQRKGPAKVVEHDEHPRGDTTLEQLAKLGTPFREGGSVTAGNASGVNDGACALLLASSDAARLHGLKARGRILGMAVAGVEPRLMGIGPVPATRKVLEMTGLSLADLDVIELNEAFAAQGLAVLRELGLTDDDARVNRNGGAIALGHPLGMSGARLVTTALHELEETGGRYALCTMCIGVGQGIAMVIERL

SEQ ID NO: 2887 - DNA, 1203 bp, Pseudomonas putida GB-1
  CDS (1)..(1203): transl_table=11
atgcacgacgtattcatctgtgacgccatccgcaccccgatcggccgcttcggcggcgccctggccagcgtgcgggccgatgacctggccgccgtgccgctgaaggcgctgatcgagcgcaaccccggcgtgcagtgggaccaggtggacgaggtgttcttcggctgcgccaaccaggccggtgaagacaaccgcaacgtggcacgcatggcgctgctgctggccggcctgccggacagcatccccggcgtcaccctgaaccgcctgtgcgcatcgggcatggatgccatcggcaccgccttccgcgccattgccagtggcgaaatggagctggtgattgccggtggtgtcgagtcgatgtcgcgcgccccgttcgtcatgggcaaagccgaaagcggttattcgcgcaacatgaagctggaagacaccaccatcggctggcgcttcatcaacccactgatgaagcaccagtacggcgtggattccatgccggagaccgccgacaacgtggccgacgactatcaggtttcgcgtgctgaccaggacgctttcgccctgcgcagccagcagaaagctgcagccgcccaagcggcgggctacttcgccgaagagatcgtgccggtgcgcattgcgcacaagaagggtgaaaccatcgttgagcgtgacgagcacctgcgcccggaaaccacgctggaagcgctgaccaagctcaagccggtcaatggccctgacaagacggtcaccgctggcaacgcctcgggtgtgaacgacggtgcggcggcgctgatcctggcgtcggccgcagcggtgaagaaacacggcctgaccccacgtgcccgcgtgttgggcatggccagtggcggcgttgcgccacgtgtcatgggcattggcccggtgccggcggtgcgcaagttgaccgagcgcctgggtgtggcggtcagtgatttcgatgtgatcgagcttaacgaagcgtttgccagccaaggcctggcggtgttgcgtgagctgggtgtggccgacgacgcgccgcaggtgaaccctaacggcggcgcgatcgccctgggtcacccgctgggcatgagcggtgcgcgcctggtgctgactgcactgcatcagttggagaggagtggtgggcgcaagggcctggcaaccatgtgtgtgggtgtcggtcagggcctggcactggccatcgagcgggtttga

SEQ ID NO: 2888 - protein, 400 aa, Pseudomonas putida GB-1
MHDVFICDAIRTPIGRFGGALASVRADDLAAVPLKALIERNPGVQWDQVDEVFFGCANQAGEDNRNVARMALLLAGLPDSIPGVTLNRLCASGMDAIGTAFRAIASGEMELVIAGGVESMSRAPFVMGKAESGYSRNMKLEDTTIGWRFINPLMKHQYGVDSMPETADNVADDYQVSRADQDAFALRSQQKAAAAQAAGYFAEEIVPVRIAHKKGETIVERDEHLRPETTLEALTKLKPVNGPDKTVTAGNASGVNDGAAALILASAAAVKKHGLTPRARVLGMASGGVAPRVMGIGPVPAVRKLTERLGVAVSDFDVIELNEAFASQGLAVLRELGVADDAPQVNPNGGAIALGHPLGMSGARLVLTALHQLERSGGRKGLATMCVGVGQGLALAIERV

SEQ ID NO: 2889 - DNA, 1179 bp, Pseudomonas putida GB-1
  CDS (1)..(1179): transl_table=11
atgaacgacgtggttatcgtcgccgcaacccgtaccgccattggcagcttccagggcgccctggcctccgtgcctgcggtcgacctcggcgccgccgtgatcaagcggctgctggagcagaccgggctggacccggcgcaagtcgacgaagtcatcctcggccaggtgctcaccgccggcgccgggcagaacccggcgcgccaggctgcgatcaaggccggcctgcccttcagcgtaccggccctgaccctgaacaaggtctgcggctcgggcctcaaggccctgcacctggccacccaggccatccgctgcggcgacgccgaggtggtgattgccggtggccaggagaacatgagccttgctccctacgtgatgccctcggcccgtactggccagcgcatgggccatggccaactgatcgacagcatgatcaccgatggcctgtgggatgcgttcaatgactaccacatgggcatcactgccgagaacctggtggacacgtacagcctcacccgcgaacagcaggatgcctttgccgccgaatcgcagcgcaaggcggtggcggcgatcgaggccggccgcttcgacgcggaaatcacccccatcctgctgccacagaaaaagggcgagcccaaggtcttcgcccgtgacgagcagccacgcccggacaccaccgccgagtccctgggcaaactgcgcccggccttcaagaaggacggcagcgtcactgcgggcaatgcctccagcctgaatgacggcgccgccgccgtgttgttgatgagcgcggccaaggccaaagccctgggcctgccagtgctggcgaaggtcgccgcctatgccagtgccggggtagacccggcgatcatgggtatcggcccggtttcggcgacccagcgttgcctggacaaagccggttggcagttggccgaactggacctgatcgaagccaacgaagcctttgccgcacaggcgctggccgtgggcaaggcgctggagtgggatgccgcgcgggtcaacgtgaatggcggagcgattgccctgggccacccgattggtgcttccgggtgccgcgtgctggtgaccttgctgcacgagatgatcaagcgcgatgccaagaaaggcctggcgaccttgtgcattggcggtgggcaaggtgtggcactggcgatcgagcgctga

SEQ ID NO: 2890 - protein, 392 aa, Pseudomonas putida GB-1
MNDVVIVAATRTAIGSFQGALASVPAVDLGAAVIKRLLEQTGLDPAQVDEVILGQVLTAGAGQNPARQAAIKAGLPFSVPALTLNKVCGSGLKALHLATQAIRCGDAEVVIAGGQENMSLAPYVMPSARTGQRMGHGQLIDSMITDGLWDAFNDYHMGITAENLVDTYSLTREQQDAFAAESQRKAVAAIEAGRFDAEITPILLPQKKGEPKVFARDEQPRPDTTAESLGKLRPAFKKDGSVTAGNASSLNDGAAAVLLMSAAKAKALGLPVLAKVAAYASAGVDPAIMGIGPVSATQRCLDKAGWQLAELDLIEANEAFAAQALAVGKALEWDAARVNVNGGAIALGHPIGASGCRVLVTLLHEMIKRDAKKGLATLCIGGGQGVALAIER

SEQ ID NO: 2891 - DNA, 1179 bp, Heliobacterium modesticaldum Ice1
  CDS (1)..(1179): transl_table=11
atgagagaggcagtgatcgtcagcgctgtacggactcctgtcggtaaagcgcccaaaggggtcctgaaggatgtgcgaccggaagatctggccgccattgcggtcagaggggcactggcgcgtgtgccggccatcgccccggaagaggtggaagacgtcattttagggtgtgccttcccggaagcagaacagggaatgaacctgggtcgtattgttgcccagcgtgccgggctgccctacagcgtctgcggcatgacggtcaatcggttttgctcgtcagggctgcaagcgatcgccattgcggcggaacgggtaatggccggttttgccgaggtgatgctcgccggtggcgtggaaagcatgagcaccatacccatgggcggcacaaagatcgcccccaacccctatctgatggaacacatgccggaagcgtacatgaccatgggtatcacagcggaaaatgtggccgcccgcttcggcgtcagtcgcgaagctcaagatcgcttcgctttggcgagtcaacaaaaggcggccagagcacaagcagaaggacggttcaatgaagagttgataccggtgaccgtcagcaaacggtgggtcgatgccgatggaaaactgcaggagcaggaggtcctctttgacaaagatgaagggatccggcctgacacatcgctggacgctttggcaaagctgcgcccggtttttcgcgaaaacggcacggtcacagcggggaacgcttcgcagaccagtgacggtgcagcggccctgttggtcacatcaagagaaaaggcagaacagttgggattgccggtgctcggtgctttccgctcgttcgccgtcggtggcgtacccgccgagatcatgggcatcggcccggtggtggcgatcccgaaagcactcaaactggctgggatcgaccaagacgacgtggacctctttgaactcaacgaggccttcgccgcccaggcgctgtatgtcatgaatcatctcggtcttgatcccgagcgtgtcaacgtcaacggcggggctatcgccctcggtcatcccttaggctgcacagggagcaaactgacgacgacactcttgtatgagatgaaacgtcgccaagctcgttacggcgtcgtctccatgtgcatcggcggcggaatgggtgcggctgctgtattcgaaagattttga

SEQ ID NO: 2892 - protein, 392 aa, Heliobacterium modesticaldum Ice1
MREAVIVSAVRTPVGKAPKGVLKDVRPEDLAAIAVRGALARVPAIAPEEVEDVILGCAFPEAEQGMNLGRIVAQRAGLPYSVCGMTVNRFCSSGLQAIAIAAERVMAGFAEVMLAGGVESMSTIPMGGTKIAPNPYLMEHMPEAYMTMGITAENVAARFGVSREAQDRFALASQQKAARAQAEGRFNEELIPVTVSKRWVDADGKLQEQEVLFDKDEGIRPDTSLDALAKLRPVFRENGTVTAGNASQTSDGAAALLVTSREKAEQLGLPVLGAFRSFAVGGVPAEIMGIGPVVAIPKALKLAGIDQDDVDLFELNEAFAAQALYVMNHLGLDPERVNVNGGAIALGHPLGCTGSKLTTTLLYEMKRRQARYGVVSMCIGGGMGAAAVFERF

SEQ ID NO: 2893 - DNA, 1173 bp, Caulobacter sp. K31
  CDS (1)..(1173): transl_table=11
atgcgcgaggccgtcatcgtcgccacggcgcgcacgccgatcggccgcgcctatcgcggggccttcaacaacacgccgtcgccgaccctggcggcccatgccctgaccgccgccgtggcgcgggccggggtcgcgccggacgagatcgaggactgcctgctgggctgctcgctgccgcagggcgtgcagcacacgatcggtcgcatggcggccctgcgcgcgggcttcccggccaccgtaccgggcatgaccatggatcgccaatgctcgtcgggtctgatgaccatcgccaccgcggccaagcagatcatcgtcgaccgcatggacatgatcgtggccggcggggtggagtcgatctcgctggtccagacgccggacctgcgggtcgaccaggacccgggtctcgtggccctctaccccgacgcctatatgccgatgctcgacaccgccgaggtggtcgccgcccgctatggcgtcacccgcgaggcgtgcgatctctattccctggcctcgcagtatcgcgccgccgccgcccaggccacgggacgcttcgacgccgagatcgtgccggtgaccgcgaccatgaaggtggtcgacaagcagacccaggcggtcgacttccgcgaggtgacgctggaccgcgacgagggcgtgcgtcccgacaccactttcgagggcctgtcggcgctgaaggccgtgcggcccggcggagtggtcacggccggcaacgccagccagctgtcggacggcgcctcggcctgcgtggtgatggaggccggcctggccgcccggcgcggcctgcagccgctgggccgctatgtcggcatggccgtcgccggcgtggcgcccgacgagatgggcatcggcccggtcttcgccatcccgcgcctgctggagcgcttcgacctgtcgatcgacgacatcggcctgtgggagttgaacgaggccttcgcctgccaggtgctctattgccgcgaccggctgggcattcccgacgagcgcctgaacgtcgacggcggcgccatcgccatgggccacccctacgggatgtccggcgcccgcctggtcggccacgccctgctggaaggcaagcgccgcggcgcgcgccatgtcgtggtgaccatgtgcgtcggcggcggcatgggcgcggcggggctgttcgaggtgctgtga

SEQ ID NO: 2894 - protein, 390 aa, Caulobacter sp. K31
MREAVIVATARTPIGRAYRGAFNNTPSPTLAAHALTAAVARAGVAPDEIEDCLLGCSLPQGVQHTIGRMAALRAGFPATVPGMTMDRQCSSGLMTIATAAKQIIVDRMDMIVAGGVESISLVQTPDLRVDQDPGLVALYPDAYMPMLDTAEVVAARYGVTREACDLYSLASQYRAAAAQATGRFDAEIVPVTATMKVVDKQTQAVDFREVTLDRDEGVRPDTTFEGLSALKAVRPGGVVTAGNASQLSDGASACVVMEAGLAARRGLQPLGRYVGMAVAGVAPDEMGIGPVFAIPRLLERFDLSIDDIGLWELNEAFACQVLYCRDRLGIPDERLNVDGGAIAMGHPYGMSGARLVGHALLEGKRRGARHVVVTMCVGGGMGAAGLFEVL

SEQ ID NO: 2895 - DNA, 1173 bp, Lysinibacillus sphaericus C3-41
  CDS (1)..(1173): transl_table=11
atgcgtgaagccgttattgtagcaggagcacgaactccaattggaaaagcaaaaaaaggttctttagcaacagtaagaccagatgactttggtgctgccgttgtcaaagaaacattaaaaagagcaggctatgagggaccgatagatgatttaattttaggctgtgctatgccagaagcagaacagggtatgaatgtagctcgtagcatcggtgcacttgccggactaccagatacaactcctgcactaaccattaatagattttgttcttcgggtctacaggcgattgcctatgcagctgagcgaatcatgctcgggcattcaaaggccatcctcgctggtggtgttgaatcaatgagtatggtaccaatggtggggaacacgccccgcttaaatccaacgttagctgaaacagctccacaatattatatgggaatggggcatacagctgaggaagtagctcgtcaatacaatgtaagtcgcgaagatcaagatgcttttgctgttcgctcacatgtacttgctgaagaggcaattaaagaaggtaaatttaatgatgagattgtacctatagaagtggaacaacattatgttgatgagaacaataagccacaggtgaaaaaattcactttcagcatggatgagggtgtccgttcaggtacatcggttgaaggtttagcgaagcttcgtccagctttccatgtgaaagggagtgtgacagcagggaacgcttctcaaacatctgatggtgcagcagctgtattggtaatggagcgtgaagaggcagtcaagcaaggtttaacaccaatggcaaaattcctaggttttgcagtgggtggtgtaccacctgaagtaatggggattggtcccattgtggcggtaccaaaagcgttagaaatcgcaggtttatcaatagatgcgattgatctatgggaaatcaatgaagcatttgcatcgcaatccttacaggtggtccgtcatttaggcatcgaccaagataaggtcaatgtaaatggtggagctatcgcattaggacatccacttggtgcaacgggtgctattttaacactaaaacttattcatgaattaaagcgtcaaggtaagaaatatggcgtggtaactatgtgtattggtggcggcatgggagccgctggagtatttgaaattctataa

SEQ ID NO: 2896 - protein, 390 aa, Lysinibacillus sphaericus C3-41
MREAVIVAGARTPIGKAKKGSLATVRPDDFGAAVVKETLKRAGYEGPIDDLILGCAMPEAEQGMNVARSIGALAGLPDTTPALTINRFCSSGLQAIAYAAERIMLGHSKAILAGGVESMSMVPMVGNTPRLNPTLAETAPQYYMGMGHTAEEVARQYNVSREDQDAFAVRSHVLAEEAIKEGKFNDEIVPIEVEQHYVDENNKPQVKKFTFSMDEGVRSGTSVEGLAKLRPAFHVKGSVTAGNASQTSDGAAAVLVMEREEAVKQGLTPMAKFLGFAVGGVPPEVMGIGPIVAVPKALEIAGLSIDAIDLWEINEAFASQSLQVVRHLGIDQDKVNVNGGAIALGHPLGATGAILTLKLIHELKRQGKKYGVVTMCIGGGMGAAGVFEIL

SEQ ID NO: 2897 - DNA, 1185 bp, Methylobacterium radiotolerans JCM 2831
  CDS (1)..(1185): transl_table=11
atgaccgacgcggtgatcgtcgcgaccgcccgtacgcccatcggcaaggcccatcgcggcgccctgaacctcacccgcggcgccgacctcgccgcccacgcgatccgtggcgccctggaccgggcgcgcctggaacccgaggcggtcgaggaggtggtgctcggctgcggctatccggagaacgccacgggcggcaacgtcgcccgccacgcggccctggtcgcggggatcccggtcgagtcggccggcgtcacggtctcgcgcttctgcgcctcggggctggaggcgatcgccagcgcggcccggcggatcgtcctcgacggcgtgccggtggcggtggcgggcggcgtcgagtcgatcagcctcgtccagccgaaggtccagcgggagctgacccgcaacgcgtggctggaggcccacctgccggcgatctacatgccgatgatcgagaccgccgacatcgtggcggaacgctacggcatctcccgggaggcgcaggaccaattcgcactggagagccagcgccgcacggccgaggcccaggcgcgcggcctcttcgacgacgagatcgtcccgatgagcgccgtgatggcggtgaccgacaaggccaccggcgagacccgggaggtcgagacccggctcgccaaggacgagggtaaccggccggacaccaccctcgaagggctcgcgaagctcaaacccgtgcgcggggagggggccttcatcacggcgggcaatgccagccagctctcggacggagcctcggccagcgtgctgatgtcggccgacgaggcggcgcggcggggcctgacgccgctcggcaccttccggggcttcgcctcggcgggctgcggcccggacgagatgggcatcggcccggtcttcgcggtgccgcggctcctggagcggcagggcctgcgcgtctccgacatcgacctgtgggagctgaacgaggccttcgcgtcccagtcggtctactgccgcgacaggctcgggatcgacccttcgagggtcaacgtcaacggcggcgccatcgcggtcggccacccgttcggcatgtcgggggcccgactcgtgggccacgcgctgctggagggccgccgccgcggcgcgcgctacgccgtggtgaccatgtgcgtcgccggcggccagggctgcgccggcctgttcgagatcggaggctga

SEQ ID NO: 2898 - protein, 394 aa, Methylobacterium radiotolerans JCM 2831
MTDAVIVATARTPIGKAHRGALNLTRGADLAAHAIRGALDRARLEPEAVEEVVLGCGYPENATGGNVARHAALVAGIPVESAGVTVSRFCASGLEAIASAARRIVLDGVPVAVAGGVESISLVQPKVQRELTRNAWLEAHLPAIYMPMIETADIVAERYGISREAQDQFALESQRRTAEAQARGLFDDEIVPMSAVMAVTDKATGETREVETRLAKDEGNRPDTTLEGLAKLKPVRGEGAFITAGNASQLSDGASASVLMSADEAARRGLTPLGTFRGFASAGCGPDEMGIGPVFAVPRLLERQGLRVSDIDLWELNEAFASQSVYCRDRLGIDPSRVNVNGGAIAVGHPFGMSGARLVGHALLEGRRRGARYAVVTMCVAGGQGCAGLFEIGG

SEQ ID NO: 2899 - DNA, 1203 bp, Methylobacterium sp. 4-46
  CDS (1)..(1203): transl_table=11
atgcgggaagccgtcatcgtcgcgaccgcgcgcacgcccatcggcaaggcctaccggggcgccttcaacgacacccaggctcaggcgctcggcggccacgcgatcgccgccgcggtggcgcgggccggcatcgacccggccgaggtcggcgacgtggtgatgggggcggcgctccagcagggctccacggggtccaacatcgcccggcaggcggccctgcgggcgggcctgcccgcgagcgtcgccggcatgagcctggaccggcaatgcgcctcgggcctgatggcgatcgccaccgccgccaaggagatcgtggcggacggggtcgacgtcgcggtgggcggcggcctcgaatcgatctcgctcgtgcagaacgaccggatcaaccgcttccgggggaccgacccctggctcgtggagcgggtgccggcgctctacatgacaatgatcgagacggccgagaccgtggcggagcgctacgggatcgaccgcgcggcgcaggacgcctacgccctgcaatcccagaggcggaccgccgaggcccaggcggccggacgcttcgccgacgagatcgtgccgctcgccacccgcatgaccgtcaccgacaaggcgaccggcgagaccgcctcgcgggaggtcaccctggcccaggacgagggcaaccggccgcagacgcgtccggaggacctcgccgccctcaagcccgtgttcaaggatggccagcgggtgaaggaggggcgcttcgtcaccgccggcaatgcgagccagctctcggacggcgcctcggcgagcgtcctgatggaggcccgcgaggccgagcggcggggcctgcagccgctcggggcctaccggggcatggcggtggcgggctgtaaccccgacgagatgggcatcggcccggtcttcgcggtgcccaagctgctgcgccagcacggcctctcggtcgaggacatcgacctctgggagctgaacgaggccttcgcctgccaggtgctctactgccgcgaccggctcggcatcccggacgagcggctgaacgtgaacggcggtgccatcagcatcggccacccctacggcatgtcgggcgcccggatgaccgggcacatcctgctggaaggccgccgccgcggcgccaagtacggggtggtgacgatgtgcgtcggcggcggcatgggggcggccggcctgttcgagatctattga

SEQ ID NO: 2900 - protein, 400 aa, Methylobacterium sp. 4-46
MREAVIVATARTPIGKAYRGAFNDTQAQALGGHAIAAAVARAGIDPAEVGDVVMGAALQQGSTGSNIARQAALRAGLPASVAGMSLDRQCASGLMAIATAAKEIVADGVDVAVGGGLESISLVQNDRINRFRGTDPWLVERVPALYMTMIETAETVAERYGIDRAAQDAYALQSQRRTAEAQAAGRFADEIVPLATRMTVTDKATGETASREVTLAQDEGNRPQTRPEDLAALKPVFKDGQRVKEGRFVTAGNASQLSDGASASVLMEAREAERRGLQPLGAYRGMAVAGCNPDEMGIGPVFAVPKLLRQHGLSVEDIDLWELNEAFACQVLYCRDRLGIPDERLNVNGGAISIGHPYGMSGARMTGHILLEGRRRGAKYGVVTMCVGGGMGAAGLFEIY

SEQ ID NO: 2901 - DNA, 1200 bp, Leptothrix cholodnii SP-6
  CDS (1)..(1200): transl_table=11
atgagcaaacagattcaagacgcctacatcgtcgccgccagccgcacgccgatcggccgttcgcaccgcggtttcttccgcagcacccggccggacgacctgctcgtagccgccttgcgcggcgctctggcgcaggtgccgacgctcgatccgaaggcgatcgaggacgccatcatcggctgcgcgatgcccgaaggcccgcagggcctgaacgtggcgcgggtggcggcgttgctggccgggctgcccaacagcgtcggcggcatcacggtcaaccgcttctgcgcctcgggcctgagcgcgatccagatggcggccgaccgcatccgcgtcggcgaggccgaggtcatgatcgccggcggctgcgagagcatgagcatggtgccgatgagcggcaacatgccgtcgttcaacccggcgatcttcgagcgcgacgagaacgtcggcatcgcctacggcatgggcctgaccgccgagaaggtggccaaccagtggaaggtcggccgcgaggcgcaggacgcctttgcgctggcctcgcaccagaaggcgctgaaggcgcaggcggcgggtgatttcggcgccgagatcacgccggtcgacgtgatcgagcgcacgcccgacctcgccaccggcgaggtgcgcacgcgcagccgcacggtcagcctcgacgaggggccgcgcgccgacacctcgatcgacggcctggccaagctgcgcacggtgttcgcggccaagggcagcgtcaccgccggcaacagctcgcagaccagcgacggcgccggtgcgctgatcctggccagcgagcgcgcggtgcggcagtacaacctgcagccgctggcgcgtttcgtcagctttgccagccgcggcgtgccgcccgagatcatgggcatcggtccgatcgaggccatcccggcggcgctgcgcagcgcagggctcagcctgtcggcgatcgactggatcgagctcaacgaggcgtttgcggcgcagtcgctggcggtgatccagggcgtcgggctcgacccggccaaggtcaacccgatgggcggcgcgatcgcgctcggccacccgctcggcgccaccggcgcgatccgcgccgccaccgtggtgcacgcgctgcgccgccacaacctgaaatacggcatgttgacgatgtgcgtgggcacggggcagggcgcggcgggcatcttcgaacgcgtctga

SEQ ID NO: 2902 - protein, 399 aa, Leptothrix cholodnii SP-6
MSKQIQDAYIVAASRTPIGRSHRGFFRSTRPDDLLVAALRGALAQVPTLDPKAIEDAIIGCAMPEGPQGLNVARVAALLAGLPNSVGGITVNRFCASGLSAIQMAADRIRVGEAEVMIAGGCESMSMVPMSGNMPSFNPAIFERDENVGIAYGMGLTAEKVANQWKVGREAQDAFALASHQKALKAQAAGDFGAEITPVDVIERTPDLATGEVRTRSRTVSLDEGPRADTSIDGLAKLRTVFAAKGSVTAGNSSQTSDGAGALILASERAVRQYNLQPLARFVSFASRGVPPEIMGIGPIEAIPAALRSAGLSLSAIDWIELNEAFAAQSLAVIQGVGLDPAKVNPMGGAIALGHPLGATGAIRAATVVHALRRHNLKYGMLTMCVGTGQGAAGIFERV

SEQ ID NO: 2903 - DNA, 1197 bp, Cupriavidus taiwanensis
  CDS (1)..(1197): transl_table=11
atgaaacaactgcaagacgcatatatcgttgcggccacccgctcgccgatcggcaaggcgcccaagggcgcgttcaagaacacgcgcccggacgacctgctggccaccatcctgaaggccgcggtggcacaggtgccgaacctggacccgaagctgatcgaggacgccatcgtcggctgcgccattcccgaggcgcagcaaggcctgaacgtggcgcgcatcggcgcgctgctgtcgggcctgccgaataccgtgggcggcatcaccgtcaaccgcttctgcgcttcgggcgtgagcgcggtggcgatggcggccgaccgcatccgcgtgggcgagtccgacgtgatgatcgccgccggcgtggaatcgatgagcatggtgccgatgatgggcaactcgccgtcgatgtcgccggagatcttcacccgcgacgagaacgtgggcattgcctacggcatgggcctgaccgccgagaaggtggcgcagcagtggaaggtcagccgcgaggaccaagatgcgttctcgctggcctcgcaccagaaggccatcgcggcgcagcaggccggtgagttcaaggacgagatcacaccgatcgagatcgtcgagcgcttccccgacctcgccagcggccaggtcagcgtgaagacgcgcacgatctcgctggacgaaggtccgcgccccgaaacctcgctggaaggcctgggcaagctgcgcccggtgtttgccaacaagggcagcgtgaccgccggcaacagctcgcagacctcggacggcgccggcgcgctgatcctggtctcggagaagatcctcaagcagttcaaccttgtgccgctggcgcgcttcgtctcgttcgcggtgcgcggcgtgccgcccgagatcatgggcatcggcccgaaggaagcgatcccagcggcgctgaaggcggcaggcctgacgcaggaccagatcgactggatcgagctgaacgaagcgttcgccgcgcagtcgctggcggtgatgcgagacctggatctcgatccggcccgggtcaaccgcatgggcggcgcgatcgcgctgggccatccgctgggggccaccggtgcgatccgctcggccacggtggtgcacgcgctgcgccgccacaacctgaagtacggcatggtcaccatgtgcgtcggcacgggcatgggcgccgcaggtattttcgagcgcgtctaa

SEQ ID NO: 2904 - protein, 398 aa, Cupriavidus taiwanensis
MKQLQDAYIVAATRSPIGKAPKGAFKNTRPDDLLATILKAAVAQVPNLDPKLIEDAIVGCAIPEAQQGLNVARIGALLSGLPNTVGGITVNRFCASGVSAVAMAADRIRVGESDVMIAAGVESMSMVPMMGNSPSMSPEIFTRDENVGIAYGMGLTAEKVAQQWKVSREDQDAFSLASHQKAIAAQQAGEFKDEITPIEIVERFPDLASGQVSVKTRTISLDEGPRPETSLEGLGKLRPVFANKGSVTAGNSSQTSDGAGALILVSEKILKQFNLVPLARFVSFAVRGVPPEIMGIGPKEAIPAALKAAGLTQDQIDWIELNEAFAAQSLAVMRDLDLDPARVNRMGGAIALGHPLGATGAIRSATVVHALRRHNLKYGMVTMCVGTGMGAAGIFERV

SEQ ID NO: 2905 - DNA, 1191 bp, Exiguobacterium sibiricum 255-15
  CDS (1)..(1191): transl_table=11
atgaaggaagcagtaatcgtcgccggtgcacgaacaccggtcggcaaagcaaaaaaaggatcatttaaatcaatgcgttctgatgaactcgcaggcatcgtcatcaaggaaacgttgaaacgcgcgaactacacgggagcaatcgatgatgtcattctcggatgtgccttaccggaagcggagcaggggatgaacatcgcccgttacgcgtcggtcctcgggggactgtcgcacgaagtaccggcaatcacgatcaaccggtattgctcaagtggcttacagtcgattgccgatgcctcgatgaaaatcatgacgggtcaagcaacggccgtcatcgccggcggactcgaatccatgagccaggtgccgatgccggggcacgtcgttcgaccgaatccgtcaatcgtcgaaacagaaccggaatattatatgagcatgggacatacggcagaacaagtcgcttcgacctatcaagtctcacgcgaagatcaagatgcctttgcactgaaaagccatcaaaaagcagccgctgcaattgcgtccggcaaattcgccgatgaaatcgtgccggtgacggtcacggaacagttcgtcaatgatgagttgaagattgaagaaaagacgtgggtcgtcgaacatgacgaaggtgtccgtgccgattcatcaccggaaggcctcgccaaactccgtccggcattccgcctcggcggaagtgtcacagcggggaactcgtctcagacatcagacggtgcagccgccgtcttgatcatggagcgcgaggaagcagaacgccagggactaccgattctcgggaaattcaaatcgtttgccgtcggcggtgttcgtccggaagtcatgggaatcggaccggtcgtcgcgattccaaaggcactggaactggccggcatcactttagaagaagtcggactgattgaattaaatgaagcatttgcgtcccagtcactcggtgtcatccgggaactcggattgaatgaagacatcgtcaacgtcaacggcggcgcgattgcgcttggtcatccgctcggatgtaccggaacgaaactgacattaacactcttgcatgaaatgaaacgacggaacgtccaatatggtgtcgtctcgatgtgtatcggcggcggcatgggtgcagccggtgtattcgaactagttgaaggaggaacaggacaatga

SEQ ID NO: 2906 - protein, 396 aa, Exiguobacterium sibiricum 255-15
MKEAVIVAGARTPVGKAKKGSFKSMRSDELAGIVIKETLKRANYTGAIDDVILGCALPEAEQGMNIARYASVLGGLSHEVPAITINRYCSSGLQSIADASMKIMTGQATAVIAGGLESMSQVPMPGHVVRPNPSIVETEPEYYMSMGHTAEQVASTYQVSREDQDAFALKSHQKAAAAIASGKFADEIVPVTVTEQFVNDELKIEEKTWVVEHDEGVRADSSPEGLAKLRPAFRLGGSVTAGNSSQTSDGAAAVLIMEREEAERQGLPILGKFKSFAVGGVRPEVMGIGPVVAIPKALELAGITLEEVGLIELNEAFASQSLGVIRELGLNEDIVNVNGGAIALGHPLGCTGTKLTLTLLHEMKRRNVQYGVVSMCIGGGMGAAGVFELVEGGTGQ

SEQ ID NO: 2907 - DNA, 1209 bp, Stenotrophomonas maltophilia R551-3
  CDS (1)..(1209): transl_table=11
atgaccaagcaaatccaggacgcctacatcgtcgccgccacccgcaccccggttggcaaggcgcccaagggcatgttccgcaacacccgccccgatgacatgcttgcgcacgtgctgcgcagcgtcgttgcccaggcccccggcgtggatgtcaatcgcatcgatgacgcgatcatcggctgcgcgatgccggaagccgagcagggcatgaacgtggcgcgtatcggcgtgctgctggccggcctgccgaacaccatcgccgcgcagaccgtgaaccgcttctgctcgtccggcctgcaggccgtggcgcaggccgccgacgcgatccgcctgggcaacgccgacctgatgctggccggcggcaccgagtcgatgtcgatggtgccgatgatgggcaacaagatagcgatggcgccgagcgtgttcgacaacgaccacgtggccatcgcctacggcatgggcatcaccgccgaaaaggtcgccgaagagtggaaggtctcgcgcgaagaccaggacgccttcgccctggcctcgcaccagaaggcgatggccgcgatccagaacggtgacttcaaggacgagatcagcccgtacgagatcatctcgcaccagccggacctggctgacggcaagcgcatcctcacccgcaacaagctggccgacaccgacgaaggcccgcgcccggattcctcggccgaaggcctggccaagctgcgcccggtgttccgcaacggccagttcggcggcaccgtcactgctggcaactcgtcgcagatgagcgacggcgccggtgccgtgctgctggcctcggaacaggcgatcaaggactacggcctgaccccgctggcccgtttcgtcagcttctcggtagccggcgtgcgcccggaagtgatgggcatcggcccgatcgctgcgattccgaaggcactcaagcaggccggcctgacccaggaccagctggactggattgaactgaacgaagcgttcgccgcgcagtcgctggcggtgatccgcgattgcggcctggacccgagcaaggtcaacccgctgggcggcgcgatcgccctgggccacccgctgggtgcgaccggcgcgatccgcaccgcaaccctgctgcacggcctgcgccgtcgccagcagaagtacggcatggtgacgatgtgcatcggcaccggcatgggcgcagcgggtattttcgaggcgctgtaa

SEQ ID NO: 2908 - protein, 402 aa, Stenotrophomonas maltophilia R551-3
MTKQIQDAYIVAATRTPVGKAPKGMFRNTRPDDMLAHVLRSVVAQAPGVDVNRIDDAIIGCAMPEAEQGMNVARIGVLLAGLPNTIAAQTVNRFCSSGLQAVAQAADAIRLGNADLMLAGGTESMSMVPMMGNKIAMAPSVFDNDHVAIAYGMGITAEKVAEEWKVSREDQDAFALASHQKAMAAIQNGDFKDEISPYEIISHQPDLADGKRILTRNKLADTDEGPRPDSSAEGLAKLRPVFRNGQFGGTVTAGNSSQMSDGAGAVLLASEQAIKDYGLTPLARFVSFSVAGVRPEVMGIGPIAAIPKALKQAGLTQDQLDWIELNEAFAAQSLAVIRDCGLDPSKVNPLGGAIALGHPLGATGAIRTATLLHGLRRRQQKYGMVTMCIGTGMGAAGIFEAL

SEQ ID NO: 2909 - DNA, 1359 bp, Burkholderia cenocepacia PC184
  CDS (1)..(1359): transl_table=11
atggtgcccgtgcggcggtgtgccgtgccgccggtgcgaattggcgccgcccgtccggacggcggcgtgcgaccccgaccgcgattgcgccggttggcgcggcgcgtgccatcgccacgtgtgatcgcctcgtgccggcgtcacgacgacaaactgatttcgatgcagggattgaacatgacggatgtagtgatcgtatcggccgcgcggaccgcggtcggcaaattcggcggctcgctggcgaagattgcggcgcccgaactgggcgcgacggtgatccgcgcggtgctggagcgtgcgggcgtgaagcccgagcaggtcagcgaagtgatcatgggccaggtgctgacggccggctccgggcagaacccggcgcggcagtcgttgatcaaggcggggctgccgacggccgtgccggggatgacgatcaacaaggtgtgcggctcgggcctgaaggccgtgatgctggcggcgaacgcgatcatcgcgggcgacgcggagatcgtggtcgcgggcggccaggagaacatgagcgcgtcgccgcacgtgctgccgggctcgcgcgacggcttccggatgggcgacgcgaagctggtcgacacgatgatcgtcgacggcctgtgggacgtgtacaaccagtaccacatgggtatcacggcggagaacgtcgcgaaggaatacgggatcacgcgcgaagagcaggacgcgttcgcggcgctgtcgcagaacaaggcggaagccgcgcagaaggccggccgtttcaatgacgagatcgtgccggtgtcgatcccgcaacgcaagggcgagccgctgcagttcgcgaccgacgagttcgtgcgtcacggcgtgacggcggaatcgctggcgggcctgaagccggcgttctcgaaggacggctcggtgacggcggcgaacgcgtcggggctgaacgacggcgcggcggcggtgctggtgatgtcggcgcagaaggcggcggccttgggcctgacgccgctggcgcgaatcaaggcgtacgcgaacgcgggcgtggacccgagcgtgatgggcatgggcccggtgccggcgtcgcgccgtgcgctggagcgcgcgggctggacgccgggcgacctggacctgatggagatcaacgaggcgttcgcggcgcaggcgctggcggtgcacaagcagatgggctgggacacgtcgaaggtgaacgtgaacggcggggcgatcgcgatcggccatccgatcggcgcgtcgggctgccggattctggtgacgctgctgcacgagatggccaggcgcgacgcgaagcgcgggctggcgtcgctgtgcatcggcggcgggatgggcgtcgcgcttgcggtcgagcgcgtctga

SEQ ID NO: 2910 - protein, 452 aa, Burkholderia cenocepacia PC184
MVPVRRCAVPPVRIGAARPDGGVRPRPRLRRLARRVPSPRVIASCRRHDDKLISMQGLNMTDVVIVSAARTAVGKFGGSLAKIAAPELGATVIRAVLERAGVKPEQVSEVIMGQVLTAGSGQNPARQSLIKAGLPTAVPGMTINKVCGSGLKAVMLAANAIIAGDAEIVVAGGQENMSASPHVLPGSRDGFRMGDAKLVDTMIVDGLWDVYNQYHMGITAENVAKEYGITREEQDAFAALSQNKAEAAQKAGRFNDEIVPVSIPQRKGEPLQFATDEFVRHGVTAESLAGLKPAFSKDGSVTAANASGLNDGAAAVLVMSAQKAAALGLTPLARIKAYANAGVDPSVMGMGPVPASRRALERAGWTPGDLDLMEINEAFAAQALAVHKQMGWDTSKVNVNGGAIAIGHPIGASGCRILVTLLHEMARRDAKRGLASLCIGGGMGVALAVERV

SEQ ID NO: 2911 - DNA, 1182 bp, Alteromonas macleodii 'Deep ecotype'
  CDS (1)..(1182): transl_table=11
atgcgtgatgcagtaattgtaagtacagcacgtacaccaataggccgtgcctataaaggcgcactaaacaacttacccgcgccgtcgttaggtggtcatgccattgaaaatgcggtatctcgtgcgggtattgaccctgctagcgtagatgacgtcatcatgggcgcagcgctcacacaaggcagcggtggtatgaacatcggccggttagccgggcttgccggcggccttcctgttacggttgcgggtatgacccttgaccgtcaatgtagttcaggtatgtacgccatcgctacagcagcaaatgctattcgtactggcgataccaacattatggtagccggtggtttagattctatttcactggtacaaaacaagaacatgaatatgttccgtgccgttgaccctgcacttgttgctaagcacaaagatatctacatgccgatgcttcaaaccgctgaagtggtaggcaagcgttataacattagccgcgatgtacaagatgagtacggctaccaaagtcaaatgcgcacagcagcagcgcaagaggccggtaagtttgacgacgaaattgtacctattacagcagttcaagcggtgttcaataaagaaacgggtgaaacctctgagcgcgaagtcaccttgtctaaagatgaaggtaatcgcccagaaactactcttgaaggtttgaaagcgttaaaccctgttattgaaggcggctgcattacagctggcaacgcgagccagctttcagacggcgcaagtgcaacagttattatggatgagcagtcagcagcgaaaggcagtgctcagccacttggtatttatcgcggtattgcagtggcaggctgtgaacctgatgaaatgggaattggcccggtattcgccattcctaagctattaaagcagcatggattaaccatggacgatatcggtctatgggaacttaacgaagcatttgcagtacaggtactctactgccgcgacaagttaggtattccagacgaattattaaatgtaaacggcggtgccatttctattggtcacccatacggcatgagcggtgctcgcatggtgggtcacgcactcatcgaaggtaaacgacgtggtgcgaaatatgtagtttgcaccatgtgtatcggtggcggcatgggcgctgctggtctatttgaagttatatag

SEQ ID NO: 2912 - protein, 393 aa, Alteromonas macleodii 'Deep ecotype'
MRDAVIVSTARTPIGRAYKGALNNLPAPSLGGHAIENAVSRAGIDPASVDDVIMGAALTQGSGGMNIGRLAGLAGGLPVTVAGMTLDRQCSSGMYAIATAANAIRTGDTNIMVAGGLDSISLVQNKNMNMFRAVDPALVAKHKDIYMPMLQTAEVVGKRYNISRDVQDEYGYQSQMRTAAAQEAGKFDDEIVPITAVQAVFNKETGETSEREVTLSKDEGNRPETTLEGLKALNPVIEGGCITAGNASQLSDGASATVIMDEQSAAKGSAQPLGIYRGIAVAGCEPDEMGIGPVFAIPKLLKQHGLTMDDIGLWELNEAFAVQVLYCRDKLGIPDELLNVNGGAISIGHPYGMSGARMVGHALIEGKRRGAKYVVCTMCIGGGMGAAGLFEVI

SEQ ID NO: 2913 - DNA, 1206 bp, Phenylobacterium zucineum HLK1
  CDS (1)..(1206): transl_table=11
atgcgtgaagccgtcatcgtcgccgccaagcggacccccatcggcaaggcctaccgcggcgcgttcaacaacacctacggcgcgacgctcggcgccgaacccatcagggccgtggtcgcccaggcgggcatcgatcccggcgaggtggacgacgtggccatgggctgcgccatgcagcagggcacgacgggccagaacatcgcccgccaggcggccctgcgcgccggcctgccgaacaccgtctcgggcatgaccatcgaccggcagtgcagctcaggcctgatggcgatcgctacggcggccaagtacatcaccgtcgacggcgctccgatcgccatcggcgccggcatcgagtcgatcagcctggtgcagaacgacaagatgaaccgcttcatggcctcggacccgtggctctccgagaacgtgcccgagctggcctgctcgatgatcgagacggccgagatcgtcgccgatcgctacggcgtcagccgcgaggcgcaggacgaatacgccctgcagtcgcagcagcgcaccgcccaggcccaggccgagggccgcttcgccagcgagatcgtccccgtcaccaccgtcatgaaggtgcttgtgaacaaggagaccggcgagacggccgacaaggagatcaccctcgaccgcgacgagggcaaccgcccccagaccaccctggaggacctgcagaagctgcagccggtgttccggggcggccgctacgtgccgcagggcaagttcatcaccgccggcaacgccagccagctctcggacggcgcggccgccgtcctgctgatggagcgcaaggaggccgagaagcgcggcctcgagccgctcggcgcctaccgcggcatggccgtggccggctgcggccccgaggagatgggcatcggcccggtgttcgcgatcccgaagctcttggagcgcaacgggctgaccatcgacgacatcgacctgtgggagctgaacgaggccttcgccagccaggtgctctactgccgggacaagctgggcatcccgaacgagaagctgaacgtctcgggcggctcgatctcgatcggccacccctacggcatgaccggcgcccgctgcaccgctcacctgctctacgagggcaagcgccgcggcgcgaagtacggcgtcgtcaccatgtgcgtcggcggcgggatgggcgcggcgggtctcttcgagatcttctga

SEQ ID NO: 2914 - protein, 401 aa, Phenylobacterium zucineum HLK1
MREAVIVAAKRTPIGKAYRGAFNNTYGATLGAEPIRAVVAQAGIDPGEVDDVAMGCAMQQGTTGQNIARQAALRAGLPNTVSGMTIDRQCSSGLMAIATAAKYITVDGAPIAIGAGIESISLVQNDKMNRFMASDPWLSENVPELACSMIETAEIVADRYGVSREAQDEYALQSQQRTAQAQAEGRFASEIVPVTTVMKVLVNKETGETADKEITLDRDEGNRPQTTLEDLQKLQPVFRGGRYVPQGKFITAGNASQLSDGAAAVLLMERKEAEKRGLEPLGAYRGMAVAGCGPEEMGIGPVFAIPKLLERNGLTIDDIDLWELNEAFASQVLYCRDKLGIPNEKLNVSGGSISIGHPYGMTGARCTAHLLYEGKRRGAKYGVVTMCVGGGMGAAGLFEIF

SEQ ID NO: 2915 - DNA, 1173 bp, Anaeromyxobacter sp. K
  CDS (1)..(1173): transl_table=11
atgagcgcagcctacgtcctcgcagcggtgcggacccccgggtgcaaggcgaagaaggggaagctgaaggacgtccgcccggacgacctcgccgcggtcgccatccgcgcgctgctggcgcggaccggcgtcgacccggggcaggtggaggacgtgatcctcgggtgcgcgttccccgagggcgagcagggcatgaacctggggcgcgtcgcggcgctccgggccgggctgccggtgggcgtgccgggccagacggtgaaccgcttctgcgcctcgggcctgcagaccatcgccaccgcggccgagcggatcatggccggccaggccgactgcatcgtggcgggcggggcggagagcatgagcctcgtgcccatgggcggctcgcacttcagcgccaaccccgcgctggtcgcgtcctggccggagtcgttcgcggccatgggcatcaccgccgagctggtggcggcgcgcgaccaggtcagccgcgaggaccaggacgcgttcgcggtgcagagccacgcccgcgccgcgcgggcgcaggcggagggcctgttcgcggacgagctcgtcccggtcgaggtggagcaggtcacgctcgagaagggcaagccggtgcgccgcaccgagcaggtcacggccgacgacggcgtgcgcccgggcacgacccaggaggcgctcgcgaagctcaagccggcgttcaagctcgacggcaccgtcaccgccggcaacgcctcccagaccaccgacggcgccgcggccgcgctggtggtctccgaggcgttcctcacccgcaccggcctcgcgccgctggcgcgcttcgtctcctacgcggtgcgcggcgtgccgccggagatcatgggcatcggcccggtcgaggccatcccggccgccctgaagcgcgccggcctgcgcctcgaggacgtcgggcagatcgagctgaacgaggcgttcgcggcgcagtcgctcgcctgcgtgcgcgcgctcgggctcgatccggagagggtgaaccccaccggcggcgccatcgcgctcgggcacccgctcggctgcaccggcgcgaagctcaccgccacgctgctgcacggcctgcggcggaccggcgcgcggcacgggatcgtgtcgatgtgcgtgggcggcgggatgggcgcggcggcggtgttcgagcgcgcctga

SEQ ID NO: 2916 - protein, 390 aa, Anaeromyxobacter sp. K
MSAAYVLAAVRTPGCKAKKGKLKDVRPDDLAAVAIRALLARTGVDPGQVEDVILGCAFPEGEQGMNLGRVAALRAGLPVGVPGQTVNRFCASGLQTIATAAERIMAGQADCIVAGGAESMSLVPMGGSHFSANPALVASWPESFAAMGITAELVAARDQVSREDQDAFAVQSHARAARAQAEGLFADELVPVEVEQVTLEKGKPVRRTEQVTADDGVRPGTTQEALAKLKPAFKLDGTVTAGNASQTTDGAAAALVVSEAFLTRTGLAPLARFVSYAVRGVPPEIMGIGPVEAIPAALKRAGLRLEDVGQIELNEAFAAQSLACVRALGLDPERVNPTGGAIALGHPLGCTGAKLTATLLHGLRRTGARHGIVSMCVGGGMGAAAVFERA

SEQ ID NO: 2917 - DNA, 1173 bp, Geobacter bemidjiensis Bem
  CDS (1)..(1173): transl_table=11
atgagaaccgcatacatagttatcgccctgcgcactccggcgaccaaggcctacaaagggaaactgaggcaggtgcgccccgacgacctggccgccgcggccatcaaaggggtcatcgacgccaccggcatcgacccggcagaactcgacgacattatcatcggctgcgccttccccgaggccgaacaggggatgaacgtggcgcgcatcgccgctttcaaggcgggcgtcccgtaccaggttccctgccagacggtgaaccgcttctgctcctccgggctgcagaccatcgccaccgccgccgagcgcatcatggccggcttcgccgactgcatcgtcgcgggggggaccgagagcatgtcgctcattcccatgggggggaacaaattcagcgccaacccggggctcgtccatgcctggcccgagacctacgcctcgatgggaatcaccgcggagctcatggtcgagaagtacggggtgtcccgcgaggaccaggacgccttcgccgcggcgagccaccaaaaggcggcacaggcgataagggaggggaggtttgccgacgagatcgtcccggtcaaagctcaaatctgcggcctggacggcctgaagatgaagtgcagcgtggaacaggtgagcgtcgacgacggcgtccgcgccgacacgacggttgcggcactcgcgaagctcaagcccgccttcaaggccaacggcagcgttaccgcaggcaactcctcccagatgaccgacggggccgcggcggcgctggtcgtctccgaggatttcctgaagcgaaccggcttgcagccgatggcgcgctttgtctgcttcgccgtcaagggggtcccgcccgagatcatggggaccggccccatcgaggcgattccagcggcgttaaagcttgccgggctctctctggatcaggtctccctcttcgagctgaacgaagccttcgccgtccagtccctggtctgcatcgacgagctgaagctcgacccggaaagggtgaacgtgaacggcggcgccatcgccatggggcatccgctggggtgcaccgggaccaagctgaccgcgacgctgttgcacgaattgcggcgccggaaggagcgctacggctgcgtctccatgtgcatcggcggcggcatgggcgcggcagggatcttcgagatggtctag

SEQ ID NO: 2918 - protein, 390 aa, Geobacter bemidjiensis Bem
MRTAYIVIALRTPATKAYKGKLRQVRPDDLAAAAIKGVIDATGIDPAELDDIIIGCAFPEAEQGMNVARIAAFKAGVPYQVPCQTVNRFCSSGLQTIATAAERIMAGFADCIVAGGTESMSLIPMGGNKFSANPGLVHAWPETYASMGITAELMVEKYGVSREDQDAFAAASHQKAAQAIREGRFADEIVPVKAQICGLDGLKMKCSVEQVSVDDGVRADTTVAALAKLKPAFKANGSVTAGNSSQMTDGAAAALVVSEDFLKRTGLQPMARFVCFAVKGVPPEIMGTGPIEAIPAALKLAGLSLDQVSLFELNEAFAVQSLVCIDELKLDPERVNVNGGAIAMGHPLGCTGTKLTATLLHELRRRKERYGCVSMCIGGGMGAAGIFEMV

SEQ ID NO: 2919 - DNA, 1188 bp, Francisella novicida GA99-3549
  CDS (1)..(1188): transl_table=11
atgagtgaaaacgtatatatagtcgctgcaaaacgctctgctgttacaaaaggtaaaaaaggtggttttgcaaaaaaacgtcctgatgaattattggcggatgtacttagaaaaactgtcgctgaagctaatattaatcctaacgatatagaagatatagttgtcggttgcgcgatgcctgaagctgaacaaggcttaaatgttgcaagaatttcatctcttttggctggactacctaatagtgttcctgcttttacaatcaatcgctattgtagctctggattacagtcaattgctattgcagcaaatgaaattgctcaaggtaatatcgatgttgctatcggggctggtgttgaaagtatgagtatgattccttttggtggtaacaagatgtcttttagtaaagaaatctttgctaaagatgaaaatgttgccatagcttatggtatgggtatcacagctgagatggttgctaaagattggaatgtgtcacgacaagatcaagatgcttttgctcttgaaagtcatcaaaaggctatccatgctatcgagagtggttatttcaaagatgaaatactgcctatagatgttgatcacaacaaaccagatgaagcaactggagagatcattaatcataaacaaactataaccgaagatgaaggcgctcgaaaagatacctcactagaggcattagctaaactaaaacctgcttttgctaatggtggatctgttactgctggtaatagttcacaagtatcagacggtgctgcagctgtgattttagttagtgaaaaatacctaaaagagcataacctaaaacctttaggtaagtttctaggatttgctgtagctggtgttgatccacgcattatgggtattggcccaatcaaagctatacccaaagtgcttaggcaaactggtttaaatatcgatgatattgactggatagagttaaatgaagcttttgccgctcaatcactcgctgtgattaatgatttaaaacttgataagtccaaagttaacccttgtggtggtgctattgccttaggacatccacttggtgcaacaggaactatactaacagtcaaagcactacatggactacaacgtactggtaaaaaatatgctatgattacgatgtgtattggtactggtatgggtgcagctggtattattgaagcttgttag

SEQ ID NO: 2920 - protein, 395 aa, Francisella novicida GA99-3549
MSENVYIVAAKRSAVTKGKKGGFAKKRPDELLADVLRKTVAEANINPNDIEDIVVGCAMPEAEQGLNVARISSLLAGLPNSVPAFTINRYCSSGLQSIAIAANEIAQGNIDVAIGAGVESMSMIPFGGNKMSFSKEIFAKDENVAIAYGMGITAEMVAKDWNVSRQDQDAFALESHQKAIHAIESGYFKDEILPIDVDHNKPDEATGEIINHKQTITEDEGARKDTSLEALAKLKPAFANGGSVTAGNSSQVSDGAAAVILVSEKYLKEHNLKPLGKFLGFAVAGVDPRIMGIGPIKAIPKVLRQTGLNIDDIDWIELNEAFAAQSLAVINDLKLDKSKVNPCGGAIALGHPLGATGTILTVKALHGLQRTGKKYAMITMCIGTGMGAAGIIEAC

SEQ ID NO: 2921 - DNA, 1188 bp, Oligotropha carboxidovorans OM5
  CDS (1)..(1188): transl_table=11
atgtccgatgccgtcatcgtttccacagcccgcacgccgatcggcaaggcctatcgtggtgcactgaatgccactgaaggcgcgacgctgttcgcacatgcgatcaaagccgcggtggagcgggcgcagctcgaccctgccgaggtggaggacgtggtgatgggtgccgcgctgcagcaaggggcgacctttgccaacatcgcacgcaaggcactgctgcgtgcgggtctgcccgtcacggtcgccggcaccacggtggaccgtcagtgtgcatcgggtctacaggcgattgcgaatgcggcgcgctcggtgctgttcgatggcgtcgggatcgcggtggcgggcggcggcgaatcgatcagcctcgttcagaacgacaagatgaacatgtttcatgcggtcgatccggcgctgcaggagatcaagcccgatatttacatgtcgatgctcgacaccgccgaggtggtggcgaagcgctacggcatttcgcgcgagcggcaggatgagtacgcgctggaaagccagcgccgcatcgccgccgcgcagcaggcgggccggttcaaggatgagatcgcgccaatttcaacgacaatgggcgtgctcgacaaggcaagcggcgaggtgtcgttcaaggacgtgacgctttcgcaggatgaaggcccgcgacccgatacaacggcggagggcctggccgcgctgaagccggtgaagggcgaaggcttcaccatcaccgccggcaatgcgagtcagctctccgatggcgcgagcgccgtggtggtgatgagcgacaagacggccgcgcagcgcaacctgaagccgctcggtatcttccgtggcatggtgtcggtcggctgcgagccggacgagatgggcatcggcccggtgttcgcggtgccgcggcttctcaagcgtcacggcctgagcgtggatgatatcgatctgtgggaattgaacgaggcattcgcggtgcaggtcgtctattgccgcgacaagttcgggctcgatcccgagaagctcaacgtcaacggcggcgccatcggcgtcggccacccctatggcatgaccggcgcgcggcttgcgggccatgtgctgatcgaagggcggcggcgcaaggcgaaatacgcagtggtgacgatgtgcgtcggcggcggcatgggctcggccggtctgttcgagatcgtgcagtag

SEQ ID NO: 2922 - protein, 395 aa, Oligotropha carboxidovorans OM5
MSDAVIVSTARTPIGKAYRGALNATEGATLFAHAIKAAVERAQLDPAEVEDVVMGAALQQGATFANIARKALLRAGLPVTVAGTTVDRQCASGLQAIANAARSVLFDGVGIAVAGGGESISLVQNDKMNMFHAVDPALQEIKPDIYMSMLDTAEVVAKRYGISRERQDEYALESQRRIAAAQQAGRFKDEIAPISTTMGVLDKASGEVSFKDVTLSQDEGPRPDTTAEGLAALKPVKGEGFTITAGNASQLSDGASAVVVMSDKTAAQRNLKPLGIFRGMVSVGCEPDEMGIGPVFAVPRLLKRHGLSVDDIDLWELNEAFAVQVVYCRDKFGLDPEKLNVNGGAIGVGHPYGMTGARLAGHVLIEGRRRKAKYAVVTMCVGGGMGSAGLFEIVQ

SEQ ID NO: 2923 - DNA, 1137 bp, Rhodospirillum centenum SW
  CDS (1)..(1137): transl_table=11
atgaagaccgtcgtgattgccggatacgcccggtcccccttccatctggccaacaagggtgagctgaccaaggtacggcccgacgatctggccgccaccgtgatcaaggcgctggtggagcgctccggcgtccccgccgaggagatcgaggacctgatcctgggctgcgccttccccgagggcgagcagggcttcaacatggccaagctggtggcgatgctggccggcctgccgcgctcggtcgccggcaccacggtgaaccgcttctgcggctcctccatgcagtcgatccacatggccgccggcgccatccagatgggcgcgggcgatgtcttcatcgccgccggggtggagagcatgacgcgggtgcccatgatgggcttcaacccgatgccgaatccgaagctggccgaggtcgagcccggcgcctacatggccatgggcatcaccgccgagaatctggcccgcaagttccagatcacccgcgccgagcaggaggccttcgcggtggagagccaccgcaaggccgccgccgcccgcgaggccggccggttcacggacgagatcgtgccgatccaggccaatggcaagctggtggatcaggacggctgcatccgccccgacacctccgccgagggtctggccgggctgaagcccgccttcgacgcggagggctcggtgaccgccggcacctcctcgccgctgaccgacggcgcctcggccacgctggtgtgcagcgaggagtacgcccgcgcccatggcctgaagccgctggcgaagatccgcgccatcgccgtctccggctgcgatccgacgatcatgggctacgggcccgtgccggccacccgcaaggcgctgaagcgcgccgggctggaggtgaagcacatcgacctgtgggagagcaacgaggcgttcgccgtgcagtccatgaccgtggcgcgcgagctgggcatggatctcgcccgctgcaatctggacggcggcgccatcgcgctgggccatccgctgggcgccaccggcgcgcgcatcaccggcaaggcggccagcctgcttcagcgggagggcaagcagctcgccgtcgccacccagtgcatcggcggcggtcagggcatcgccaccgtccttgaggcggtctga

SEQ ID NO: 2924 - protein, 378 aa, Rhodospirillum centenum SW
MKTVVIAGYARSPFHLANKGELTKVRPDDLAATVIKALVERSGVPAEEIEDLILGCAFPEGEQGFNMAKLVAMLAGLPRSVAGTTVNRFCGSSMQSIHMAAGAIQMGAGDVFIAAGVESMTRVPMMGFNPMPNPKLAEVEPGAYMAMGITAENLARKFQITRAEQEAFAVESHRKAAAAREAGRFTDEIVPIQANGKLVDQDGCIRPDTSAEGLAGLKPAFDAEGSVTAGTSSPLTDGASATLVCSEEYARAHGLKPLAKIRAIAVSGCDPTIMGYGPVPATRKALKRAGLEVKHIDLWESNEAFAVQSMTVARELGMDLARCNLDGGAIALGHPLGATGARITGKAASLLQREGKQLAVATQCIGGGQGIATVLEAV

SEQ ID NO: 2925 - DNA, 1173 bp, Anoxybacillus flavithermus WK1
  CDS (1)..(1173): transl_table=11
atgaaagaagcggtcatcgttgccggggcgcgcacgcctgtcggcaaagcgaaaaaagggacgttagcgaacgtccgaccagatgatttaggggcgattgttgttaaagaaacgttgaaacgagcaggaaactatgaaggaaatattgacgatctcattatcggttgtgctatgccagaggcagaacaaggattaaatattgcgcgcaacattggtgcgcttgctgggttaccgtatacagtgccagcgattacaattaaccgttattgttcatcgggattacaagcgatcgcttatgcggcagagagaattatgcttggtcatgcagatacggttattgctggtggcgtggagtcgatgagcatggtgccgatgatggggcatgttgtacgtccgaacgtgaagctcgcagaaagtgcgccagagtattacatgtcgatggggcatacagctgagcaagtcgcgatgaaatatggggtgacgcgcgaagagcaagatgcgtttgccgttcgcagccatcaaagagcagcaaaagcgattgccgaaggaaaatttgtcgacgaaattgtgccggtcgaagtgacagtccgtcatattgaaaacaataaattagtagagaaaaagatgacgtttagtcaagatgaaggagtacgcccagatacaaatatggaaacgctcgcgaagttacgccctgcgttttcggtaaacggaacagtaacagcaggaaacgcttcgcaaacgagtgacggagcagcagcggtgatggtgatggatcatgaaaaagcgaaagcgctcggtttacaaccgcttggtaaattccgctcgtttgctgttgcaggtgttccacctgaagtgatgggcatcggtccgattgcagccattccaaaagcgcttaaacttgcagggcttgagctttctgacatcggcttaatcgaactaaacgaggcgttcgcatcacaagcaattcaagtcattcgcgaactcggactagatgaagaaaaagtaaacgtgaacggaggagccattgctcttgggcatccgctcggttgtacaggtgcaaagctaacgttgacgcttttacatgaaatgcgtcgtcgcaacgaacaatttggtattgtcacgatgtgcattggcggtggcatgggtgctgctggcgtatttgaattattataa

SEQ ID NO: 2926 - protein, 390 aa, Anoxybacillus flavithermus WK1
MKEAVIVAGARTPVGKAKKGTLANVRPDDLGAIVVKETLKRAGNYEGNIDDLIIGCAMPEAEQGLNIARNIGALAGLPYTVPAITINRYCSSGLQAIAYAAERIMLGHADTVIAGGVESMSMVPMMGHVVRPNVKLAESAPEYYMSMGHTAEQVAMKYGVTREEQDAFAVRSHQRAAKAIAEGKFVDEIVPVEVTVRHIENNKLVEKKMTFSQDEGVRPDTNMETLAKLRPAFSVNGTVTAGNASQTSDGAAAVMVMDHEKAKALGLQPLGKFRSFAVAGVPPEVMGIGPIAAIPKALKLAGLELSDIGLIELNEAFASQAIQVIRELGLDEEKVNVNGGAIALGHPLGCTGAKLTLTLLHEMRRRNEQFGIVTMCIGGGMGAAGVFELL

SEQ ID NO: 2927 - DNA, 1173 bp, Methylocella silvestris BL2
  CDS (1)..(1173): transl_table=11
atgtctgatattgttatcgtgagcgcggcgcgcacggccgtcggcgcattcaacggcggctttgccgcggtcccggcccatgagcttggcgccgcggccatcaagggcgcgttggagcgggccggcgtcgaaggcggcgaagtcgacgaagtcattctcggtcaggtgctgacggcgggccagggccagaacccggcgcgtcaggcgtcgatcaaagccggcgtgccgcaggaacggaccgcctttaacatcaatcagttgtgcggctcgggactgcgcgctgtcgcgcttggcctgcagcagatcgccagcggagacgccaatatcatcgtcgcgggtggtcaggaaagcatgtcgcaggcgcagcacagcgcctatttgcgctcgggcgtcaagatgggcgacctcaaattcgccgacaccatgatcaccgacgggctgaccgacgccttcaaccactaccacatggggcagacggccgagaatatcgcggccaaatggcagctgacccgcgacgagcaggatcgtttcgccgtcgcctcgcagaataaggccgaggcggcgcagaagggcggcaagttcggcgacgaaatcatcccctacacgatcagcaccaaaaagggcgatatcgtcgtcgacaaggatgagttcatccgcatgggcgcgacgcttgaggcgctcgccaagctgcgcccggccttcaataaggacggcagcgtgaccgccggcaacgcctccggcatcaatgacggcgcggcggcggtggtgctgatgacctccgccgaggcggccaagcgcggccttgagccgctgggccgcatcgcctcctgggcgacggccggcgtcgatccggcgatcatgggcaccggccccattccggcttcgcgccgggcgctggaaaaggccggctggaaggtcggcgatcttgatctgatcgaggcgaacgaagccttcgccgcgcagtcgctcgcggtctgcaaggatctcgctctcgatcccgacaaggtcaatgtcaatggcggcgcgattgcgatcggccatccgatcggcgcttcgggagcccgcgtcctcgtcacccttctgtatgaattgcgccggcgcaacggcaagaagggcctcgccacgctttgcattggcggcggcatgggcatcgcgctcacgatcgaacgctag

SEQ ID NO: 2928 - protein, 390 aa, Methylocella silvestris BL2
MSDIVIVSAARTAVGAFNGGFAAVPAHELGAAAIKGALERAGVEGGEVDEVILGQVLTAGQGQNPARQASIKAGVPQERTAFNINQLCGSGLRAVALGLQQIASGDANIIVAGGQESMSQAQHSAYLRSGVKMGDLKFADTMITDGLTDAFNHYHMGQTAENIAAKWQLTRDEQDRFAVASQNKAEAAQKGGKFGDEIIPYTISTKKGDIVVDKDEFIRMGATLEALAKLRPAFNKDGSVTAGNASGINDGAAAVVLMTSAEAAKRGLEPLGRIASWATAGVDPAIMGTGPIPASRRALEKAGWKVGDLDLIEANEAFAAQSLAVCKDLALDPDKVNVNGGAIAIGHPIGASGARVLVTLLYELRRRNGKKGLATLCIGGGMGIALTIER

SEQ ID NO: 2929 - DNA, 1179 bp, Cyanothece sp. PCC 7425
  CDS (1)..(1179): transl_table=11
atgaaagcctatatcgtcagtagtgtgcgaactcctgtcggtaaagccccaaggggaacgctgcggaatatgcgtccggatgatctgggggcgatcgccgttcggggggcgttgcaacaggtgaaagacctgacaccggatcagattgaggatgttatttttggctgcgccttcccggaagccgaacagggctttaatttaggacgggtcattgcccagcgcacgggcctgccggattcggtggcgggagcaacggtgaaccgtttctgtgcgtccggtttacaggcgatcgccatggccacccaagccattatggttgggcaggcggaggtgatgattgccggtggggcagagtccatgagtttgattcccatgggcggacatctgctggctcccaaccccgacctgctggcagcggctccccaggtctattgcactatgggtctgacggcggagaacgtggcccagcagtatcagatttcccgggccgatcaggatgcctttgccctgcgctcccatcagcgggcgatcgaagccattcaatcaggtcggttaaacgaggaattgattcccgtggcagtaaaggaaacgctctttgtcgatggccagccccaaaccatcgaaacggtactgcaagtcgatgaaggtccccgtgccgataccagtttagaagccctggccaaattaccggccgtgttccgggtgggaggcagtgtcacagcgggcaattcctcgcaaatgtccgatggggcagcagcaacgatcgtcatgagcgaagccaaagtggtcgagttgggcattcaaccgctgggtcgcttcctgggttttgcggtcgctggtgtacccccagaaattatgggaattggcccggtcgctgccgtcccgaaagtgctgcaacaggtgggtctaaccctggcggacattggcttaatcgaactgaacgaagcttttgctgcccaatccctggcggtgatccgcaaattgcaactggatgaagcgatcgtcaatgtcaatggtggcgcgatcgccctcggccatcccctcggctgtacgggagccaaattgaccgctaccctgctgcacgaaatgaagcgccggggtattcgttacggactggtgacgatgtgtgtgggcggtggcatgggcgcagcgggcgtgtttgagaatctgatggtctaa

SEQ ID NO: 2930 - protein, 392 aa, Cyanothece sp. PCC 7425
MKAYIVSSVRTPVGKAPRGTLRNMRPDDLGAIAVRGALQQVKDLTPDQIEDVIFGCAFPEAEQGFNLGRVIAQRTGLPDSVAGATVNRFCASGLQAIAMATQAIMVGQAEVMIAGGAESMSLIPMGGHLLAPNPDLLAAAPQVYCTMGLTAENVAQQYQISRADQDAFALRSHQRAIEAIQSGRLNEELIPVAVKETLFVDGQPQTIETVLQVDEGPRADTSLEALAKLPAVFRVGGSVTAGNSSQMSDGAAATIVMSEAKVVELGIQPLGRFLGFAVAGVPPEIMGIGPVAAVPKVLQQVGLTLADIGLIELNEAFAAQSLAVIRKLQLDEAIVNVNGGAIALGHPLGCTGAKLTATLLHEMKRRGIRYGLVTMCVGGGMGAAGVFENLMV

SEQ ID NO: 2931 - DNA, 1197 bp, Diaphorobacter sp. TPSY
  CDS (1)..(1197): transl_table=11
atgaaacagatccaagacgcctacatcgttgccgccacgcgcacgcccatcggccgttcgcacaagggctttttccgcaactaccgcccggacgacctgctggccaccacgctcaagagcgcgctggcccaggtgccggggctggaccccgcctcgatcgaggacatcatctgcggctgcgccatccctgaggcgcagcagggcctgaacgtggcgcgcatcggcgccgtgctggcgggcctgcccaccagcgtgggcggcatcacggtgaaccgcttctgcgcttcgggcctgtcggccgtggccatggcggccgaccgcatccgcgtgggcgaggccgaggtgatgatcgccgccggcgtggagagcatgagcatggtgcctatgatgggcaacgcgcccagcctgtcgcccagcatcttcgagcgtgacggcgacgtgggcatcgcctacggcatgggcctcaccgccgagaaggtggcccagcagtggaaggtgagccgcgaggcgcaggacgccttcgcgctggagtcgcaccgccgcgccatcgccgcgcagcaggccggcgagtttgccgacgagatcacgcccatcgaggtgaccgaccgcacggcccacctggagacgggcgaagtcattgccggcacccgcaccgtgagcctggacgagggcgcccgccccgacaccagcctggaaggcctggccaagctgcgcaccgtgtttgccgcgcgcggcacggttacggccggcaacagctcgcagaccagcgacggcgccggcgcgctgatcctggccagcgaagccgccgtcaagcgcttcggcctcacgccgctggcgcgcttcgtcagcttcgccagcaagggcgtgccgccgtccatcatgggcatcggcccgatcgaagccatccccgccgcgctgcgctatgccggtctgaagcaggacgacatcggctggtacgagctcaacgaagccttcgccgcccagtcgctggccgtcatcaacacgctggggctggacacggccaaggtcaaccccatgggcggcgccatcgcgctgggccacccgctgggcgcgacgggcgccatccgctcggccaccgtggtgcatgcgctgcgccgcaagcagctcaagtacggcatggtcaccatgtgcgtgggcatgggccagggcgcggcgggtatcttcgagcgcgtgtaa

SEQ ID NO: 2932 - protein, 398 aa, Diaphorobacter sp. TPSY
MKQIQDAYIVAATRTPIGRSHKGFFRNYRPDDLLATTLKSALAQVPGLDPASIEDIICGCAIPEAQQGLNVARIGAVLAGLPTSVGGITVNRFCASGLSAVAMAADRIRVGEAEVMIAAGVESMSMVPMMGNAPSLSPSIFERDGDVGIAYGMGLTAEKVAQQWKVSREAQDAFALESHRRAIAAQQAGEFADEITPIEVTDRTAHLETGEVIAGTRTVSLDEGARPDTSLEGLAKLRTVFAARGTVTAGNSSQTSDGAGALILASEAAVKRFGLTPLARFVSFASKGVPPSIMGIGPIEAIPAALRYAGLKQDDIGWYELNEAFAAQSLAVINTLGLDTAKVNPMGGAIALGHPLGATGAIRSATVVHALRRKQLKYGMVTMCVGMGQGAAGIFERV

SEQ ID NO: 2933 - DNA, 1179 bp, Chloroflexus sp. Y-400-fl
  CDS (1)..(1179): transl_table=11
atgcgtgaggcagtgattgtttctggagtacgcacggcagtcggcaaagccggtcgaggtgcactgcgtaccgttcgccctgacgatctggcagcaatcgtcgtgaaagcggctatcgaacgggccggcattgatccggcattggtggaagacgtgattatgggctgtgcaatgcccgaaggcgaacagggcctgaacgttgcccggatcgccgcccaacgcgccggcctccccgacagcgtgtgtggcgttaccgtcaaccggttctgcgcttcgggattgcagacgattgcgatggcggcctaccaggttatgtcagggcaaagtgatgtcgtggtggccggcggtaccgaaagcatgagcatggtaccgatgagtggcaacaagttctcgccgaacccctatctggcccagcacgatccggcagtgtacatgagcatgggcttaactgccgagcaggtagcgcggcgctttgaaattgatcgtgaagagcaggatgctttcgccttgcggtcccaccagcgcgcactggcagcacaggctgccggactgttcgaccggagcattgtgccggtagaagtggagctagtcgagccgggagcagacggtcgcccacagcgccgtgtcatggtcttcgaccgcgatgagggaccacgtgccgacacctcagccgaggccctggcgaaactgaagccagtctttgccgccgaaggcaccgtcaccgccggcaactcatcccagatgagcgatggtgcggctgctgttgtcgtgatgagtgctgaacgtgcggcagcgctaggcttgaaaccacgggcacgcttcgtgagcttcgcagtcggcggcgtggagccagaagttatggggattggcccggtcgttgccatacccaaagcgctgaagctggccggcctgacccttgccgacattgatctgatcgaactcaatgaagccttcgccgcccaatcgattgccgtcattcgtcagctcgatcttgacgaagagcgggtgaatgtcaacggcggtgcaattgcgttgggacatccgctgggatgcaccggtgccaaattgaccgtccagatcctcgatgaactcgagcggcgcggcggtcgttacggcatggtgacgatgtgcatcgggggaggtatgggtgccgcaggcattttcgagcggattagctaa

SEQ ID NO: 2934 - protein, 392 aa, Chloroflexus sp. Y-400-fl
MREAVIVSGVRTAVGKAGRGALRTVRPDDLAAIVVKAAIERAGIDPALVEDVIMGCAMPEGEQGLNVARIAAQRAGLPDSVCGVTVNRFCASGLQTIAMAAYQVMSGQSDVVVAGGTESMSMVPMSGNKFSPNPYLAQHDPAVYMSMGLTAEQVARRFEIDREEQDAFALRSHQRALAAQAAGLFDRSIVPVEVELVEPGADGRPQRRVMVFDRDEGPRADTSAEALAKLKPVFAAEGTVTAGNSSQMSDGAAAVVVMSAERAAALGLKPRARFVSFAVGGVEPEVMGIGPVVAIPKALKLAGLTLADIDLIELNEAFAAQSIAVIRQLDLDEERVNVNGGAIALGHPLGCTGAKLTVQILDELERRGGRYGMVTMCIGGGMGAAGIFERIS

SEQ ID NO: 2935 - DNA, 1206 bp, Alcanivorax sp. DG881
  CDS (1)..(1206): transl_table=11
atgaccagagaagccgtaatcgtatccaccgcccgtacccccattggcaaggcctaccgcggtgccttcaacgacacccaggctcaggcactgggtggtcacgccatcaaacatgccgtggagcgcgcaggcattgatccttcctccattcaggacgtgatcatgggtgccgcgctgcagcaaggcagcaccggtggcaacgtggcccgccaagcggccctgcgcgccggcctgcccaccagcgtatccggcatgagcatggaccgtcagtgcgcctccggcctgatggccatcgccaccgccgccaaggaaatcatcgtcgacaacatggacgtggccgtggccggtggcctagagtccatctccctggtgcagaacgacaagatgaacaccttccgcgctgccgatccgtggttgaaagaaaaccgcccggacatctacatgtccatgctggaaaccgccgaaattgtcgcagaccgttataacgtgtcccgtgacagccaggacgaatacgccttccagtcacaaatgcgcaccgctgccgcccaggaagccggcaagtttgatgacgaaatcgcccccatgaccagcgtcatgaaagtgatgaacaaagagaccaaggaaatttccgacgtggaagtgaccctggacaaagatgaaggcaaccgcccgcaaaccaccctggaaggcctgcaatctctgcagcccgtattcaagggtggccaacaggtacaggaaggcggctttattaccgccggtaacgcctcccagctgtctgacggcgccagcgcctgcgtactgatggacagcaaggaagccgagcgtctgggcctgcaaccgctgggcgcctatcgcggcatggccgtcgctggctgtgatcccgacgaaatgggtattggcccggtgtatgcggtgcccaaactgctcaagcgtttcggcctcaccgttgatgacatcggcctctgggagctgaacgaagcctttgccagccagtgtctctacagccgtgacaagctcggcatcgatccggaaaaatacaacgtcaacggcggcgccatctccatcggtcatccctacggcatgtccggtgcccgcatgaccggccacgcacttatcgaaggcaagcgccgcggtgtgaagtatgtagtcgtgaccatgtgtatcggtggtggcatgggtgctgcaggtctgttcgaagtgttctaa

SEQ ID NO: 2936 - protein, 401 aa, Alcanivorax sp. DG881
MTREAVIVSTARTPIGKAYRGAFNDTQAQALGGHAIKHAVERAGIDPSSIQDVIMGAALQQGSTGGNVARQAALRAGLPTSVSGMSMDRQCASGLMAIATAAKEIIVDNMDVAVAGGLESISLVQNDKMNTFRAADPWLKENRPDIYMSMLETAEIVADRYNVSRDSQDEYAFQSQMRTAAAQEAGKFDDEIAPMTSVMKVMNKETKEISDVEVTLDKDEGNRPQTTLEGLQSLQPVFKGGQQVQEGGFITAGNASQLSDGASACVLMDSKEAERLGLQPLGAYRGMAVAGCDPDEMGIGPVYAVPKLLKRFGLTVDDIGLWELNEAFASQCLYSRDKLGIDPEKYNVNGGAISIGHPYGMSGARMTGHALIEGKRRGVKYVVVTMCIGGGMGAAGLFEVF

SEQ ID NO: 2937 - DNA, 1179 bp, Desulfobacterium autotrophicum HRM2
  CDS (1)..(1179): transl_table=11
atgaaagatgcatatatagtacaatcaatcagaaccccgggctgcaagcagaggaggggtcatttcaaggagacccggcccgaggagctgatttcatttatcctcaggacccttgttgagaaaacagacggcgtcacccccgacgacattgaagatgtcatgtgcgggtgctcgtttccagaagcagagcaggggctcaacatcggcagaatcggcgcaaaaatggccggttttcccgacaagacttcgggtgccacagtcaaccgtttctgctcgtcgggtcttgagggcattgcccttgcatctgcaagggtttccatgggctggtcagagatagtcatcggcgcaggggttgagtccatgacctttgtacccatgggcggcaacgtaccccgtccccatcccgaatattcaaagaccgaccctgaaatgtacacctctatgggtatcacggccgagaatgtggcaaaccgctacaagatctcccgccaggagcaggatgaatttgcctctaaatcccaggcaaaggccgcacgggcaagggacaacggactgttcaccgaactcattcccacccctgcctaccggtatgtggagcaggctgacaagacctacaaaaaagagcaattcatcgtggatgccgacgacggtatccgggagtccacacccgagagtcttggtaaacttcgcacggtgtttgccgtaaacggaagcgtcacggccggtaactcctcccagaccacggacggtgctgctgcctccctgatcgtgtccaaggaaaaatgcgaagaactcggcctcaaacccattggaaggctcatctcctacgcaaccgtgggctgccgggctgacgaaatgggcgtgggtcccagatacgccattccaaaggtgcttgaacaggccaatatgaccgtggacgacatggacatctttgaaatcaacgaagcatttgcctcccaggccatctactgcatccgggaattgggcattaaaaaatacatggacaagatcaacatccatggtggtgccattgccctgggtcatcccctgggatgcacaggtgccaaattgaccgcaacctgccttgccaaccttaaggaagtcaagggtcgctacggtattgtttccatgtgcattggcggcggtatgggtgctgctggaatttttgagagattctaa

SEQ ID NO: 2938 - protein, 392 aa, Desulfobacterium autotrophicum HRM2
MKDAYIVQSIRTPGCKQRRGHFKETRPEELISFILRTLVEKTDGVTPDDIEDVMCGCSFPEAEQGLNIGRIGAKMAGFPDKTSGATVNRFCSSGLEGIALASARVSMGWSEIVIGAGVESMTFVPMGGNVPRPHPEYSKTDPEMYTSMGITAENVANRYKISRQEQDEFASKSQAKAARARDNGLFTELIPTPAYRYVEQADKTYKKEQFIVDADDGIRESTPESLGKLRTVFAVNGSVTAGNSSQTTDGAAASLIVSKEKCEELGLKPIGRLISYATVGCRADEMGVGPRYAIPKVLEQANMTVDDMDIFEINEAFASQAIYCIRELGIKKYMDKINIHGGAIALGHPLGCTGAKLTATCLANLKEVKGRYGIVSMCIGGGMGAAGIFERF

SEQ ID NO: 2939 - DNA, 1179 bp, Labrenzia alexandrii DFL-11
  CDS (1)..(1179): transl_table=11
atgaaacaagcagttattgtctcgaccgcccggaccgggctggcgaagtcctatcggggcgcgtttaacgaaactcacggcgcgaccatggccggtcacgcgatcgagcatgccgtcgcccgctccaaggtggacccggctatcatcgaagacgcttttgtcggctgcgggtatccggaaggctggaccggcagcaacattgcgcgtcagtccgttctgcgcgccggtctgccggtcaccacagcggccgtcaccatcaaccggttctgctcctccggccttcaggccgttgccatggcagcgcatgcaatttccgtcgaaggtgctccagctgcaattgctggcggtgtggaaagcatcagccagatgccgccgtcccgcccgcccgctgcgcgagagaaatggctcgatgagcacaagccggaggtctatctctcgatgatcgagacctccgacattgtcgccaaacgctacaacatcagccgtgatgcccaagacgaactgtctcttgtcagccagcagcgcactgccgcagctcaggctgccgggaagcttgacgacgagatcgtgccaatcaccgtcacccaggccttcaaggacagggaaaccggagaagtgacccgcaaggaggtcacgttttccatggacgactgcaaccgtccgaacacaacgctcgaaggcctggccaagctggagccggtgcgcggcgaaggcaatttcaccaccgccggcaacgcatcccaactgtcagacggcgcagcggctctggtgttgatggatgcagatctggcagaaaagcagggccttgagccgctcggcgcgctgaagggctttgtcacggcgggttgcgagccggatgaaatgggcattggtcccgtctatgccgtgccgcgccttttgaaacgccacggtttgtccgtcgatgacatcgatctttgggagctgaacgaggcgtttgcctcacaggcgctgtattgccgggagcagctcggtatcgatccggagaagtgcaacgtgaatggcggctccatttccatcggtcacccgttcgggatgaccggcgcccgcatgaccggccatctgcttctggaaggccgccgccggggctccaagctcggcgttgttaccatgtgcattggcggcgggcagggcgctgccggcctgttcgagatttactaa

SEQ ID NO: 2940 - protein, 392 aa, Labrenzia alexandrii DFL-11
MKQAVIVSTARTGLAKSYRGAFNETHGATMAGHAIEHAVARSKVDPAIIEDAFVGCGYPEGWTGSNIARQSVLRAGLPVTTAAVTINRFCSSGLQAVAMAAHAISVEGAPAAIAGGVESISQMPPSRPPAAREKWLDEHKPEVYLSMIETSDIVAKRYNISRDAQDELSLVSQQRTAAAQAAGKLDDEIVPITVTQAFKDRETGEVTRKEVTFSMDDCNRPNTTLEGLAKLEPVRGEGNFTTAGNASQLSDGAAALVLMDADLAEKQGLEPLGALKGFVTAGCEPDEMGIGPVYAVPRLLKRHGLSVDDIDLWELNEAFASQALYCREQLGIDPEKCNVNGGSISIGHPFGMTGARMTGHLLLEGRRRGSKLGVVTMCIGGGQGAAGLFEIY

SEQ ID NO: 2941 - DNA, 1185 bp, Pseudovibrio sp. JE062
  CDS (1)..(1185): transl_table=11
atgacctcgcctaatgatgttgtaattgtaagcgcaacacgtaccccaatcgggtccttcaacggttccttcgccaacaccccagctcaggatcttggcaccgcagttatcaagtcagctcttgatcaggcaaaagtggaagcaaacgacgtcaacgaagtcatcttcggtcacgtactcacgtctggtcttggtcagaacccggcacgtcaggcagcactcaacgctggcatggcagatgattcgactgcaatcgtcatcaaccaggtttgtggctcaggcctgcgcgcagtcgccatgggcatgcagcagatccagtccggcgatgcagacatcatcgttgcaggcggtcaggaaaacatgaccctgtccccacactgccagagcctgcgggcgggtgtaaaaatgggcgactattccatgaccgacaccatgctcaaagacggcctaatcgacgcgttccagggctatcacatgggtatcactgcagaaaacatcgcagaaaagtaccagatcacccgtgaagcacaggacgaattcgctgtttcctctcagaacaaagcagaagctgcactgaaggctggcaagttcaaagacgaaatcactccaatcaccgtgaaagagcgcagagctgagcgtgtggtagaagatgatgaatacatccgcgtaggcgccaacattgaatccatgcagaaactgcgtccggcattcaaaaaggaaggcactgtaaccgcagcaaacgcatccggcatcaacgatggtgcagcagctctggttctgatgagcgcagaagcagctgaaaagcgtggcctcaccccgctggcaaccatcaagtcctgggcaaccgccggtgttgatcctgcatacatgggtctcggcccgatccctgcttccaagaaggcactcgaaaaagctggctggtccattgaagatctggatctggtggaagcaaacgaagcattcgctgcacaggcactggcagttggtcaggagctgggaatcgactcagacaagctcaacgtcaacggtggcgcaatcgctctgggtcatcctatcggagcatccggcgcacgtgtacttgttactctgctgcacgaaatgaagcgtgaagagaagaaaaagggccttgcaactctttgcattggtggaggcatgggtatcgcactgtgtgttgagagaaaataa

SEQ ID NO: 2942 - protein, 394 aa, Pseudovibrio sp. JE062
MTSPNDVVIVSATRTPIGSFNGSFANTPAQDLGTAVIKSALDQAKVEANDVNEVIFGHVLTSGLGQNPARQAALNAGMADDSTAIVINQVCGSGLRAVAMGMQQIQSGDADIIVAGGQENMTLSPHCQSLRAGVKMGDYSMTDTMLKDGLIDAFQGYHMGITAENIAEKYQITREAQDEFAVSSQNKAEAALKAGKFKDEITPITVKERRAERVVEDDEYIRVGANIESMQKLRPAFKKEGTVTAANASGINDGAAALVLMSAEAAEKRGLTPLATIKSWATAGVDPAYMGLGPIPASKKALEKAGWSIEDLDLVEANEAFAAQALAVGQELGIDSDKLNVNGGAIALGHPIGASGARVLVTLLHEMKREEKKKGLATLCIGGGMGIALCVERK

SEQ ID NO: 2943 - DNA, 1176 bp, Ruegeria sp. R11
  CDS (1)..(1176): transl_table=11
atgaagcaagctgtcattgtctctgccgcacggaccggtctcgcgaaatcctttcgaggatcgttcaatcagacacacggcgctgcaatggggggccatgtggtaaaggccgctgtcgagcgcgcggggcttgagggaggagcggtcgaagactgcatcatcggctgtggatttccggaaggagcaacaggtcataacatcggtcgccagatcgcgctgcgggcgggcttgccggacagtgcgtccggtatgaccgtcaaccggttttgcgcctcgggtttgcagacgattgccctcgcggcgcagcagatcaccgcagagggtgcaggtccgatggtcgcgggtggggtcgagagcatttcgatggtccagcccaacgtcaaacagatccaggacccttggctgcgtgaacaccggcccgaagtctacatgacgatgatcgacacagccgatgtggtcgcagaccgttacgggatcagccgcgaggcgcaggacgcctatggtctgcgcagccagcagaggatcgctgcggcgcaggcgggcggtcattttgccgatgaaatcgtgcctatgagcacaaccatggcagtcaaggacaaggaaaccggagaggtcagcacccgcgacgtcgtggtggaccgggacgaatgcaaccgccctcagacgacgctggacgggctggctgcgctggagccagtgcgaggccccgagaaattcatcaccgcaggcaacgccagccagctgtctgacggggccgctgccgttgtcatgatggaagcagatgaggcgagccgccgggggctggagccgatgggtgcgtttcgcggattttgcgttgcaggatgtgcgccggatgaaatggggatcgggcctgtctatgctgtgccgcgccttctggagcgtcatgggctcaaggtcgaggacattgatctgtgggaactgaacgaagccttcgccagtcaggcgctttattgtcgtgacacactgggcattccggacgagatctgcaacgtgagcggtggttcaattgcgatcggccacccctttggcatgactggggcccgtatggttggccacatcctgcgcgagggaagccgccgcggcgcgaaactgggtgtagtcaccatgtgtatcggcggcggaatgggcgctgcaggcctgtttgaaatctactga

SEQ ID NO: 2944 - protein, 391 aa, Ruegeria sp. R11
MKQAVIVSAARTGLAKSFRGSFNQTHGAAMGGHVVKAAVERAGLEGGAVEDCIIGCGFPEGATGHNIGRQIALRAGLPDSASGMTVNRFCASGLQTIALAAQQITAEGAGPMVAGGVESISMVQPNVKQIQDPWLREHRPEVYMTMIDTADVVADRYGISREAQDAYGLRSQQRIAAAQAGGHFADEIVPMSTTMAVKDKETGEVSTRDVVVDRDECNRPQTTLDGLAALEPVRGPEKFITAGNASQLSDGAAAVVMMEADEASRRGLEPMGAFRGFCVAGCAPDEMGIGPVYAVPRLLERHGLKVEDIDLWELNEAFASQALYCRDTLGIPDEICNVSGGSIAIGHPFGMTGARMVGHILREGSRRGAKLGVVTMCIGGGMGAAGLFEIY

SEQ ID NO: 2945 - DNA, 1209 bp, Stenotrophomonas sp. SKA14
  CDS (1)..(1209): transl_table=11
atgaccaagcaaatccaggacgcctacatcgtcgccgccacccgcaccccggttggcaaggcgcccaagggcatgttccgcaacacccgccccgacgacatgcttgcgcacgtgctgcgcagcgtcgtcgcgcaggcgccgggcgtggacgtcaaccgcatcgatgacgccatcatcggctgcgccatgccggaagccgagcagggcatgaacgtggctcgcatcggcgtgctgctggccggcctgcccaacaccatcgccgcacagaccgtgaaccgcttctgctcctccggcctgcaggccgtggcgcaggccgccgacgcgatccgcctgggcaacgccgacctgatgctggccggcggcaccgagtcgatgtcgatggtgccgatgatgggcaacaagatcgcgatggcaccgagcgtgttcgacaacgaccacgtggccatcgcctacggcatgggcatcaccgccgagaaggtcgccgaagaatggaaggtctcgcgcgaagaccaggatgcgttcgccctcgcctcgcaccagaaggccatggccgcgatccagaacggtgacttcaaggacgagatcagcccgtacgagatcgtctcgcacctgccggacctggccgacggccagcgcatcatcacccgcaacaaggtggccgacaccgacgaaggcccgcgcccggactcctcggccgaaggcctggccaagctgcgcccggtattccgcaacggccagttcggcggcaccgtcactgccggcaactcctcgcagatgagcgatggcgccggcgccgtgctgctggcttcggagcaggcgatcaaggattacggcctgaccccgctggcgcgtttcgtcagcttctcggtggccggcgtgcgtccggaagtgatgggcatcggcccgatcgccgcgatcccgaaggcactgaagcaggccggcctgacccaggaccagctggactggatcgagctcaatgaagccttcgccgcgcagtcgctggcggtgatccgcgattgcggcctggacccgagcaaggtcaacccgctgggcggcgcgatcgccctgggccatccgctgggcgccaccggcgcgatccgcaccgcgaccctgctgcacggcctgcgtcgtcgccagcagaagtacggcatggtgacgatgtgcatcggcaccggcatgggcgcggcgggcattttcgaggcgctgtaa

SEQ ID NO: 2946 - protein, 402 aa, Stenotrophomonas sp. SKA14
MTKQIQDAYIVAATRTPVGKAPKGMFRNTRPDDMLAHVLRSVVAQAPGVDVNRIDDAIIGCAMPEAEQGMNVARIGVLLAGLPNTIAAQTVNRFCSSGLQAVAQAADAIRLGNADLMLAGGTESMSMVPMMGNKIAMAPSVFDNDHVAIAYGMGITAEKVAEEWKVSREDQDAFALASHQKAMAAIQNGDFKDEISPYEIVSHLPDLADGQRIITRNKVADTDEGPRPDSSAEGLAKLRPVFRNGQFGGTVTAGNSSQMSDGAGAVLLASEQAIKDYGLTPLARFVSFSVAGVRPEVMGIGPIAAIPKALKQAGLTQDQLDWIELNEAFAAQSLAVIRDCGLDPSKVNPLGGAIALGHPLGATGAIRTATLLHGLRRRQQKYGMVTMCIGTGMGAAGIFEAL

SEQ ID NO: 2947 - DNA, 1185 bp, Acidobacterium capsulatum ATCC 51196
  CDS (1)..(1185): transl_table=11
atgccagaagctgtcatcgtcagcgccgtccgtactccagccggcaaggctccacgcggccggctcgccgcggtgcggcccgatgacctggctgccatcgccatccagggtgctctggcgcgtgtgcccgcgctggattctcgcgagatagaagacatcatcgtcggttgcgccatgcctgaggcagagcagggcatgaacgtcgctcgcattgcggccctgcgcgccggactgccggtcgagactgcggccatgaccgtcaaccgcttctgctcctcgggcctgcagaccatcgccctcgccgcgcagcagattctcaccggccagtcgcgcgtggtgctggcgggtggcaccgagtcgatgagcatggtgccgatgggcggcaacaaggtcagcgccaatccctggctcatcgatcaccatcccgatgtttatctctccatgggcctcactgccgaaaatctggcgcgaaagttcggcatcacccgcgaagacgccgacacgtttgccctcgcgagccaccagaaagcactggccgcgatcgagcagggcatcttcgccggagaaattgtgcccgttacggtgacaaatacttcgcccggcgccagcccggcgcatgtggcgcaagcatcggctctttttgataccgatgaaggcccccgcgccgatacttcgttggaagcgctggctaaactcaagccggcctttcacgcgcagggcacggtcacaccaggcaactcctcgcagacctcagacggcgcggccatggcagtcgtgatggaggccgcacgtgcgcgtgagctcggcctcgctcccttggcacgctttgtcagctttgccaccgccggttgcgcgccagaggagatgggcctcggccccgtcttcgccattcccaaagctctgcggcaggctggactcacgctcgaacagatcgaccgcatcgagttgaacgaagcctttgccgcgcagtcgctcgccgtgatccgcgaggcccatctcgaccccggcaaggtcaacgtgcacggcggcgccatcgcgctcggccatccgctcggctgcaccggagccaagctgacggccacactcctgcactccatgcgccgcgaccgtctccgctacggactcgtcaccatgtgcgtcggcggcggcatgggcgcggccggcatctttgagaatcttgcgtaa

SEQ ID NO: 2948 - protein, 394 aa, Acidobacterium capsulatum ATCC 51196
MPEAVIVSAVRTPAGKAPRGRLAAVRPDDLAAIAIQGALARVPALDSREIEDIIVGCAMPEAEQGMNVARIAALRAGLPVETAAMTVNRFCSSGLQTIALAAQQILTGQSRVVLAGGTESMSMVPMGGNKVSANPWLIDHHPDVYLSMGLTAENLARKFGITREDADTFALASHQKALAAIEQGIFAGEIVPVTVTNTSPGASPAHVAQASALFDTDEGPRADTSLEALAKLKPAFHAQGTVTPGNSSQTSDGAAMAVVMEAARARELGLAPLARFVSFATAGCAPEEMGLGPVFAIPKALRQAGLTLEQIDRIELNEAFAAQSLAVIREAHLDPGKVNVHGGAIALGHPLGCTGAKLTATLLHSMRRDRLRYGLVTMCVGGGMGAAGIFENLA

SEQ ID NO: 2949 - DNA, 1164 bp, Gemmatimonas aurantiaca T-27
  CDS (1)..(1164): transl_table=11
atgaccgaggtcgtgatcgtcagtagtgcccgcagcgccgtggcccgaggcaaggccgatggtgcgctggccgcggtgcatccggtggatctgtcttcggcggtgatgaaagccgctatcgatcgtgcgggtatcgatcccgagatcatcgaagatgtgcagtggggctgtgcgatgccggaggcgtcgcaggggctcaatcacgcgcggctggcatggctgcgcggcggttttcccgtgtcgacagcggcggcaaccatcaaccgcttctgttcatcggggctgcagtcggtggcctatgcatcgcaggccatcattgctggccagggtgacgccgtgatggccggtggcatcgaaatgatgtcgcaggtgccgatgtcgggttacaacgcgcgtctgtcaccggagatcaccgagtcgtacatcggcatgggcttcacggcagaacgtgtcgcgaagcgctgggagatcacgcgcgaacagcaggaccagtttgcctacgacagccagcgcaaggccgtggctgcgttggcctccggcgtgttcgcgaaggagatcgtgcccatcaccacgcagcggtactcgtggaagggcgccgagaagacggtgaaggacgtggtgttcgatgtggacgaatgcccgcgtgcggaaaccaccgtggagggtctgaacaaactgcgtcccgcgtttgtccccacgggttcggtcacggccggcaacgcgagtccctactccgatggcgcggcggccgtgctgatgatgcgcgccgacaaagcgaaggaactcggactcacgccgatcgcacgcttcgtgagttttgcggtggctggtgtcgaccccgacatcatgggcgtggggccgatcaaggccgtacccaaggcgctcaagcgcgctggcctcaccctcgcagatctcaaactgatcgagttcaacgaagccttcgccgcgcaggcgctggccgtcatcaaggaactcgatatgcccaccgacatcatcaacgtgaacggtggcgccatcgccctgggccatccgctcggagccaccggcgccaagctcaccacccaactggtgcacgagctgcatcgccgcggtggcggatacggcatggtgaccatgtgcattggcggaggtatgggagcagcgggggtcttcgaggtgttttaa

SEQ ID NO: 2950 - protein, 387 aa, Gemmatimonas aurantiaca T-27
MTEVVIVSSARSAVARGKADGALAAVHPVDLSSAVMKAAIDRAGIDPEIIEDVQWGCAMPEASQGLNHARLAWLRGGFPVSTAAATINRFCSSGLQSVAYASQAIIAGQGDAVMAGGIEMMSQVPMSGYNARLSPEITESYIGMGFTAERVAKRWEITREQQDQFAYDSQRKAVAALASGVFAKEIVPITTQRYSWKGAEKTVKDVVFDVDECPRAETTVEGLNKLRPAFVPTGSVTAGNASPYSDGAAAVLMMRADKAKELGLTPIARFVSFAVAGVDPDIMGVGPIKAVPKALKRAGLTLADLKLIEFNEAFAAQALAVIKELDMPTDIINVNGGAIALGHPLGATGAKLTTQLVHELHRRGGGYGMVTMCIGGGMGAAGVFEVF

SEQ ID NO: 2951 - DNA, 1203 bp, Laribacter hongkongensis HLHK9
  CDS (1)..(1203): transl_table=11
atgaccaagcagattcaggaagcctatatcgtcgccacgacccgtaccccggtcggcaaggcgccgcgcggcatgatgcgcaacgtgcgtccggacgacatgctcgctcatgtcatcaagggtgcactggcgcaagtgccgggccttgatgtcaatctgatcaatgacgtagtggtgggttgtgccttccccgaagccgagcaaggcctcaacatggcccgtatcggcgtgctgctcgccggcttgccggataccgtgggcggcatcaccatcaaccgttactgctcgtcgggcatcaatgccgtgcagatcgccgctgatcgtatccgcatgggtgaagccgacgtggtgatcgccgccggttcggaatcgatgtcgatggtgccgatgatgggcaacaaggtgtcgctcaacccggaagtatttgccagtgacgagaactatgccattgcctacggcatgggcctgacggccgaaaaggtggcccagcaatggaaggtgtcgcgcgaagatcaggatgcgtttgcagttgaatcgcatcgtcgtgcgttggcagccatcgaaggcggcaagtttgcggccgaaatcaccccgctggacgtgacctaccgcgtgccgaacctcaagaccggcgaagtggactacgtcaagaaaaccctgacgaccgacgaaggtccgcgtgccggcaccaccatggaaggcctcgctaagctcaagaccgtgtttgatgccaaaggcagtgttactgccggcaacagctcgcaaatgtccgatggcgccggtgcagtggtactggtcagtgaaaaggtcctcaagcagttcggcctgaccccgctggcccgctatgtcagctttgccgtcaagggcgtgccgccggccatcatgggtattggtccgaaggtagccattcccgccgcactggaaaacgccggcattgcccagagtgacatcaagtggatggagctcaacgaagcctttgctgcccaagcactggctgtcatgcgtgatctggagcttgacccctccgtggtcaacccgaacggtggcgccattgcgctgggccacccgctgggtgccaccggcgccatccggacggcgacgctggtacacggcatgcgccaggccggacagaaggggtatggcatggtgaccatgtgcatcggcaccggcatgggagctgccggcattatcgaagtcctgtaa

SEQ ID NO: 2952 - protein, 400 aa, Laribacter hongkongensis HLHK9
MTKQIQEAYIVATTRTPVGKAPRGMMRNVRPDDMLAHVIKGALAQVPGLDVNLINDVVVGCAFPEAEQGLNMARIGVLLAGLPDTVGGITINRYCSSGINAVQIAADRIRMGEADVVIAAGSESMSMVPMMGNKVSLNPEVFASDENYAIAYGMGLTAEKVAQQWKVSREDQDAFAVESHRRALAAIEGGKFAAEITPLDVTYRVPNLKTGEVDYVKKTLTTDEGPRAGTTMEGLAKLKTVFDAKGSVTAGNSSQMSDGAGAVVLVSEKVLKQFGLTPLARYVSFAVKGVPPAIMGIGPKVAIPAALENAGIAQSDIKWMELNEAFAAQALAVMRDLELDPSVVNPNGGAIALGHPLGATGAIRTATLVHGMRQAGQKGYGMVTMCIGTGMGAAGIIEVL

SEQ ID NO: 2953 - DNA, 1173 bp, Exiguobacterium sp. AT1b
  CDS (1)..(1173): transl_table=11
atgagggaagcagtcatcgtagccggcgcacggacgccggtcggaaaagcaaaacgcggttcgttccgtaacgtacgttcggacgagctcgcgggatatgccatcaaggcgacgcttgagcgttcaggatataaaggcccgattgatgacgtcatcatgggttgtgcgatgccagaagcggagcaagggatgaacatcgcacgctatgcggcggtccgggggggactgtcgcacgaagttccagcgatcaccatcaaccgctactgctcgtcaggtcttcaagccatcgcggatgcggcggcgaaaatcatgatcggtcaagcgacggcaatcatcgccggcggtatggagtcgatgagccaagtgccgatgggtggtcacgtcatccgtccaaacccacacatcatggagacggcaccagagtactacatgagcatgggacatacggcagaacgtgtcgcagctgaatacaacatctcgcgcgaagaccaagatgcatttgccatcaacagtcaccaaaaggcggcggcagccatcgcaggtggcaagttccaggaagaaatcgttcctgtgacggtcatcgagcacgtactcggtgaagacgggaaagtcgcggaagtggagaaagtcgtcaagcatgacgaaggtgtccgtgccgattcgacaatcgaagcgctcggtaaacttcgcccggctttcaaaatcaaagggtcggtcacggcgggtaacgcttcacaagtatccgacggagcagcagcagttctcgtcatggaccgtgaagaagcagaacgccaaggattgcaaccgatggccaagttcctctcgttcgcggtcggcggtgtccgtccggaagtgatgggaatcggaccagtcgtcgccattccgaaagcactcgagatggctggcgtgaagttagaagaagtcggattgttcgagttgaacgaagcgttcgcgagtcagtcactcggtgtcatccgtgaactcggcatcgatccatcgaaagtgaacgtgaacggcggcgccatcgccctcggtcacccactcggatgtactggagcaaaactttcagtctcgatcttgcatgagatgaaacgacgcaatgagaagtatggggttgtcacgatgtgtatcggcggcggaatgggcgcggctggtgtcttcgaattactttaa

SEQ ID NO: 2954 - protein, 390 aa, Exiguobacterium sp. AT1b
MREAVIVAGARTPVGKAKRGSFRNVRSDELAGYAIKATLERSGYKGPIDDVIMGCAMPEAEQGMNIARYAAVRGGLSHEVPAITINRYCSSGLQAIADAAAKIMIGQATAIIAGGMESMSQVPMGGHVIRPNPHIMETAPEYYMSMGHTAERVAAEYNISREDQDAFAINSHQKAAAAIAGGKFQEEIVPVTVIEHVLGEDGKVAEVEKVVKHDEGVRADSTIEALGKLRPAFKIKGSVTAGNASQVSDGAAAVLVMDREEAERQGLQPMAKFLSFAVGGVRPEVMGIGPVVAIPKALEMAGVKLEEVGLFELNEAFASQSLGVIRELGIDPSKVNVNGGAIALGHPLGCTGAKLSVSILHEMKRRNEKYGVVTMCIGGGMGAAGVFELL

SEQ ID NO: 2955 - DNA, 1194 bp, Thermus thermophilus HB27
  CDS (1)..(1194): transl_table=11
atgcgggaagcggtcatcgtgagcgcagtgcggagccccgtggcccggggcaagaagaacggggccttggccaccctccaccccgtggacctctccgcccaggtgatgcgggcggcggtggagcgggtgggcctggaccctaaggagctcgaggacgtcctctgggggtgcgccatgcccgaggcggcccaggggctgaacatcgccaggctcgccctcctccgggcgggcttcccggtggaggtggcgggggccaccatcaaccgcttctgctccagcggcctccagaccatcgccatggccgcccaggaggtgatgacggggatggcggacgccgtcttggcgggcggggtggagatgatgagccaggtgcccatgtcgggcttccacaccaggctccaccccgacctcacccccacggagtggagccccgagacctactccacctacatcggcatgggcttcaccgccgaaagggtagcggagcgcttcggcataagccgcgaggaccaggacaggtgggccttgaggagccaccagaaggcggcccaggcctgggccgaggggcgcttccccgaggtggtccccatccgggtgcctaaggtcacctaccgcgggaccaagaaggaggtggaggaggtcgtctttgatcgggacgagacggtccgccccgacaccagcctcgaggccctggccaagctgaggcccgcctttaagaagaacggcaccgtgaccgcgggcaactccagcccctactccgacggggcggcggcggtggtggtcatgagccgggagaaggcggaggccctgggcctcaagcccctcgcccgcttcgtgagcttcgccgtggccggggtggagcccgacgtgatggggatcggcccggtgaaggcggtgcccaaggcgttgcagcgcgcggggcttaccctggaccagatcgccctcattgagttcaacgaggccttcgccgcccaggtcctggcggtgatgcgggccctggagatgcccgaggagaaaacgaacgtcaacggcggggccatcgccttaggccaccccctgggggccacgggggccaagctcaccgcccagctcttgagcgagctatcccggcggggtggggggtacggcctcgtcaccatgtgcatcggcggcggcatgggcgccgcgggcgtgtttgaggtctatccggcttaa

SEQ ID NO: 2956 - protein, 397 aa, Thermus thermophilus HB27
MREAVIVSAVRSPVARGKKNGALATLHPVDLSAQVMRAAVERVGLDPKELEDVLWGCAMPEAAQGLNIARLALLRAGFPVEVAGATINRFCSSGLQTIAMAAQEVMTGMADAVLAGGVEMMSQVPMSGFHTRLHPDLTPTEWSPETYSTYIGMGFTAERVAERFGISREDQDRWALRSHQKAAQAWAEGRFPEVVPIRVPKVTYRGTKKEVEEVVFDRDETVRPDTSLEALAKLRPAFKKNGTVTAGNSSPYSDGAAAVVVMSREKAEALGLKPLARFVSFAVAGVEPDVMGIGPVKAVPKALQRAGLTLDQIALIEFNEAFAAQVLAVMRALEMPEEKTNVNGGAIALGHPLGATGAKLTAQLLSELSRRGGGYGLVTMCIGGGMGAAGVFEVYPA

SEQ ID NO: 2957 - DNA, 1185 bp, Staphylococcus aureus subsp. aureus MRSA252
  CDS (1)..(1185): transl_table=11
atgcaagaagcatacattgtagcttatgggcgttcagccgcagcgaaagcaaagcaaggcgcattattccacgaaagacctgatgatgtcgcagccaaagtattacaaggcgtattgaaacgtattgacggaaaattcaataagaatatgattgaagatgtcattgttggtacggcttttccagaaggattacaaggacaaaacattgcacgaacgattgcattgcgtacgggattatctgacactgtaccgggtcaaacagtgaatcgctactgctcatcaggattacaaaccatcgcgattgcagccaatcaaattatggcgggtcaaggagatatacttgtagctggtggcgttgaattgatgagtgccgtaccaatgggtggcaacgagcccacaaacaatcctaccttacaatatgatgatataggtgcgtcatatcctatgggtttaactgctgaaaatgtagcatcccaatttgacgtatcacgcgaagatcaagatgcttatgctgtcagaagtcatcagcgtgcctatgacgcacaacgtgatggtcggttcaaagatgaaattattccaatacaagtaaactcagttgaatatacaaacgtaggaccaaaagtacacacaaatatctttgaccaagatgaatttatacgacctgacaccacgatggaggcattagccaaattacgtacagtatttaaagctgacggcactgtgactgcgggaacatctgccccactttctgatggtgcaggatttgtagttttaatgtctggagataaagtgaaagaactaggcgtgacacctattgcacgattcgttggttataaggcagtaggcgttgacccgaaaattatgggtattgggcctgcatatgcgattcctgaagtattgtcactcagcaatctatctgttgaagacattgatttaatcgaattgaacgaagcatttgcttctcaaactattgcatctattaaagaagtaggtctagatatatcacgtacgaatgtgaatggtggcgctattgctttaggtcatccattaggtgctacaggcgcaatgttaaccgcgcgtttacttaatgaaatgggtagacgtcccgatagtcgttacggcatggttacgatgtgtattggtgtcggtatgggtgcagctgctatatttgagtatgtgcgttag

SEQ ID NO: 2958 - protein, 394 aa, Staphylococcus aureus subsp. aureus MRSA252
MQEAYIVAYGRSAAAKAKQGALFHERPDDVAAKVLQGVLKRIDGKFNKNMIEDVIVGTAFPEGLQGQNIARTIALRTGLSDTVPGQTVNRYCSSGLQTIAIAANQIMAGQGDILVAGGVELMSAVPMGGNEPTNNPTLQYDDIGASYPMGLTAENVASQFDVSREDQDAYAVRSHQRAYDAQRDGRFKDEIIPIQVNSVEYTNVGPKVHTNIFDQDEFIRPDTTMEALAKLRTVFKADGTVTAGTSAPLSDGAGFVVLMSGDKVKELGVTPIARFVGYKAVGVDPKIMGIGPAYAIPEVLSLSNLSVEDIDLIELNEAFASQTIASIKEVGLDISRTNVNGGAIALGHPLGATGAMLTARLLNEMGRRPDSRYGMVTMCIGVGMGAAAIFEYVR

SEQ ID NO: 2959 - DNA, 1185 bp, Staphylococcus aureus subsp. aureus MSSA476
  CDS (1)..(1185): transl_table=11
atgcaagaagcatacattgtagcttatgggcgttcagccgcagcgaaagcaaagcaaggcgcattattccacgaaagacctgatgatgtcgcagccaaagtattacaaggcgtattgaaacgtattgacggaaaattcaataagaatatgattgaagatgtcattgttggtacggcttttccagaaggattacaaggacaaaacattgcacgaacgattgcattgcttacgggattatctgacacggtaccgggtcaaacagtgaatcgctactgctcatcaggattacaaaccatcgcgattgcagccaatcaaattatggctggtcaaggagatatacttgtagctggtggcgttgaattgatgagtgccgtaccaatgggtggcaacgagcccacaaacaatcctaccttacaatatgatgatataggtgcgtcatatcctatgggtttaactgctgaaaatgtagcatcccaatttgacgtatcacgcgaagatcaagatgcttatgctgtcagaagtcatcaacgtgcctatgaagcacaacgtgatggtcggttcaacgatgaaattatcccaatacaagtaaactcagttgaatatacaaacgcaggaccaaaagtacacacaaatatctttgaccaagatgaatttatacgccctgacaccacgatggaggcattagccaaattacgtacagtatttaaagctgacggcactgtgactgcgggaacatctgccccactttctgatggtgcaggatttgtagttttaatgtctggagataaagtgaaagaactaggcgtgacacctattgcacgattcgttggttataaggcagtaggcgttgacccgaaaattatgggtattgggcctgcatatgcgattcctgaagtattgtcactcagcaatctatctgttgaagacattgatttgatcgaattgaacgaagcatttgcttctcaaacaattgcatctattaaagaagtaggtctagatatatcacgtacgaatgtgaatggtggcgctattgctttaggtcatccattaggtgctacaggcgcaatgttaaccgcgcgtttacttaatgaaatgggtagacgtcccgatagccgttacggcatggttacgatgtgtattggtgtcggtatgggtgcagctgctatatttgaatatgtgcgttag

SEQ ID NO: 2960 - protein, 394 aa, Staphylococcus aureus subsp. aureus MSSA476
MQEAYIVAYGRSAAAKAKQGALFHERPDDVAAKVLQGVLKRIDGKFNKNMIEDVIVGTAFPEGLQGQNIARTIALLTGLSDTVPGQTVNRYCSSGLQTIAIAANQIMAGQGDILVAGGVELMSAVPMGGNEPTNNPTLQYDDIGASYPMGLTAENVASQFDVSREDQDAYAVRSHQRAYEAQRDGRFNDEIIPIQVNSVEYTNAGPKVHTNIFDQDEFIRPDTTMEALAKLRTVFKADGTVTAGTSAPLSDGAGFVVLMSGDKVKELGVTPIARFVGYKAVGVDPKIMGIGPAYAIPEVLSLSNLSVEDIDLIELNEAFASQTIASIKEVGLDISRTNVNGGAIALGHPLGATGAMLTARLLNEMGRRPDSRYGMVTMCIGVGMGAAAIFEYVR

SEQ ID NO: 2961 - DNA, 1215 bp, Symbiobacterium thermophilum IAM 14863
  CDS (1)..(1215): transl_table=11
ttggcagaagcggtgatcgtcgatgccgtgcgaacgcccatcggccgatacggcggcgcgctccgagatgtccggccggatgacctggccgcggtggtgatccgggcgctccttcagcggaaccccgcggtctccccggggagcatcgatgacgtctacctgggctgcgccaaccaggccggcgaggacaaccgcaacgtcgcccgcatggcggcgctgctggccgggctgccggtgacggtgcccggggttacggtgaaccggctctgcggctcggggctggaggcggtggcccaggcggccagggcggtgtggtgcggggaaggagaggttctggtcgccggcggcacggagtcgatgacccgggcgcctttcgtgatggccaagcccgctgtgccgtgggcccgccaggtggaggtctacgacaccaccctcgggtggcgcttcgtcaacccgcgcctcgcggagcggtacccgcccatcagcctgggggagacggccgagagagtggctgaacggtggaacgtgacccgggaggaccaggacaggtttgcatggcaaagccagatgcggtgtgccgccgcagtgagggaagggcgtttcgacgcggagatcgttccggtgcccgtccccggcgaggatggacgcacagagttggtggtacgggacgagcacccgcggccggacatcacgctcgaacggctggccaggctcagacccgtcttccgggagaacgggacggtcacggccggaaacgccagcggcatcaacgacggagcctccgccctgctgatcatgtccgggaagcgggcggcggccctgggactggttcccatggccaggatcgtcgccaccgcggtggtcggcgtggacccgtcgatcatgggcatgggcccggtcccggcaacaagaaaggccctgcagcgggccggcctcacggtcgatcagatcgacctggtcgagttgaatgaggcctttgccgcgcaggccctggcgtgcatccgggagctgggactggatcccgcccgggtgaacgtgaacggcggggcgatagccctgggccatccgctggggtgcagcggggcccggatcctgacgacgctggtgcatgaaatggtccgcagaggcagccgctacggcctggccaccatgtgcatcggggtggggcaggggatcgccatgatcgttgaggccattcgcccaaagtccgcgtaa

SEQ ID NO: 2962 - protein, 404 aa, Symbiobacterium thermophilum IAM 14863
MAEAVIVDAVRTPIGRYGGALRDVRPDDLAAVVIRALLQRNPAVSPGSIDDVYLGCANQAGEDNRNVARMAALLAGLPVTVPGVTVNRLCGSGLEAVAQAARAVWCGEGEVLVAGGTESMTRAPFVMAKPAVPWARQVEVYDTTLGWRFVNPRLAERYPPISLGETAERVAERWNVTREDQDRFAWQSQMRCAAAVREGRFDAEIVPVPVPGEDGRTELVVRDEHPRPDITLERLARLRPVFRENGTVTAGNASGINDGASALLIMSGKRAAALGLVPMARIVATAVVGVDPSIMGMGPVPATRKALQRAGLTVDQIDLVELNEAFAAQALACIRELGLDPARVNVNGGAIALGHPLGCSGARILTTLVHEMVRRGSRYGLATMCIGVGQGIAMIVEAIRPKSA

SEQ ID NO: 2963 - DNA, 1179 bp, Symbiobacterium thermophilum IAM 14863
  CDS (1)..(1179): transl_table=11
ttgcgcgaggcagtgattgtgaccggcgtccgaacggcgctggggaaggcgccgcggggctcactgcgccatgtgcggccggaggacctggcagcgacggttattaaggaagcgattgcgcgcacgcccgggctggatcccgcagccgtagaggacgtggtgctgggctgcgcgttcccggagggggagcaggggctgaacatcgcccgcaacgccgccatccgcgccgggctgcccacctcggttcccggcttcaccatcaaccggttctgctcgtcgggcctgaacgcgatcgccatcgcggccaacgcggtcatggccggcaacctggatatcgcgatcgccggcggcgtcgagtcgatgagccgggtgccgatgggcggccacacgccccggccgcacccggaggtggtggagagctatccgcagctctacatgtccatgggccacacggccgaggtcgtctgcgcccggtacaacgtgagccgggaggacatggacgcgtttgccctggcgtcccaccggaaggccgccgcggccatcgacgccggcaagttcaaggacgagatcgtcccgatcaccgtcaaggagcgggttttcgacggcaagcgggtcgtggagaaggagttcgtgttcgacaccgacgagggcgtgcggcgcgacacctcgatggaggccctggccaagctgcggcctgcgttctcggccaatggcaacgtcacggccggcaactccagccagaccaccgatggcgccgccgccgtggtggtgatgtcggccgagaaggcgcaggagatgggtctgaagcccctggcgatcttccgctccttcgccgtgggcggcgtcgatccggaggtgatgggcattggccccgtggtggcggtgcccaaggcgctgaagcaggcgggcatcaccttggcggatgtcgatctgatcgagctgaacgaggcgtttgcttcccagtccttggccgtgatccggaagctcgaaatggacccggacaaggtgaacgtcaacggcggcgccatcgcgctcggccacccgctgggctgctccggcgcacggctcacggtcaccatcatgcacgaggctcggcgccgcaaggccaggtacgggctcgtgacgatgtgcgtcggcggagggatgggggccgccggggtgctcgagttcgtgcactag

SEQ ID NO: 2964 - protein, 392 aa, Symbiobacterium thermophilum IAM 14863
MREAVIVTGVRTALGKAPRGSLRHVRPEDLAATVIKEAIARTPGLDPAAVEDVVLGCAFPEGEQGLNIARNAAIRAGLPTSVPGFTINRFCSSGLNAIAIAANAVMAGNLDIAIAGGVESMSRVPMGGHTPRPHPEVVESYPQLYMSMGHTAEVVCARYNVSREDMDAFALASHRKAAAAIDAGKFKDEIVPITVKERVFDGKRVVEKEFVFDTDEGVRRDTSMEALAKLRPAFSANGNVTAGNSSQTTDGAAAVVVMSAEKAQEMGLKPLAIFRSFAVGGVDPEVMGIGPVVAVPKALKQAGITLADVDLIELNEAFASQSLAVIRKLEMDPDKVNVNGGAIALGHPLGCSGARLTVTIMHEARRRKARYGLVTMCVGGGMGAAGVLEFVH

SEQ ID NO: 2965 - DNA, 1173 bp, Bacillus cereus E33L
  CDS (1)..(1173): transl_table=11
atgagagaagctgtcattgttgcgggagcaagaacaccaattggaaaagcaaagaggggttcattaaaaacagttcgtcctgacgatttaggggcgttagtagtaaaagaaacgttaaagcgtgcgaattatgaaggaccaatcgatgatttaattttcggttgtgcgatgccagaagcagagcaaggtttaaatatggctcgtaatatcggcggattagcaggactttcttacgatgttccagctattacaattaaccgttactgttcttcaggtttacaaagtatcgcttacggagcagagcgcattatgcttggtcactcggaagcggtattatcaggcggagcggaatcaatgagtttagttccgatgatgggacacgttgttcgtccaaatagtcgccttgtagaagcagctccagaatattatatgggtatgggacatacagcggagcaagttgctgtgaaatatggaatttctcgtgaagagcaagatgcatttgcagtaagaagtcatcaacgtgctgcgaaagcattagctgcaggaaactttgctgatgaaacagtatctgtagatgtaacgttacgtactgttggagcaaataacaaactgcaagaagaaacaattacttttgcgcaagacgaaggtgtaagagcagagacgacgctagatattttaggtaaattacgtccagcatttaacgttcgcggttctgtaacagctggtaactcttcacaaatgagtgacggcgcagcatctgtactattaatggatcgtgaaaaagcagtgagcgatggcatgagaccacttgcgaaattccgttcatttgcagtagctggcgtaccaccagaagtgatgggaatcggcccaatcgctgccattccaaaagcgttaaaattagctggtttagagctatcagatatcggtctatttgaactaaatgaagcattcgcttctcaatccattcaagttattcgtgaacttggattagatgaagaaaaagtaaacgtaaacggcggtgcaatcgcacttggacatccacttggctgtacaggagcaaaactaacactatctcttattcacgaaatgaaacgccgcaacgaacaattcggtatcgtaacaatgtgtatcggcggcggaatgggagcagcgggagtgtttgaattactttaa

SEQ ID NO: 2966 - protein, 390 aa, Bacillus cereus E33L
MREAVIVAGARTPIGKAKRGSLKTVRPDDLGALVVKETLKRANYEGPIDDLIFGCAMPEAEQGLNMARNIGGLAGLSYDVPAITINRYCSSGLQSIAYGAERIMLGHSEAVLSGGAESMSLVPMMGHVVRPNSRLVEAAPEYYMGMGHTAEQVAVKYGISREEQDAFAVRSHQRAAKALAAGNFADETVSVDVTLRTVGANNKLQEETITFAQDEGVRAETTLDILGKLRPAFNVRGSVTAGNSSQMSDGAASVLLMDREKAVSDGMRPLAKFRSFAVAGVPPEVMGIGPIAAIPKALKLAGLELSDIGLFELNEAFASQSIQVIRELGLDEEKVNVNGGAIALGHPLGCTGAKLTLSLIHEMKRRNEQFGIVTMCIGGGMGAAGVFELL

SEQ ID NO: 2967 - DNA, 1176 bp, Bacillus licheniformis ATCC 14580
  CDS (1)..(1176): transl_table=11
atgaaagaggcagttattgtatcgggggcgagaaccccgatcggaaaagcaaaaaaaggctcattgaggactgtccgtcccgatgatttaggcgcatatgcggtgagagagacgctgaaaagagcgggcggttatgaagggaatatcgatgatttgatcatcggctgcgctacgccggaagccgaacaaggcttgaatatggcgcgcaatatcggcgcgcttgccggtctgccgcacacagttccggccgttacgatcaacagatattgttcatcaggacttcaatcaatcgcttacggggccgaaaaaatcatgcttggagctgctgacacgatcattgcaggcggcgccgaatcgatgagcatcgtgccgatgatgggtcatatcgtcagaccgaacgcggctctggcggaaacggctcctgaatattatatgggaatgggccatacggctgaacaggttgccgtcaaatacggcgtttccagggaggaccaagatgcatttgccgtcaacagccatcaaaaagcagccaaggcgatcgcggaaggaaagttcgaagatgaaatcgtcccggtggacgtcaccgtcagagaagtggatgaacatcataacctgaaggagcggacgtttactttctctgccgatgaaggtgtacgcccggggacaaccaaagacgttctgtcaacgttgaaaccggcgttttcggcaaacggctcggttacggcagggaattcctcgcagacgagcgacggggctgccgcagtgatgatcatggacagagaaaaagcggacgcactcgggttaaagcccctcgcaaaatttcgttcgttcgcagtcggcggcgttccgccggaagtgatgggcatcggccctgtggaagcagtcccaagggcgctgaagatggcgggacttgagctgtcggatatcggtttattcgaattaaatgaggcgtttgcatcgcaagcgatccaggtcatcaggtcgcttggcattgatgaagaaaaagtcaatgtcaacggcggagcgattgcgctcggacatccgctcggctgcacgggtacaaagctgacgctgacattgatccacgaaatgcgccggagaagcgagcaattcggcattgtgacgatgtgtatcggcggaggcatgggagcagcaggggtattcgaattagtttaa

SEQ ID NO: 2968 - protein, 391 aa, Bacillus licheniformis ATCC 14580
MKEAVIVSGARTPIGKAKKGSLRTVRPDDLGAYAVRETLKRAGGYEGNIDDLIIGCATPEAEQGLNMARNIGALAGLPHTVPAVTINRYCSSGLQSIAYGAEKIMLGAADTIIAGGAESMSIVPMMGHIVRPNAALAETAPEYYMGMGHTAEQVAVKYGVSREDQDAFAVNSHQKAAKAIAEGKFEDEIVPVDVTVREVDEHHNLKERTFTFSADEGVRPGTTKDVLSTLKPAFSANGSVTAGNSSQTSDGAAAVMIMDREKADALGLKPLAKFRSFAVGGVPPEVMGIGPVEAVPRALKMAGLELSDIGLFELNEAFASQAIQVIRSLGIDEEKVNVNGGAIALGHPLGCTGTKLTLTLIHEMRRRSEQFGIVTMCIGGGMGAAGVFELV

SEQ ID NO: 2969 - DNA, 1200 bp, Burkholderia pseudomallei K96243
  CDS (1)..(1200): transl_table=11
atgagcaaacagctgcaagacgcatacatcgtcgccgcaagccgcacgccgatcggcaaggcgccccgcggtgcattcaagaacacccgcccggacgagctgctcgtccacgcaatcaagtcggccatcgcgcaagtgccggaattcgacacgaagctgatcgaagacgcaatcgtcggctgtgcgatccccgaggccgagcaaggcctgaacgtcgcgcggatgggcgcgctgctcgccggcctgccgaacacggtcggcggcgtgacggtgaaccgcttctgcgcgtcgggcatcacagcgctcgcgatggcggcggaccgcatccgcgtcggcgaatcggacgcgcttctcgcagccggcgtcgaatcgatgagcatggtgccgatgatgggcaacaagccgtcgatgtcgccgcacatcttcgatcgcagcgaagacttcggcatcgcttacggcatgggcctgacggccgagcgcgtcgccgagcagtggaaggtgagccgcgaagaccaggacgcgttctcggtcgagtcgcatcgcaaggcgatcgccgcgcagcaggcgggcgagttcaaggacgagatcgcgccctatgcgatcgtcgagcgcttcccgaatctcgcgacgggcgaaatcgatacgaagacgcgcgagatcgcgctcgacgaaggcccgcgcgcggaaacgtcgctcgaagggctcgcgaagctgaagacggtgttcgcgaacaagggctcggtgacggccggcaacagctcgcagacctcggacggctcgggcgcgctgctcgtcgtgtcggagaaggtgctcaagcaattcaacctgacgccgctcgcgcgcttcgtcagcttcgccgtgcgcggcgtgccgccggaaatcatgggcatcggcccgaaggaagcgattcccgccgcgctgaaggcggcgggcctcaagcaggacgacatcgactggatcgagctgaacgaggcgttcgccgcgcagtcgctcgccgtgatccgcgatctcggcctcgacccgtcgaaggtcaacccgctcggcggcgcgatcgcgctcggccacccgctcggcgcgacgggcgcgattcgcgcggcgacggtcgtgcacggcctgcgccgccgcaacctgaagtacgggatggtgacgatgtgcgtcggcaccggcatgggcgcggcgggcatcatcgagcgcctctga

SEQ ID NO: 2970 - protein, 399 aa, Burkholderia pseudomallei K96243
MSKQLQDAYIVAASRTPIGKAPRGAFKNTRPDELLVHAIKSAIAQVPEFDTKLIEDAIVGCAIPEAEQGLNVARMGALLAGLPNTVGGVTVNRFCASGITALAMAADRIRVGESDALLAAGVESMSMVPMMGNKPSMSPHIFDRSEDFGIAYGMGLTAERVAEQWKVSREDQDAFSVESHRKAIAAQQAGEFKDEIAPYAIVERFPNLATGEIDTKTREIALDEGPRAETSLEGLAKLKTVFANKGSVTAGNSSQTSDGSGALLVVSEKVLKQFNLTPLARFVSFAVRGVPPEIMGIGPKEAIPAALKAAGLKQDDIDWIELNEAFAAQSLAVIRDLGLDPSKVNPLGGAIALGHPLGATGAIRAATVVHGLRRRNLKYGMVTMCVGTGMGAAGIIERL

SEQ ID NO: 2971 - DNA, 1185 bp, Legionella pneumophila str. Paris
  CDS (1)..(1185): transl_table=11
atgactgacgtatatgtagttgacgtattacgtacaccagtaggtaaagcaccaagaggtgtttttaaaaacacattacccgatgatttattggctcatactattaaatgtttaatacatagacatcaaaacattgattggcaagagatagctgacgtagtaataggttgtgcaatgccagaagcggaacaaggtatgaatgtagcaagaatcgcttctttattggctgatcttccacaatctgttccagcaatgactattaatcgtttttgctcatctggcatacaaagtatagttactgcagcagatacaatccgtaatcaggaggctcatttagcactaggtggcggtgtcgaaagcatgtccatggtacctatgggtggaaataaatacacggcgaatccatctatttttaatgatgagcacgttgctatagcttatggcatggggattacagcagaaaacgttgccaagcgctgggaaattactcgagaacaacaggatgaattcgccatagaaagccataaaaaagcaattgctgcgcaggaaagactcgatttcaacgctgaaataagtccaatcgaaatatctataagataccctgatctgaaaacttcaaaggttgaaataaagaaaaaattgataaataaggacgaaggcccaagagcagacacatcttacgaagcgatttctaaattaaaaccagtatttgctttaaacgggacagtgactgcaggaaatagttctcagacgagtgacggagctggagtggcattactagctagtgagaaggctttaaaacagtatgatttaaaacctttaggccgtttaatgagctatgccgttgcgggagtaccgcctgaaatcatgggaatcggaccagtaaaggcaattcctatggcgctaaagcgtgctggaattactttagatcaattggattggattgaattgaatgaagcttttgctgcccaagctttggcagttattaaagaccttgacttacctagagagaaagttaaccctttaggaggggctattgctttgggacatcctttaggagcaacgggcaccataagaacagctacattactacatggattgagaagaataaaagggcgctacggtatggtaaccatgtgtattggaaccggaatgggagctgctgcgatatttgaagcgctataa

SEQ ID NO: 2972 - protein, 394 aa, Legionella pneumophila str. Paris
MTDVYVVDVLRTPVGKAPRGVFKNTLPDDLLAHTIKCLIHRHQNIDWQEIADVVIGCAMPEAEQGMNVARIASLLADLPQSVPAMTINRFCSSGIQSIVTAADTIRNQEAHLALGGGVESMSMVPMGGNKYTANPSIFNDEHVAIAYGMGITAENVAKRWEITREQQDEFAIESHKKAIAAQERLDFNAEISPIEISIRYPDLKTSKVEIKKKLINKDEGPRADTSYEAISKLKPVFALNGTVTAGNSSQTSDGAGVALLASEKALKQYDLKPLGRLMSYAVAGVPPEIMGIGPVKAIPMALKRAGITLDQLDWIELNEAFAAQALAVIKDLDLPREKVNPLGGAIALGHPLGATGTIRTATLLHGLRRIKGRYGMVTMCIGTGMGAAAIFEAL

SEQ ID NO: 2973 - DNA, 1200 bp, Aromatoleum aromaticum EbN1
  CDS (1)..(1200): transl_table=11
atgaccagacaagtccaggacgcctacatcgtcgccgcgacgcgcacccctgtcggccggcgcaacggcatgttcgcgcacgtgcggcccgacgacctgctcgcgcacgtgctgtcggccgtcgtcggcaaagtgcgggggctcgacgcgcacgagatcgcggacgtcatcgtcggctgcgcgatgcccgaggccgagcagggcatgaacgtcgcgcgcatcggcctcttgctcgccgggctgccggacaacgtgcccggtatcacgatcaaccgcttctgcgcgtccgggctgcaggcggtcgcggacgccgcagcgcgcatccgcctcggtgaagccgatgtgatcattgccgccggcaccgagtcgatgagcgtgatgccgcagatcatgggcaacaaggtcagcctgaacccggcgatcttcgcgaaccgcgacaacgtcggcattgcgttcggcatggggctgactgccgagaaggtcgcgcagcagtggaaagtcagccgcgaagaccaggatcttttcgcactgcattcgaaccagcgcgcgtccgcggcgatcgccggcgggcatttccgtgccgaaatcacgccttatacggtccgcacgcatctgcccggcgacgggggagcggtgcgcgtcgtcgagcgcgtttgcgacaccgacgaaggaccgcggccggacgcatcgctcgacgcgctggcgaagctcaaaccggtattcgccgcacgcggctcggtcaccgccggcaacagctcgcagatgtccgacggcgcgggcgcagtgctgctgatgagcgacgcggcgctgaaacgctacggtgctacgccgatcgcccgtttcgtcagctattcggtcgccggcgtgccgccccagatcatgggcatcggcccggtcgaagcgattccgcgcgcgctcgccgcgggtggcgtgagtctcgccgacgtcggctggatcgaactcaacgaagcgttcgccgcgcagtcgttggcagtgatccgcgagctcgggctcgacccggcgcgagtcaacccgttcggcggcgcgatcgcgctcggccacccgctcggcgcgaccggcgccatccgcaccgcgaccgtgatgagcgcgatgcagcgcgatccgaagctgcgctatgcgatggtgacgatgtgcgtcggcaccggcatgggcgcagcgggagtgttcgagcgggtgtag

SEQ ID NO: 2974 - protein, 399 aa, Aromatoleum aromaticum EbN1
MTRQVQDAYIVAATRTPVGRRNGMFAHVRPDDLLAHVLSAVVGKVRGLDAHEIADVIVGCAMPEAEQGMNVARIGLLLAGLPDNVPGITINRFCASGLQAVADAAARIRLGEADVIIAAGTESMSVMPQIMGNKVSLNPAIFANRDNVGIAFGMGLTAEKVAQQWKVSREDQDLFALHSNQRASAAIAGGHFRAEITPYTVRTHLPGDGGAVRVVERVCDTDEGPRPDASLDALAKLKPVFAARGSVTAGNSSQMSDGAGAVLLMSDAALKRYGATPIARFVSYSVAGVPPQIMGIGPVEAIPRALAAGGVSLADVGWIELNEAFAAQSLAVIRELGLDPARVNPFGGAIALGHPLGATGAIRTATVMSAMQRDPKLRYAMVTMCVGTGMGAAGVFERV

SEQ ID NO: 2975 - DNA, 1185 bp, Staphylococcus aureus subsp. aureus COL
  CDS (1)..(1185): transl_table=11
atgcaagaagcatacattgtagcttatgggcgttcagccgcagcgaaagcaaagcaaggcgcattattccacgaaagacctgatgatgtcgcagccaaagtattacaaggcgtattgaaacgtattgacggaaaattcaataagaatatgattgaagatgtcattgttggtacggcttttccagaaggattacaaggccaaaacattgcacgaacgattgcattgcgtgcgggattatctgacacggtaccgggtcaaacagtgaatcgctactgctcatcaggattacaaaccatcgcgattgcagccaatcaaattatggctggtcaaggagatatacttgtagctggtggcgttgaattgatgagtgccgtaccaatgggtggcaacgagcccacaaacaatccaaccttacaatatgatgatataggtgcgtcatatcctatgggtttaactgctgaaaatgtagcatcccaatttgacgtatcacgcgaagatcaagatgcttatgctgtcagaagtcatcaacgtgcctatgacgcacaacgtgatggtcggttcaaagatgaaattattccaatacaagtaaactcagttgaatatacaaacgcaggaccaaaagtacacacaaatatctttgaccaagatgaatttatacgccctgacaccacgatggaggcattagccaaattacgtacagtatttaaagctgacggcactgtgactgcaggaacatctgccccactttctgatggtgcaggatttgtagttttaatgtctggagataaagtgaaagaactcggcgtgacacctattgcacgattcgttggttttaaggcagtaggcgttgacccgaaaattatgggtattgggcctgcatatgcgattcctgaagtattgtcactcagcaatctatctgttgaagacattgatttgatcgaattgaacgaagcatttgcttctcaaacgattgcatctattaaagaagtaggtctagatatatcacgtacgaatgtgaatggtggcgctattgctttaggtcatccattaggtgctacaggcgcaatgttaaccgcgcgtttacttaatgaaatgggtagacgtcccgatagccgttacggcatggttacgatgtgtattggtgtcggcatgggtgcagctgctatatttgaatatgtgcgttag

SEQ ID NO: 2976 - protein, 394 aa, Staphylococcus aureus subsp. aureus COL
MQEAYIVAYGRSAAAKAKQGALFHERPDDVAAKVLQGVLKRIDGKFNKNMIEDVIVGTAFPEGLQGQNIARTIALRAGLSDTVPGQTVNRYCSSGLQTIAIAANQIMAGQGDILVAGGVELMSAVPMGGNEPTNNPTLQYDDIGASYPMGLTAENVASQFDVSREDQDAYAVRSHQRAYDAQRDGRFKDEIIPIQVNSVEYTNAGPKVHTNIFDQDEFIRPDTTMEALAKLRTVFKADGTVTAGTSAPLSDGAGFVVLMSGDKVKELGVTPIARFVGFKAVGVDPKIMGIGPAYAIPEVLSLSNLSVEDIDLIELNEAFASQTIASIKEVGLDISRTNVNGGAIALGHPLGATGAMLTARLLNEMGRRPDSRYGMVTMCIGVGMGAAAIFEYVR

SEQ ID NO: 2977 - DNA, 1200 bp, Dechloromonas aromatica RCB
  CDS (1)..(1200): transl_table=11
atgagcaaacagattcaagaagcctacatcgttgccgctacccgcctgccggtagccaagcgcaacggcatgttcaagaacgtgcggccggatgacatgctggccgaagtgatccgggcggttgtcgcccaggtgccgggcatcgacccggcgcgcatcggcgacgtgatcgttggctgtgccatgccggaagccgagcagggtatgaacgttgcccgtatcggcctgctgctggccgggctgccgatcaccgtgccggggctcaccattaaccgcttctgctcctccggggtgcaggcagtggctgatgcggcgaaccagattcgcctcggcctggccgatgtgatgattgctgccggtaccgagtcgatgagcgtgatgcctcagatcatgggcaacaagatgtcgatgaacccggccatctttgccaaggaagaaaaccttggtatcgcctacggtatgggcctgaccgccgagaaggtggccaaccagtggaaggtcagccgcgaagcgcaggatgccttcgccgtggcgtccaaccggaaagcctgcgccgccatcgctgccggtcatttcaaggctgaaacgacgccctacaccatccgcgaaagcctgcctgacctgaagactggccagatcaagctgcgcgagcgcgttgtcgaatttgacgaaggcccgcgcgccgatgcctcgctggaaaaacttgccaagctgcgccctgtcttccatgcccgtggttcggtgacggcgggcaattcctcgcagatgtcggatggcgccggtgccgtgatgctggtttcggaaaaagtgctgaaggaacacaacctgaccccgctcgcccgctttgctggctatgcggtcggcggtgtggcgccggagatcatgggcatcggcccgattgcggcgattcccaaggtgctggcccaggtcggcatcaaccaggaccagctggactggatcgagctgaacgaggccttcgctgcgcagtcgattgccgtcatgcaggaactcggcatcaacccggacaaggtcaatccgctcggcggcgccatcgccctcggccacccgctcggggcaaccggcgccatccgtatcgccacggcggtgcatggcctgcgtcgtaccggtggcaaatacggcatggtgaccatgtgcattggcaccggcatgggtgcagccggcatcatcgaggcgctgtaa

SEQ ID NO: 2978 - protein, 399 aa, Dechloromonas aromatica RCB
MSKQIQEAYIVAATRLPVAKRNGMFKNVRPDDMLAEVIRAVVAQVPGIDPARIGDVIVGCAMPEAEQGMNVARIGLLLAGLPITVPGLTINRFCSSGVQAVADAANQIRLGLADVMIAAGTESMSVMPQIMGNKMSMNPAIFAKEENLGIAYGMGLTAEKVANQWKVSREAQDAFAVASNRKACAAIAAGHFKAETTPYTIRESLPDLKTGQIKLRERVVEFDEGPRADASLEKLAKLRPVFHARGSVTAGNSSQMSDGAGAVMLVSEKVLKEHNLTPLARFAGYAVGGVAPEIMGIGPIAAIPKVLAQVGINQDQLDWIELNEAFAAQSIAVMQELGINPDKVNPLGGAIALGHPLGATGAIRIATAVHGLRRTGGKYGMVTMCIGTGMGAAGIIEAL

SEQ ID NO: 2979 - DNA, 1197 bp, Ralstonia eutropha JMP134
  CDS (1)..(1197): transl_table=11
atgaaacaactgcaagacgcctacatcgttgccgcgactcgctctccgatcggcaaggcgccgaagggcgcgttcaagaacacgcgtccggacgacctgctcgcgacgatcctgaaagccgccgtggcgcaggtgccgaacctcgatccgaagctgatcgaagatgccatcgtcggctgcgcgattcccgaagcgcagcagggcctgaacgtggcgcgtatcggcgcgctgctgtcgggcctgccgaacacggtgggcggcatcaccgtcaaccgcttctgcgcctccggcgtgagtgccgtggcgatggccgcggaccgcatccgcgtgggcgagtccgacgtgatgatcgccgccggcgtggaaacgatgagcatggtgccgatgatgggcaactcgccgtcgatgtcgccggacatcttcacgcgggacgaaaacgttggcatcgcgtacggcatgggcctgaccgccgagaaggtcgctcagcaatggaatgtcagccgtgaggaccaggatgcgttttcgctggcttcgcaccagaaggccatcgctgcccagcaggccggcgagttcaacgacgagatcacgccgatcgaaatcgtcgagaaattcccgaacctggctacgggagaggtgagcgtcaagacgcgcacgatctcgctcgacgaaggcccgcgcccggagacctcgctcgaaggccttggcaagctgcgcccggtgttcgcaaacaagggtagcgtgaccgccggcaacagctcgcagacgtccgacggcgccggcgcgctgatcctggtctccgagaagatcctgaagcagttcaacctggtgccgctcgcacgcttcgtgtcgttcgcggtgcgcggcgtgccgccggagatcatgggtatcggcccgaaggaagcgattcctgcggtgttgaaggcagccgggctgacgcaggaccagatcgactggatcgaactgaacgaagcgtttgccgcgcaatcgctggccgtgatgcgtgatcttgaactcgacccgtccaaggtcaaccgcatgggcggtgccattgcgctcggccacccgctcggcgcgacgggcgcgatccgctcggcgactgtggtgcacgcgctgcgtcgccacaacctgaagtacggcatggtgaccatgtgcgtcggtacgggcatgggcgcggccggcatctttgagcgcgtctga

SEQ ID NO: 2980 - protein, 398 aa, Ralstonia eutropha JMP134
MKQLQDAYIVAATRSPIGKAPKGAFKNTRPDDLLATILKAAVAQVPNLDPKLIEDAIVGCAIPEAQQGLNVARIGALLSGLPNTVGGITVNRFCASGVSAVAMAADRIRVGESDVMIAAGVETMSMVPMMGNSPSMSPDIFTRDENVGIAYGMGLTAEKVAQQWNVSREDQDAFSLASHQKAIAAQQAGEFNDEITPIEIVEKFPNLATGEVSVKTRTISLDEGPRPETSLEGLGKLRPVFANKGSVTAGNSSQTSDGAGALILVSEKILKQFNLVPLARFVSFAVRGVPPEIMGIGPKEAIPAVLKAAGLTQDQIDWIELNEAFAAQSLAVMRDLELDPSKVNRMGGAIALGHPLGATGAIRSATVVHALRRHNLKYGMVTMCVGTGMGAAGIFERV

SEQ ID NO: 2981 - DNA, 1185 bp, Staphylococcus saprophyticus subsp. saprophyticus ATCC 15305
  CDS (1)..(1185): transl_table=11
atgcgagacgcatatatagtagcttacggacgttcagcagctggcaaagccaaaaatggtgctatggcacatgaaagaccagatgaggttgctgcaaaagtattaaaaggtgtattagaaagagtcggtggttcgtttgaaccgagtatggttgaagatgtcattgtagggaattcattcccagaaggtttacaagggcaaaatatcgctagaaccattgctttgctagcaggtctaccgaatgaagtaccaggtcaaacggtcaatcgttattgctcatcaggacttcaaactattgcacatgcagcaaatcaaattattgccgatcaggcagatgttattgtcgcaggtggtattgaattgatgagcgctgtgccaatgggtggtaatgaaccaacgaataatccgattcttcaagatgaagattcaggcgtttcatacccgatggggcttacagcggaaatggtagcagaaacatatcatgtttctagagaagatcaagacgcatatgcagttcaaagtcatcaacgcgcagcagaagcgcaacaatctggtaaatttgatgatgaaattatacctattgaagtcaatcaagtaacatatgatgacaatggacctgttgttagtaaagcagtatttaaagaagatgaactcattagaccagatacaaataaagaaactttagctaaattaccaaccgtatttaaggctgacggtacagtgacggcaggctcctcggccccattaacagatggctcaggttttgtcgttgtgatgtctggtgacaaagtgaaggagctaggcgtagaacctattgcacgctttgttggatttaaagcagtaggggtagatcctaaattgatgggtatcggtccagcatatgcgattccagaagtattggaacaagctaacttagacgttaatgatattgatttagtagaattaaatgaagcattcgcttctcaaacattggcttctatgagagaagtgggattagatgctgagaagacgaatgtaaatggcggtgccattgcacttggacatccacttggtgctacaggtgcgatgttagtagggcgcttattgtctgaaatgaagaaacgcccagaaacacgatacggtatggttaccatgtgtatcggtgtaggtatgggcgcagctggaatttttgaatatgtgagataa

SEQ ID NO: 2982 - protein, 394 aa, Staphylococcus saprophyticus subsp. saprophyticus ATCC 15305
MRDAYIVAYGRSAAGKAKNGAMAHERPDEVAAKVLKGVLERVGGSFEPSMVEDVIVGNSFPEGLQGQNIARTIALLAGLPNEVPGQTVNRYCSSGLQTIAHAANQIIADQADVIVAGGIELMSAVPMGGNEPTNNPILQDEDSGVSYPMGLTAEMVAETYHVSREDQDAYAVQSHQRAAEAQQSGKFDDEIIPIEVNQVTYDDNGPVVSKAVFKEDELIRPDTNKETLAKLPTVFKADGTVTAGSSAPLTDGSGFVVVMSGDKVKELGVEPIARFVGFKAVGVDPKLMGIGPAYAIPEVLEQANLDVNDIDLVELNEAFASQTLASMREVGLDAEKTNVNGGAIALGHPLGATGAMLVGRLLSEMKKRPETRYGMVTMCIGVGMGAAGIFEYVR

SEQ ID NO: 2983 - DNA, 1188 bp, Nitrobacter winogradskyi Nb-255
  CDS (1)..(1188): transl_table=11
atgaccgaagccgtgattgtctccaccgcccgcacgccgatcggcaaggcctatcggggcgctctcaacgccactgaaggagcgaccctgctcggccatgccatcggagaagccgctgtccgcgccggggttgatccacaggagatcgaggacgtggtgatgggcgtggccatgcagcagggcgccactggcggcaacatcgcccgcaaggcgctgcttcgcgccgggctccccgtgaccgtcgccggcgccaccatcgaccgccaatgcgcctcgggccttcaggcgatcgcgctggccgcgcgttccgtcctgttcgacggcgtcggaatcgcggtcggcggcggcggcgagtcgatcagcctggtgcagaacgagcacgccaacacctttcacgcagaggatccggcgcttctggagatcaagcgcgaggtctacatgcccatgatcgacaccgcggaagtggtcgcgaagcgctacggcatctcgcgccaggcgcaggacgaatatgcgctcgaaagccagcgccgcaccgccgccgcgcagcaggagggccgattcaaggacgaactggcgccgatctccacaagaatggcgatcgtcgacaaggaaaccgggaacgtcacgttcagggacgtgacgctgtcgcaggacgaaggtccgcgtcccgatacgtcggctgaaggtctcgccgggctcaagccggttcgcggcgaaggctgcaccatcaccgccggcaatgccagccagctgtcggacggcgcgagcgcggccgtgatcatgagcggcacggaggcgtcgaggcgcggcctgaatccgctcggcatcttccgcggtttcgtctcagccggctgcgagcctgatgaaatgggcatcggcccggtgttcgcggtgccgcgccttctgaaacgacacggcctcaccgtgggagacatcgatctttgggagttgaacgaagcgttcgcggtgcaggtgatctattgccgcgacaggctgggcatcgatcccgaaaaactcaacgtcgacggcggagcgatcgcggtcggtcatccctacggaatgtcgggcgcgcgccttgccggtcatgccctgatcgagggacgccggcgcaaggcgaaatatgccgtggtcaccatgtgcgtcggcggcggcatgggcgcggccggcctattcgaggtgcttcagtaa

SEQ ID NO: 2984 - protein, 395 aa, Nitrobacter winogradskyi Nb-255
MTEAVIVSTARTPIGKAYRGALNATEGATLLGHAIGEAAVRAGVDPQEIEDVVMGVAMQQGATGGNIARKALLRAGLPVTVAGATIDRQCASGLQAIALAARSVLFDGVGIAVGGGGESISLVQNEHANTFHAEDPALLEIKREVYMPMIDTAEVVAKRYGISRQAQDEYALESQRRTAAAQQEGRFKDELAPISTRMAIVDKETGNVTFRDVTLSQDEGPRPDTSAEGLAGLKPVRGEGCTITAGNASQLSDGASAAVIMSGTEASRRGLNPLGIFRGFVSAGCEPDEMGIGPVFAVPRLLKRHGLTVGDIDLWELNEAFAVQVIYCRDRLGIDPEKLNVDGGAIAVGHPYGMSGARLAGHALIEGRRRKAKYAVVTMCVGGGMGAAGLFEVLQ

SEQ ID NO: 2985 - DNA, 1206 bp, Pseudoalteromonas haloplanktis TAC125
  CDS (1)..(1206): transl_table=11
atgcgcgaagcagttatagtttctaccgccagaacgcctatgggcaaagcctttcgtggtgcctttaacgataccgaagcgcctgcattatcaggtcatgcagttgagcaagccgttaaacgcgcgggtattgatggtgctgaggttgatgatgtgatcattggttgtgcagcgcagcaaggtactcaaggctataacttgggccgtttaacagcgaccgctgcaggcctacctaatagcgtgccgggtatgactcttgaccgtcagtgttcgtctggattaatgagtataggttttgcggcgcaaaatattatgcttggttcaatggatattgtggttgccggtggcgttgaatctatttctatggtgcaaaacaaacacaaaaatacttatcgtaatatttcaaaaaaagtactgtcgcattcagagcatgcctatatgcagatgatcgaaacggcagaagtggttgctaagcgctacaacatttcacgtttagcgcaagatgagtacagcttacagtcgcaactgcgtatagctgcggcgcaaaaaaacaacctgtttgataacgaaattgtgccaatggcatctactaaatcagtatttaaccgcgaaaccaaagaagtgacctttgaggacgtattactagctaaagatgaaggcaaccgcccttctacaactcttgagagcctacaaagcttagaaccggtgtggaaagatggtcgcgttatttcacaaggtgaatttattacagcaggtaatgcaagtcagttatctgatggcgcatcagcctgcgtggtaatggactcacaattagcggcgcaaaaaggcttagcgccaatgggtgtgtttcgtggtatggcggttgcaggttgcgagcccgatgaaatgggtattggccctgtgtatgctattcctaagctattaaaacaacatggtttatcaattgatgatattggtttgtgggaaattaacgaagcgtttgcgtgtcagcttatttattcgcgcgactacctaggtattgataacaataaacttaacgttaatggcggcgctatcgccattggccacccctttggtatgagtggtgcgcgtatggtgggccatgcccttattgaaggcaagcgtcgcggtgttaaatatgttgtggtgagcatgtgtattggcggtggcatgggtgctgcgggtttatttgaggtatgcctgtaa

SEQ ID NO: 2986 - protein, 401 aa, Pseudoalteromonas haloplanktis TAC125
MREAVIVSTARTPMGKAFRGAFNDTEAPALSGHAVEQAVKRAGIDGAEVDDVIIGCAAQQGTQGYNLGRLTATAAGLPNSVPGMTLDRQCSSGLMSIGFAAQNIMLGSMDIVVAGGVESISMVQNKHKNTYRNISKKVLSHSEHAYMQMIETAEVVAKRYNISRLAQDEYSLQSQLRIAAAQKNNLFDNEIVPMASTKSVFNRETKEVTFEDVLLAKDEGNRPSTTLESLQSLEPVWKDGRVISQGEFITAGNASQLSDGASACVVMDSQLAAQKGLAPMGVFRGMAVAGCEPDEMGIGPVYAIPKLLKQHGLSIDDIGLWEINEAFACQLIYSRDYLGIDNNKLNVNGGAIAIGHPFGMSGARMVGHALIEGKRRGVKYVVVSMCIGGGMGAAGLFEVCL

SEQ ID NO: 2987 - DNA, 1173 bp, Carboxydothermus hydrogenoformans Z-2901
  CDS (1)..(1173): transl_table=11
atgcgtgaagcggtaattgtaaaagcattaagaactccggtaggaaaagctcccaggggaaaactaagaaatactcgcccggaggatctgggagcattggttataaaggaaattatcaaccagacgggaattaacccggagattattgaagatgttatcattggttgtgcttttcccgaagcggaacaggggatgaatttaggacgggtggttgctttaagagctggtttgccctactcagttcccggtgttactgttaaccgcttttgctcttccggtttaaatgccattgccgatgcggcaatgaagattatgaccggaatgagcgatgtggtaatagctggcggtatcgaaagtatgagtatggtaccgatgggcggaaatgaccttttgcccaacccggaattaatgaatgtaatgcccgatgcttatctcagcatgggtcttactgctgaaaatgtggcttctcgctataatatttcccgggaagaacaggacgagtttgcctataaaagtcacatgaaagcaaaggaagcaatattgggcggtaaatttaaagatgaaattgttccggtaccggtagttgaaaaaatctttgacggtaagaaagttattgaaaaaaccgaaatgtttgaagtagatgaaggtccgcgctttgatactacccttgaggctctggcccggttaaagccggtttttcggcagggtggtacggttactgcagggaattcttcgcaaaccagtgacggtgctgctgcagccttattaatgtcggcggaaaaagccgaagagcttggcttaaaaccaattgctgtatttcgctcctttgccgtaggcggagtggagccggaaattatgggtattggtcctgtggtagctatacctaaagccttaaaattagccgggattaccttagatcaggtcgacgtatttgagttaaatgaagcttttgcggctcaagcactggctgtaataaaaactttagaaattgatcctgcaaaagttaatcccaacggcggtgctattgccctcggtcacccgctgggctgtaccggtgctaaactgacggcaactcttctttcggaaatgcagcggcgtagagcaaaatacggtgtggtttcaatgtgtatcggtggcggtatgggagctgccggagtctttgaattaatttaa

SEQ ID NO: 2988 - protein, 390 aa, Carboxydothermus hydrogenoformans Z-2901
MREAVIVKALRTPVGKAPRGKLRNTRPEDLGALVIKEIINQTGINPEIIEDVIIGCAFPEAEQGMNLGRVVALRAGLPYSVPGVTVNRFCSSGLNAIADAAMKIMTGMSDVVIAGGIESMSMVPMGGNDLLPNPELMNVMPDAYLSMGLTAENVASRYNISREEQDEFAYKSHMKAKEAILGGKFKDEIVPVPVVEKIFDGKKVIEKTEMFEVDEGPRFDTTLEALARLKPVFRQGGTVTAGNSSQTSDGAAAALLMSAEKAEELGLKPIAVFRSFAVGGVEPEIMGIGPVVAIPKALKLAGITLDQVDVFELNEAFAAQALAVIKTLEIDPAKVNPNGGAIALGHPLGCTGAKLTATLLSEMQRRRAKYGVVSMCIGGGMGAAGVFELI

SEQ ID NO: 2989 - DNA, 1200 bp, Geobacter metallireducens GS-15
  CDS (1)..(1200): transl_table=11
atgcgtgaagcagtaattgtcgatgctgtccgtactccggtgggaaaattcaacggcgccctgaaaaacgtccgctctgacgacctggccgcccactgtatttccgaactggtgaagcgtaacaatcttgatccgaacctggtcgaagatgtggtgctcggttgcaccaaccaggcgggcgaggacaaccggaacgtcggccggatggcggcgcttctggccggtctgccgtattcggtcgcggggcagaccatcaaccgtctctgtgcctcgggcctgaatgccatcaacagcgcagcccatgcgattaaactcggcgaaggtgatgtctttatcgctggcggtaccgaatccatgacccgtgccccctttgtcatggccaagtccgaatcccctttctcgcgcgatatcagggtgtttgacagcgtcatcggctggcggttcaccaacccgaagatgactgaaccatatgccaaggaaggaatgggcgaaaccgccgagaacgtggcggtgcggtatggcctcacccgccaggagcaggacgagtttgccctggagacccaacgcaaatgggctgccgccgatgcggccggcaagttcaatgacgagatcgttcccgtcgttatcccccagaagaagggggatccgatcatcgtctccagggatgaattccctcgcggcaacgatgtcaccatggagcagcttgccaagctgccggctgccttcagaaaggagggcaccgtcaccgccggcaactccagcggcatcaacgacggcgccgcagcgctcctcctcatggaggcagaaaccgccaagaagctcggctacaagccgcttgccagggtcgtcgccagtgcggttgccggttgcgatccctcgtacatggggctcggccccatcccggcgatccagaaggtgctgcaacggtccggcctgaaaatcgaagatattgacctcttcgagctgaacgaggcctttgccgcccagtccatcccctgcatccgcgaactggggatcgatccggccaaggtgaacgtcaacggcggctccatcgccatcggccaccccctcggctccaccggcgcccggatcaccgccacgctggtccatgagatgaagcgccgtggctcccgctacggtctcgtgtccctctgtatcggtgtcggacagggaattgcgacgatcttcgaacgcgtgtaa

SEQ ID NO: 2990 - protein, 399 aa, Geobacter metallireducens GS-15
MREAVIVDAVRTPVGKFNGALKNVRSDDLAAHCISELVKRNNLDPNLVEDVVLGCTNQAGEDNRNVGRMAALLAGLPYSVAGQTINRLCASGLNAINSAAHAIKLGEGDVFIAGGTESMTRAPFVMAKSESPFSRDIRVFDSVIGWRFTNPKMTEPYAKEGMGETAENVAVRYGLTRQEQDEFALETQRKWAAADAAGKFNDEIVPVVIPQKKGDPIIVSRDEFPRGNDVTMEQLAKLPAAFRKEGTVTAGNSSGINDGAAALLLMEAETAKKLGYKPLARVVASAVAGCDPSYMGLGPIPAIQKVLQRSGLKIEDIDLFELNEAFAAQSIPCIRELGIDPAKVNVNGGSIAIGHPLGSTGARITATLVHEMKRRGSRYGLVSLCIGVGQGIATIFERV

SEQ ID NO: 2991 - DNA, 1194 bp, Staphylococcus aureus RF122
  CDS (1)..(1194): transl_table=11
atgataaccatgcaagaagcatacattgtagcttatgggcgttcagccgcagcgaaagcaaagcaaggcgcattattccacgaaagacctgatgatgtcgcagccaaagtattacaaggcgtattgaaacgtattgacggaaaattcaataagaatatgattgaagatgtcattgttggtacggcttttccagaaggattacaaggacaaaacattgcacgaacgattgcattgcgtacgggattatctgacacggtaccgggtcaaacagtgaatcgctactgctcatcaggattacaaaccatcgcgattgcagccaatcaaattatggctggtcaaggagatatacttgtagctggtggcgttgaattgatgagtgccgtaccaatgggtggcaacgagcccacaaacaatccaaccttacaatatgatgatataggtgcgtcatatcctatgggtttaactgctgaaaatgtagcatcccaatttgacgtatcacgcgaagatcaagatgcttatgctgtcagaagtcatcaacgtgcctatgacgcacaacgtgatggtcggttcaaagatgaaattattccaatacaagtaaactcagttgaatatacaaacgcaagaccaaaagtacacacaaatatctttgaccaagatgaatttatacgacctgacaccacgatggaggcattagccaaattacgtacagtatttaaagctgacgacactgtgactgcgggaacatctgccccactttctgatggtgcaggatttgtagttttaatgtctggagataaagtgaaagaactaggtgtgacacctattgcacgattcgttggttataaggcagtaggcgttgacccgaaaattatgggtattgggcctgcatatgcgattcctgaagtattgtcactcagcaatctatctgttgaagatattgatttgatcgaattgaacgaagcatttgcttctcaaacgattgcatctattaaagaagtaggtctagatatatcacgtacgaatgtgaatggtggcgctattgctttaggtcatccattaggtgctacaggagcaatgttaaccgcacgtttacttaatgaaatgggtagacgtcccgatagccgttacggcatggttacgatgtgtattggtgtcggtatgggtgcagctgctatatttgagtatgtgcgttag

SEQ ID NO: 2992 - protein, 397 aa, Staphylococcus aureus RF122
MITMQEAYIVAYGRSAAAKAKQGALFHERPDDVAAKVLQGVLKRIDGKFNKNMIEDVIVGTAFPEGLQGQNIARTIALRTGLSDTVPGQTVNRYCSSGLQTIAIAANQIMAGQGDILVAGGVELMSAVPMGGNEPTNNPTLQYDDIGASYPMGLTAENVASQFDVSREDQDAYAVRSHQRAYDAQRDGRFKDEIIPIQVNSVEYTNARPKVHTNIFDQDEFIRPDTTMEALAKLRTVFKADDTVTAGTSAPLSDGAGFVVLMSGDKVKELGVTPIARFVGYKAVGVDPKIMGIGPAYAIPEVLSLSNLSVEDIDLIELNEAFASQTIASIKEVGLDISRTNVNGGAIALGHPLGATGAMLTARLLNEMGRRPDSRYGMVTMCIGVGMGAAAIFEYVR

SEQ ID NO: 2993 - DNA, 1206 bp, Salinibacter ruber DSM 13855
  CDS (1)..(1206): transl_table=11
atgaaagcaacaaacgacgcctacattgtcagtagcgtccgcacgcccgtcggcaaggccgagaagggcaccctcgcacactaccggccggaggacctcggcgccgaggccgtgacaggggcgctgggccgcgtcgacggcctggagcccgagatggtggacgacgtgctgatgggctgcgcctttccggagggcccgcagggaatgaacgtgggccgcctgatcgcgcagaaggccggattgccggaccacgtgccgggcgcgacggtcaaccgcttctgctcgtcgggcctgcagacgatcgcccaggcctcgcagcgaatcgccacgggaacggccgacgtgatcgtggcgggcggggcggagtcgatgagccaggtgccgatgagtggcttcttctttcagccggacccggagctgacggaggaaaaagtgggcacgtatgtctccatgggcattaccgccgaaaacgtggccgacgagtacggggtgtcgcgggaggaccaggaccgcttcgcgctgcgctcccacgagcgagcggtggacgccatcgaccaggggcggttcgaggacgagctggtgccgctgaccctggaggagacgcactaccagtcggcaaacgggcacgcaggggaggccacgaccgaaaccgtgacgttggaggtcgacgaggggccgcgtcgcgacacgaacctggacgtgctcgccaagctgcccgccgcgtttcgggagggcggcagcgtcacgccgggcaactcctcccagcggtccgacgggggggccgcgaccgtcgtgatgagcggcgaccgggtcgcagacctcggcgtggatccgctcggggcgctgagggggttcgccgtggcgggcgtcgacccggagctcatgggcatcgggccggcggaggcgatcccgcaggcgctggcgcaaaccgggctctcggtcgacgacattgggctcgtggagctgaacgaggcctttgcctcgcagtcgctggccgtgattcgagaggtagggctcgatccgaacatcgtcaacgtgaatggtggggcgattgcgctgggacacccgctcggttgcaccggggcgaagctcaccgccacgctgctgcacgaaatgatccgccgcgaggtgcgatacggcctctgcacgatgtgcgtggggggcgggatgggcgccgcgggcgtgatcgaaaaccttcggctttga

SEQ ID NO: 2994 - protein, 401 aa, Salinibacter ruber DSM 13855
MKATNDAYIVSSVRTPVGKAEKGTLAHYRPEDLGAEAVTGALGRVDGLEPEMVDDVLMGCAFPEGPQGMNVGRLIAQKAGLPDHVPGATVNRFCSSGLQTIAQASQRIATGTADVIVAGGAESMSQVPMSGFFFQPDPELTEEKVGTYVSMGITAENVADEYGVSREDQDRFALRSHERAVDAIDQGRFEDELVPLTLEETHYQSANGHAGEATTETVTLEVDEGPRRDTNLDVLAKLPAAFREGGSVTPGNSSQRSDGGAATVVMSGDRVADLGVDPLGALRGFAVAGVDPELMGIGPAEAIPQALAQTGLSVDDIGLVELNEAFASQSLAVIREVGLDPNIVNVNGGAIALGHPLGCTGAKLTATLLHEMIRREVRYGLCTMCVGGGMGAAGVIENLRL

SEQ ID NO: 2995 - DNA, 1182 bp, Erythrobacter litoralis HTCC2594
  CDS (1)..(1182): transl_table=11
atgtcacgtgacgcagtcatcgtttccaccgcccgcacccctatcggccgcgcctacaagggcggcttcaatgccacccccggcgcgacgctcggttcgttctcgcttgccccggcagtcgaacgcgccgggatcgaaggcggcgagatcgacgatgtcgtgtggggctgcgtcctcacccagggtacccagtcgggcaatatcggccgccaggtcgcgctgcgtgcgggtcttcccgtcagcgtcgcggcgcagacgatcgaccgccagtgctcctcgggcctgatggcgatcagcaccgcggccaagcagatcatcgtcgacaatatggatatcgtcgtcggcggcggtcaggattcgatttcgatggtccagaccccggaaatgcgcgtcgcgcccgacaagtcgctgatcgcgatgcacaaggatgtctacatgccgatgctccagaccgccgagacggtggccgagcgctacggcatcagccgcgaagcgcaggacgaatacgcgctgcagtcgcagatgcgcaccgccgccgggcaggaagcgggcaagttcgacgacgagatcgtgccggtcaacaccaccatgatggtgaaggacaaggagacgggcgaagtctccagccaggaagtcaccatcaccaaggatgaaggcaaccgcccctcgaccacgctggaagggctgcagtcgctaaatccggtcatgggcccggacaaggtcatcaccgccggtaacgcttcgcagctctcggacgggtcctcggccagcgtgctgatggaagcgaaggttgccgagcagaagggcctcgagccgctcggtcgctatgtcggcatggcggtggcggggacggagcccgacgaaatgggcatcggcccggtcttcgcgatccccaagctgctcgaacagaccggcatcaagcacgacgacgtcggcctgtgggaattgaacgaagccttcgcggtgcaggtcctctattgccgcgacaagctcgggatcgacaacgatatcctcaacgtcaacggcggctcgatctcgatcggccacccctacggcatgaccggcgcgcgctgcgtcggccacgcgctgatcgaaggcaagcgccgcggcgcgaaatatgtcgtcgtcaccatgtgcgtcggtggcggcatgggcgctgcgggcatgttcgaggtgttttaa

SEQ ID NO: 2996 - protein, 393 aa, Erythrobacter litoralis HTCC2594
MSRDAVIVSTARTPIGRAYKGGFNATPGATLGSFSLAPAVERAGIEGGEIDDVVWGCVLTQGTQSGNIGRQVALRAGLPVSVAAQTIDRQCSSGLMAISTAAKQIIVDNMDIVVGGGQDSISMVQTPEMRVAPDKSLIAMHKDVYMPMLQTAETVAERYGISREAQDEYALQSQMRTAAGQEAGKFDDEIVPVNTTMMVKDKETGEVSSQEVTITKDEGNRPSTTLEGLQSLNPVMGPDKVITAGNASQLSDGSSASVLMEAKVAEQKGLEPLGRYVGMAVAGTEPDEMGIGPVFAIPKLLEQTGIKHDDVGLWELNEAFAVQVLYCRDKLGIDNDILNVNGGSISIGHPYGMTGARCVGHALIEGKRRGAKYVVVTMCVGGGMGAAGMFEVF

SEQ ID NO: 2997 - DNA, 1173 bp, Anaeromyxobacter dehalogenans 2CP-C
  CDS (1)..(1173): transl_table=11
atgagcgcagcctacgtcctcgcagcggtgcggacccccgggtgcaaggcgaagaaggggaagctgaaggacgtccgcccggacgacctggccgcggtcgccatccgcgcgctgctggcgcggaccggcgtcgagccggggcaggtggaggacgtgatcctcgggtgcgcgtttcccgagggcgagcagggcatgaacctcgggcgcgtcgcggccctccgggccgggctgccggtgggcgtgccgggccagacggtgaaccggttctgcgcctcgggtctccagtccatcgccaccgccgccgagcggatcatggccggccaggccgactgcatcgtggcgggcggggccgagagcatgagcctcgtgcccatgggcggctcgcacttcagcgcgaacccgtcgctggtcgcctcctggccggagtcgttcgcggccatgggcatcaccgccgagctggtggcggcgcgcgatcacgtcagccgcgaggaccaggacgcgttcgcggtcgcgagccacgcccgcgccgcgcgggcgcaggcggagggcctgttcgcggacgagctcgtcccggtcgaggtcgagcaggtcaccgtggagaaggggaaggcggtgcgccgcaccgagcaggtcacggccgacgacggcgtgcgccccggcaccagcctcgaggcgctcgcgcggctgaagcccgcgttcaagatcgacgggaccgtcaccgcgggcaacgcctcgcagaccaccgacggcgccgcggccgcgctggtcgtctccgaggcgttcctctcccgcaccggcctcgcgccgctggcgcgcttcgtctcgtacgcggtgcgcggggtgccgccggagatcatgggcatcggcccggtcgaggcgatcccggcggcgctgaagcgggccggcctgcgcgtcgaggacgtcgggcagatcgagctgaacgaggcgttcgcggcccagtcgctcgcctgcatgcgcgcgctcgggctcgacccggccaaggtgaaccccaccggcggcgccatcgcgctcgggcacccgctcggctgcaccggcgcgaagctcaccgccacgctgctgcacggcctgcggcggaccggcgcgaggcacgggatcgtgtcgatgtgcgtgggcggcgggatgggcgcggcggcggtgttcgagcgcgcctga

SEQ ID NO: 2998 - protein, 390 aa, Anaeromyxobacter dehalogenans 2CP-C
MSAAYVLAAVRTPGCKAKKGKLKDVRPDDLAAVAIRALLARTGVEPGQVEDVILGCAFPEGEQGMNLGRVAALRAGLPVGVPGQTVNRFCASGLQSIATAAERIMAGQADCIVAGGAESMSLVPMGGSHFSANPSLVASWPESFAAMGITAELVAARDHVSREDQDAFAVASHARAARAQAEGLFADELVPVEVEQVTVEKGKAVRRTEQVTADDGVRPGTSLEALARLKPAFKIDGTVTAGNASQTTDGAAAALVVSEAFLSRTGLAPLARFVSYAVRGVPPEIMGIGPVEAIPAALKRAGLRVEDVGQIELNEAFAAQSLACMRALGLDPAKVNPTGGAIALGHPLGCTGAKLTATLLHGLRRTGARHGIVSMCVGGGMGAAAVFERA

SEQ ID NO: 2999 - DNA, 1185 bp, Staphylococcus aureus subsp. aureus NCTC 8325
  CDS (1)..(1185): transl_table=11
atgcaagaagcatacattgtagcttatgggcgttcagccgcagcgaaagcaaagcaaggcgcattattccacgaaagacctgatgatgtcgcagccaaagtattacaaggcgtattgaaacgtattgacggaaaattcaataagaatatgattgaagatgtcattgttggtacggcttttccagaaggattacaaggccaaaacattgcacgaacgattgcattgcgtgcgggattatctgacacggtaccgggtcaaacagtgaatcgctactgctcatcaggattacaaaccatcgcgattgcagccaatcaaattatggctggtcaaggagatatacttgtagctggtggcgttgaattgatgagtgccgtaccaatgggtggcaacgagcccacaaacaatccaaccttacaatatgatgatataggtgcgtcatatcctatgggtttaactgctgaaaatgtagcatcccaatttgacgtatcacgcgaagatcaagatgcttatgctgtcagaagtcatcaacgtgcctatgacgcacaacgtgatggtcggttcaaagatgaaattattccaatacaagtaaactcagttgaatatacaaacgcaggaccaaaagtacacacaaatatctttgaccaagatgaatttatacgccctgacaccacgatggaggcattagccaaattacgtacagtatttaaagctgacggcactatgactgcaggaacatctgccccactttctgatggtgcaggatttgtagttttaatgtctggagataaagtgaaagaactcggcgtgacacctattgcacgattcgttggttttaaggcagtaggcgttgacccgaaaattatgggtattgggcctgcatatgcgattcctgaagtattgtcactcagcaatctatctgttgaagacattgatttgatcgaattgaacgaagcatttgcttctcaaacgattgcatctattaaagaagtaggtctagatatatcacgtacgaatgtgaatggtggcgctattgctttaggtcatccattaggtgctacaggcgcaatgttaaccgcgcgtttacttaatgaaatgggtagacgtcccgatagccgttacggcatggttacgatgtgtattggtgtcggcatgggtgcagctgctatatttgaatatgtgcgttag

SEQ ID NO: 3000 - protein, 394 aa, Staphylococcus aureus subsp. aureus NCTC 8325
MQEAYIVAYGRSAAAKAKQGALFHERPDDVAAKVLQGVLKRIDGKFNKNMIEDVIVGTAFPEGLQGQNIARTIALRAGLSDTVPGQTVNRYCSSGLQTIAIAANQIMAGQGDILVAGGVELMSAVPMGGNEPTNNPTLQYDDIGASYPMGLTAENVASQFDVSREDQDAYAVRSHQRAYDAQRDGRFKDEIIPIQVNSVEYTNAGPKVHTNIFDQDEFIRPDTTMEALAKLRTVFKADGTMTAGTSAPLSDGAGFVVLMSGDKVKELGVTPIARFVGFKAVGVDPKIMGIGPAYAIPEVLSLSNLSVEDIDLIELNEAFASQTIASIKEVGLDISRTNVNGGAIALGHPLGATGAMLTARLLNEMGRRPDSRYGMVTMCIGVGMGAAAIFEYVR

SEQ ID NO: 3001 - DNA, 1179 bp, Rhodoferax ferrireducens T118
  CDS (1)..(1179): transl_table=11
atggaagacatcgtgattgtttcggccgcacgcacggccgtgggcaaatttggtggcaccctggccaaaacgccagcacccgagctgggtgccgccgtcatcaaagccttgctggcgcgcacgggcttgagcgcggatcagattggtgaagttattttgggccaggtgctgacggccggttcgggtcaaaacccggcccgccaggcgctgatcaagagtggcttgctgattgaaaccccggcactgaccgtgaactgcgtctgcggctccggcctgaaggctgtgatgctggccgcgcaagcggtggcttacggcgacagcgacattgtgattgcgggcggccaggaaaacatgagcgcgtcaccccatgtgttgctcggctcgcgggacggtcagcgcatgggcgactggaagatgatcgactccatgatcgtcgacggcttgtgggacgtctacaaccaggtccacatgggtatcacggctgaaaacgtcaacaagaaatacggcatcacgcgcgaaatgcaggacgcgctggcattgggtagccagcaaaaggccgccgctgcgcaagacgccggcaagttcaaggacgaaatcgtgccgctcagcattgcccagaagaagggcgatgcgattgtctttgacaccgacgagttcttgaaccgcaagaccaacgcggccgctctggccggtctgcgtcccgcctttgacaaggccggcagcgtgaccgccggcaatgcctccggcatcaacgacggcgccgctgccgtgatggtgatgacggccaagaaagccgccgccctggggctcaaaccactgggccgcattgccagctttgccacctccggtgtcgatccggccctgatgggcatgggcccggtgccggcgtctcaaaaagcgctggcgcgcgcgggctggaaggccgccgaccttgacctgatggaaatcaacgaagcgtttgcagcgcaggcttgtgccgtcaatcagcaaatgggttgggacacctccaaactcaacgttaacggcggtgcgattgccatcgggcacccggtgggtgcgtccggttgccgtattttggtcacgctgttgcatgaaatgcagcgccgcgacgccaggaagggccttgcttctctgtgtattggcggtggcatgggcgtggcgctgacgatcgagcgttaa

SEQ ID NO: 3002 - protein, 392 aa, Rhodoferax ferrireducens T118
MEDIVIVSAARTAVGKFGGTLAKTPAPELGAAVIKALLARTGLSADQIGEVILGQVLTAGSGQNPARQALIKSGLLIETPALTVNCVCGSGLKAVMLAAQAVAYGDSDIVIAGGQENMSASPHVLLGSRDGQRMGDWKMIDSMIVDGLWDVYNQVHMGITAENVNKKYGITREMQDALALGSQQKAAAAQDAGKFKDEIVPLSIAQKKGDAIVFDTDEFLNRKTNAAALAGLRPAFDKAGSVTAGNASGINDGAAAVMVMTAKKAAALGLKPLGRIASFATSGVDPALMGMGPVPASQKALARAGWKAADLDLMEINEAFAAQACAVNQQMGWDTSKLNVNGGAIAIGHPVGASGCRILVTLLHEMQRRDARKGLASLCIGGGMGVALTIER

SEQ ID NO: 3003 - DNA, 1179 bp, Polaromonas sp. JS666
  CDS (1)..(1179): transl_table=11
atggaagacattgttatcgtttcagcaggccgcacggccgttggaaaatttggcggttccctggcgaaaatgcctgcaaccgaacttggcgcggccgtgatcaaggcggtgctcgagcgttccggcctgagcgccgaacaggtgggcgaagtcatcctcggccaggttttggccgccggggtgggacagaatccggcgcgccaggccgtgatcaaggcgggcttcccgcatggcattccgggactgacgatcaatgccgtttgcggctccggcctcaaggcggtcatgttggcggcgcagtctgtggcgactggtgacagcgaaatcgtcattgccggtggtcaggagaacatgagtgcggcgccgcacgtgttgaacggctcgcgggacggccagcgcatgggcgactggaagatgatcgattcgatgattgtggatggcctgtgggacgtctacaaccagtaccacatgggcatcaccgccgagaatgtcgccaagaaatacggcattgaccgtgagtcgcaggacgcgctggcgctggccagtcagaccaaggccgccgctgctcaggacgccggtaaattcaaggacgagattattccgatttccattccgcagaaaaaaggcgacccgctggtgtttgcggccgacgagttcatcaaccgaaaaaccaatgcagagggcctggccggcctgcgccccgcctttgacaaggccggtggcgtcacggcaggcaatgcctcgggcctgaacgacggtgcggcggcggtgatggtcatgacagccaaaaaggctgccgcgctcggcctgaagccgctggcgcgtattgcaagctacgccacgaccggcctggacccggcctacatgggcatgggcccggttccggcatcgaccaaggcgctgaagcgcgccggctggaaggcgcaggatctggacttgctggagatcaatgaagcctttgccgcacaggcctgcgcagtgaacaaggaaatgggctgggacaccagcaaggtcaacgtcaatggcggtgctattgccatcggccacccgattggtgcctccggttgccgcatcctggtgacgctgctgcacgagatggcgcgacgcgatgccaaaaaaggtattgccagcctgtgtattggcggtggcatgggggtggcactcacactggagcgctga

SEQ ID NO: 3004 - protein, 392 aa, Polaromonas sp. JS666
MEDIVIVSAGRTAVGKFGGSLAKMPATELGAAVIKAVLERSGLSAEQVGEVILGQVLAAGVGQNPARQAVIKAGFPHGIPGLTINAVCGSGLKAVMLAAQSVATGDSEIVIAGGQENMSAAPHVLNGSRDGQRMGDWKMIDSMIVDGLWDVYNQYHMGITAENVAKKYGIDRESQDALALASQTKAAAAQDAGKFKDEIIPISIPQKKGDPLVFAADEFINRKTNAEGLAGLRPAFDKAGGVTAGNASGLNDGAAAVMVMTAKKAAALGLKPLARIASYATTGLDPAYMGMGPVPASTKALKRAGWKAQDLDLLEINEAFAAQACAVNKEMGWDTSKVNVNGGAIAIGHPIGASGCRILVTLLHEMARRDAKKGIASLCIGGGMGVALTLER

SEQ ID NO: 3005 - DNA, 1197 bp, Polaromonas sp. JS666
  CDS (1)..(1197): transl_table=11
atgaaacaagtccaggaagcctacatcgttgccgccacgcgcacgcccatcggccgttcgcaccgggggtttttccgcaatacgcgtcccgacgacctgctggtcaaggcgctgcaggccgcgctggcccaggtgcccacgctggaccccaaggccattgaagacatcatctgcggctgcgcgattcccgaaggcccgcagggtttgaacatcgcccgcatcggtgcggtgctggcgggcttgcccaccagtgtgggtggcatcaccgtcaaccgcttttgtgcctcgggcctgtccgccgtgcagatggcggcggaccgcatccgtgtcggcgaagccgatgtgatgattgccgccggcaccgagagcatgagcatggtgcccatgtcgggcaactcgccgtcgctgtcgccggaaatgtttgccaacgacgagaacgtcggcatcgcctacggcatgggcctgacggccgagaaggttgcgcagcagtggaaggtctcgcgtgatgcgcaggaccagttcgcctacgagtcccacatgaaggcactcaaggcgcagcaggccggcgagttcacgaatgaaatcacgccggtggaagtgaccgaccgaaccgccaacctggaaaccggcgaagtcatcgccaccacccgcaccgtgagcctggacgagggcgcgcgccccgacaccacggtggaaggcctggccaaactgaaaaccgtgtttgctgcgcgcggctcggtcacggccggcaacagctcacaaacttccgatggcgcgggcgcgctgattctggccagcgaaaaagccgtcaaggaattcggcctgaaaccgctggcgcgtttcgtcagttacgccgccaagggcgtgccgccgcacatcatgggcgtaggcccgatcgaagccattcccgcagcgctgcgttacgccggcctgaagcaggatgacatcgactggttcgaactcaacgaggcgtttgccgcgcagtcgctggcggtcatcaacacgctgggcctgaacgcggccaaagtcaacccgatgggcggcgcgattgcactgggtcacccgctgggcgccacgggcgcgattcgcgcggccaccgtgatccatgcgctgcagcgccatcagctgaagtacggcatggtgaccatgtgtgtcggcatggggcaaggcgccgccggcattttcgagcgggtgtag

SEQ ID NO: 3006 - protein, 398 aa, Polaromonas sp. JS666
MKQVQEAYIVAATRTPIGRSHRGFFRNTRPDDLLVKALQAALAQVPTLDPKAIEDIICGCAIPEGPQGLNIARIGAVLAGLPTSVGGITVNRFCASGLSAVQMAADRIRVGEADVMIAAGTESMSMVPMSGNSPSLSPEMFANDENVGIAYGMGLTAEKVAQQWKVSRDAQDQFAYESHMKALKAQQAGEFTNEITPVEVTDRTANLETGEVIATTRTVSLDEGARPDTTVEGLAKLKTVFAARGSVTAGNSSQTSDGAGALILASEKAVKEFGLKPLARFVSYAAKGVPPHIMGVGPIEAIPAALRYAGLKQDDIDWFELNEAFAAQSLAVINTLGLNAAKVNPMGGAIALGHPLGATGAIRAATVIHALQRHQLKYGMVTMCVGMGQGAAGIFERV

SEQ ID NO: 3007 - DNA, 1188 bp, Rhodopseudomonas palustris BisB5
  CDS (1)..(1188): transl_table=11
atgaccgacgccgttattgtttccaccgcgcgcacgccgatcggcaaggcctatcgcggcgcgctcaacgccaccgaaggtgcaacgctgctcggccatgcgatcggcgaagcggtcaagcgcgccaatctcgatcccaaggagatcgaggacgtggtgatgggctctgcgatgcagcagggctccaccggcggcaacatcgcccgcaaggcgctgctgcgcgccggcctgccggtgaccaccgccggcaccacgatcgatcggcagtgcgcgtccggcctgcaggcgatcgcgctcgcggcgcgctcggtgatcttcgacggcgtcgagatcgcagtcggcggtggcggcgagtcgatcagcctggtgcagaacgacaagatgaacaccttccacgccgtcgatcccgaattgcaggcgatcaagggcgacgtctacatggcgatgatcgacaccgccgaaatcgtcgcgaagcgctacggcatctcccgcgaggcgcaggacgtctacgcgctggagagccagcgccgcaccgcggcggcgcagcagggcggcaagttcaaggacgagatcgcgccgatcgcgacccggatgggcgtcgtcgacaaggccaccggcgcggtgtcgatgaaggacgtgacgctgtcgcaggatgaaggtccgcgtccggagaccaccgccgaaggcctcgcaggcctgaagccggtccgtggcgagggcttcgccatcaccgcaggtaacgccagccagttgtcggacggcgcctccgccaccgtggtgatgagcgacaagctcgcggcgcagaagggcctcaagccgctcggcatcttccgcggcttcgtctcggccggctgcgagccggacgagatgggcatcggcccggtgttcgcggtgccgcggctgttgaagcgccacggtctcaaggtcgaggacatcgacctttgggagctgaacgaggcgttcgccgtgcaggtgctgtattgccgcgacaagctcggcatcgatccggagaagctcaacgtcaatggcggcgcgatctcggtcggccatccttacggcatgtcgggcgcgcgcctgaccggccacgcgctgatcgaaggccgccgccgcaaggcgaagtacgcggtggtaacgatgtgcgtcggcggcggcatgggctcggcgggtctgttcgagatcgtgcactga

SEQ ID NO: 3008 - protein, 395 aa, Rhodopseudomonas palustris BisB5
MTDAVIVSTARTPIGKAYRGALNATEGATLLGHAIGEAVKRANLDPKEIEDVVMGSAMQQGSTGGNIARKALLRAGLPVTTAGTTIDRQCASGLQAIALAARSVIFDGVEIAVGGGGESISLVQNDKMNTFHAVDPELQAIKGDVYMAMIDTAEIVAKRYGISREAQDVYALESQRRTAAAQQGGKFKDEIAPIATRMGVVDKATGAVSMKDVTLSQDEGPRPETTAEGLAGLKPVRGEGFAITAGNASQLSDGASATVVMSDKLAAQKGLKPLGIFRGFVSAGCEPDEMGIGPVFAVPRLLKRHGLKVEDIDLWELNEAFAVQVLYCRDKLGIDPEKLNVNGGAISVGHPYGMSGARLTGHALIEGRRRKAKYAVVTMCVGGGMGSAGLFEIVH

SEQ ID NO: 3009 - DNA, 1197 bp, Ralstonia metallidurans CH34
  CDS (1)..(1197): transl_table=11
atgaaacaactgcaagacgcatacattgtcgcggctacccgttcgccgatcggcaaggccccgaagggcgctttcaagaacacccgtcccgatgacctgctggcgacgatcctgcaagcggccgtggcccaggtgccgagcctggaccccgcgctgatcgaggacgccatcgtcggctgcgcgattcccgaagcgcagcagggcctgaacgtggcgcgtatcggcgcgctgctggcaggcctgcccaacaccgtgggcggcatcaccgtgaaccgcttctgcgcgtcgggcctgtcggccgtggcaatggctgcggaccgtatccgcgtgggcgaatcggatgtaatgatcgccgccggcgtggagtcgatgagcatggtgccgatgatgggcaactcgccgtcgatgtcgccgtcgatcttcgaacgcgacgagaatatcggcattgcctacggcatgggtctgacggccgagaaggtggccacgcagtggaaggtcagccgcgaggaccaggatgcgttctcgctggcatcgcaccagaaggccatcgccgcgcagcaggctggcgaattcaaggacgaaattaccccgattgaggtagttgagcggttcccggatctcgcgtctggtcagatcaacgtcaagacgcgtactatttcgctggacgagggaccgcgtcccgatacgtcggtggaagggcttggcaagctgcgcgcggtgttcgccaacaagggcagcgtgacggccggcaatagctcgcagacgtccgatggcgccggcgcgctgatcctggtttcggagaagatcctcaagcagttcaacctggtgccgcgggcccgtttcgtatcgttcgcggtgcgtggcgtgccgccggagatcatggggatcggtccgaaggcagcgattccggctgcgctgaaggccgctggcctgacgcaggaccagatcgactggatcgagctgaacgaagcgtttgccgcgcaatcgctggcggtgatgcgtgacctggaacttgatccggccaaggtcaaccggatgggcggcgccatcgcgctgggccacccgctcggtgcgaccggagcgatccgttcggccactgtggtgcacgcactgcgtcgccacaacatgaagtacggcatggtgaccatgtgcgtgggcacgggcatgggcgcagccggaatcttcgagcgcgtataa

SEQ ID NO: 3010 - protein, 398 aa, Ralstonia metallidurans CH34
MKQLQDAYIVAATRSPIGKAPKGAFKNTRPDDLLATILQAAVAQVPSLDPALIEDAIVGCAIPEAQQGLNVARIGALLAGLPNTVGGITVNRFCASGLSAVAMAADRIRVGESDVMIAAGVESMSMVPMMGNSPSMSPSIFERDENIGIAYGMGLTAEKVATQWKVSREDQDAFSLASHQKAIAAQQAGEFKDEITPIEVVERFPDLASGQINVKTRTISLDEGPRPDTSVEGLGKLRAVFANKGSVTAGNSSQTSDGAGALILVSEKILKQFNLVPRARFVSFAVRGVPPEIMGIGPKAAIPAALKAAGLTQDQIDWIELNEAFAAQSLAVMRDLELDPAKVNRMGGAIALGHPLGATGAIRSATVVHALRRHNMKYGMVTMCVGTGMGAAGIFERV

SEQ ID NO: 3011 - DNA, 1203 bp, Deinococcus geothermalis DSM 11300
  CDS (1)..(1203): transl_table=11
gtgagagacgcagttatcgtttccgccgttcggacccccgtggggcgcggcgtcaaaggcaccctcgccaacacccgtcccgatgacctcgccgcccttgtgctggatgaggcggtcaaacgtgcgggcgtagatcctgcgatcgtcgaggacgtctatctgggctgcgcgattcccgaggccgagcagggcctcaacatcgcccgcctggccgcgctgcgtgccgggatgcccgacagtgtgggcggcgtgacgatcaaccgcttttgctccagcggcctgcagaccattgcgatggctgccgccgccatccagaccgggcaggccgatgtgatgctggccggaggcgtcgagagcatgagcatggtcccgatgactggccacaaccccagtcccaaccccaatctggtggacgagcgccccggcgcctacatcggcatgggcctgactgccgagaacgtggcccagaagtacggcatcagccgcgaagatcaggaccgattcgccctgagaagccatcagaaggccgccgccgcccgcgacgccggaaaattcaaggaagagatcgttcccgtgcccgttcgcaaagacaccttgcagggcacgaaactgaagtcggaaacgttcctctttgacaccgacgagctgattcgcgacgacgccaatctggaggacatggcgaaggtgcgcccggccttcaaacagaatggctcggtgagtgcggccaactccagccccttctcggacggtgccgccgccgtgctgctgatgagcggcgagaaggcgcaggaactcggcgtgaagccgctcgctaagtttctgggcttcgcggtggcgggtgtcgagcccgagttgatgggcatcggcccggtcaaggccattcccaaggtgctcgcgcagacgggcctgaccctcgacgatatcgacctgatcgagctgaatgaggcctttgccgcccagagcctcgccgtgatccgcgaactcggcctccccgaggagcggctgaatgtgaatggcggcgcaattgccctgggacatcccctcggctgctcgggcgccaagctcaccaccaccgccatctacgagctgcgccggcgcggcggcggcaaggccctcatcaccatgtgcatcggcgggggcatgggcgcggcgggtgtgatcgaggtctacccggaggagcagggcgagcaagccgcagactga

SEQ ID NO: 3012 - protein, 400 aa, Deinococcus geothermalis DSM 11300
MRDAVIVSAVRTPVGRGVKGTLANTRPDDLAALVLDEAVKRAGVDPAIVEDVYLGCAIPEAEQGLNIARLAALRAGMPDSVGGVTINRFCSSGLQTIAMAAAAIQTGQADVMLAGGVESMSMVPMTGHNPSPNPNLVDERPGAYIGMGLTAENVAQKYGISREDQDRFALRSHQKAAAARDAGKFKEEIVPVPVRKDTLQGTKLKSETFLFDTDELIRDDANLEDMAKVRPAFKQNGSVSAANSSPFSDGAAAVLLMSGEKAQELGVKPLAKFLGFAVAGVEPELMGIGPVKAIPKVLAQTGLTLDDIDLIELNEAFAAQSLAVIRELGLPEERLNVNGGAIALGHPLGCSGAKLTTTAIYELRRRGGGKALITMCIGGGMGAAGVIEVYPEEQGEQAAD

SEQ ID NO: 3013 - DNA, 1182 bp, Deinococcus geothermalis DSM 11300 [sequence omitted]

SEQ ID NO: 3014 - protein, 393 aa, Deinococcus geothermalis DSM 11300
MPEAVIVSTARTPIGKAYRGYLNDTHGSDIGAHVVRHAVERAGVHPAEVEDVLMGAGNPEGATGSNIARQIVLRAEFPVTVPGVTVNRFCSSGLQTIALAANSIRAGEGEVIVAGGLESISLTQNEHANKYRLRGEWLMEHKPDIYMPMLETAEVVAKRYGISREAQDEYAYQSQMRTAAAQQQGLFDDEIVPFTATMKVQNKETGEISSREVTLTRDEGNRPDTTPEGLAKLKPVIEGGVVTAGNASQLSDGAAAVVVMSDDLARERGLHPLGIFKGFAVAACEPDEMGIGPVFAVPKLLRRHGLTVDDIDLWELNEAFAVQAVYCRDKLGIDPEKYNVNGGSISIGHPYGMTGARLTGHILLEGKRRGAKHVVVTMCVGGGMGAAGLFEVL

SEQ ID NO: 3015 - DNA, 1179 bp, Ruegeria sp. TM1040
  CDS (1)..(1179): transl_table=11
atgaaacaagcagttattgtctcaacggcccggaccggcctcgccaaatcctatcgcggggcgttcaacgacacccatggcgcgcagatggcagggcatgccatcgaacatgccgttgcccgctccaaagtggatccggcgctgattgaggacgcatttatcggctgtggctaccccgagggctggaccggcggcaatatcgcccgccaagccgttgtccgcgcaggactgcccgtgacggtggcggcagcgacggtgaaccggttctgctcctcgggtcttcaggcgctggcgatggcgagccatgcagtcaccatggagggcgcctctgccgcaattgcgggcggggtcgaaagcatcagccagatgcccccctcgcgtccggcgcagcgccgcgacgcctggatcgaggccaacaaacccgatgtctacatgaccatgattgagacggcggacgtggtggccaagcgctacggcgtaagccgagaggcacaagacgaactcgcgcttcaaagccagatgcggactgctgctgcgcaggctgcgggcaaattcgacgatgagattgttccgattaccgtcacccagaaactcaccgacaaggaaaccaaggaagtctcttacaaagaggtggcctttgcgatggatgactgcaatcgcccgggcacgacgctcgaagggctggcgggactgaagccggtacgaggtgaagaacactttgtaaccgcggggaatgcctcgcaattgtctgatggtgctgccgcgctggtggtaatggatgctgatcttgctgcaaagcaagggctggagcccctgggtgcgctcaaggggtttgtgaccgccggctgcgagcccgatgagatggggattggccctgtctttgcggtgccgcgcctgctggagcgtcatggtctgaaggtctccgacatcgatctgtgggagctcaacgaagcctttgcctcacaggcgctctactgccgggatcggctcgagattgatccggagatctgcaacgtgaacggcgggtcgatttccattggccacccctttggcatgacaggcgcacggatgagcgggcacctcttgttggaaggcaaacggcgcggcgcaaagctcggcgttgtcaccatgtgcattggcggcggtcagggcgctgcggggctgttcgagatcttctga

SEQ ID NO: 3016 - protein, 392 aa, Ruegeria sp. TM1040
MKQAVIVSTARTGLAKSYRGAFNDTHGAQMAGHAIEHAVARSKVDPALIEDAFIGCGYPEGWTGGNIARQAVVRAGLPVTVAAATVNRFCSSGLQALAMASHAVTMEGASAAIAGGVESISQMPPSRPAQRRDAWIEANKPDVYMTMIETADVVAKRYGVSREAQDELALQSQMRTAAAQAAGKFDDEIVPITVTQKLTDKETKEVSYKEVAFAMDDCNRPGTTLEGLAGLKPVRGEEHFVTAGNASQLSDGAAALVVMDADLAAKQGLEPLGALKGFVTAGCEPDEMGIGPVFAVPRLLERHGLKVSDIDLWELNEAFASQALYCRDRLEIDPEICNVNGGSISIGHPFGMTGARMSGHLLLEGKRRGAKLGVVTMCIGGGQGAAGLFEIF

SEQ ID NO: 3017 - DNA, 1182 bp, Sphingopyxis alaskensis RB2256
  CDS (1)..(1182): transl_table=11
atgcgtgacgccgttatcgtttccaccgcccgcaccccgctgaccaaggcggcgcgcggctcgttcaacaacacgctcgccccgacgctgggttctttctcggtcaaggccgcggtcgagcgcgccggtctggagggcggcgagatcgacgacgtcgtgttcggcgccgcgatgcagcaggggtcgcagacgatgaacgtcgcgcggctgatcgcgctgcgttcgggcctgcccgtcaccgtccccggcatgtcgatcgaccgtcaatgctcgtcgggcctgatgacgatcgcgaccgccgcgaagcagatcatcgtcgaccgtcaggacatctgcgtcgccggcggcatcgaaagcatctcgaaagtcagcggcagcggcaaggtgttcatcgagaccgacgccgagctgatcgcgatgcacaaggacacttatatgccgatgatcggcaccgccgaggtcgtcgccaagcgttacaacatcggccgcgaatatcaggacgaatattcgctccagtcgcagcagcgcaccgccgccgcgcaggccgcgggcaaatatgacgacgagatcgtcgcctgcaaggcgacgatggcggtgatggacaaggaaaccaaggaagtcagctataaggaggtcgtggccgacaaggacgaatgcaaccgtcccgacacgacgctcgaagggctggcgagcctgaagccggtgatgggcgaaggccacacgatcaccgcgggcaacgccagccagctcgccgatggctcgtcggcgtgcgtcgtgatggaagccaaggttgccgaaaagcgcggcctccagccgctcggccgctatgtcggcatggcggtcgccggcaccgagcccgacgaaatgggcattggcccggtcttcgcgatccccaagctgctcgaacgcttcgaattgaagatggacgacatcggcctgtgggagctcaacgaagcctttgcggtgcaggtgctctattgccgcgacaagctcggtattccgaacgagctgctcaacgtcaacggcggctcgatctcgatcggccaccccttcggcatgaccggcgcgcgctgcgtcggccacgcgctgatcgaaggcaagcgccgcggcgtgaagtacgccgtcgtgacaatgtgcatcggcggcggccagggcgcggcaggcctgttcgaggtcttctga

SEQ ID NO: 3018 - protein, 393 aa, Sphingopyxis alaskensis RB2256
MRDAVIVSTARTPLTKAARGSFNNTLAPTLGSFSVKAAVERAGLEGGEIDDVVFGAAMQQGSQTMNVARLIALRSGLPVTVPGMSIDRQCSSGLMTIATAAKQIIVDRQDICVAGGIESISKVSGSGKVFIETDAELIAMHKDTYMPMIGTAEVVAKRYNIGREYQDEYSLQSQQRTAAAQAAGKYDDEIVACKATMAVMDKETKEVSYKEVVADKDECNRPDTTLEGLASLKPVMGEGHTITAGNASQLADGSSACVVMEAKVAEKRGLQPLGRYVGMAVAGTEPDEMGIGPVFAIPKLLERFELKMDDIGLWELNEAFAVQVLYCRDKLGIPNELLNVNGGSISIGHPFGMTGARCVGHALIEGKRRGVKYAVVTMCIGGGQGAAGLFEVF

SEQ ID NO: 3019 - DNA, 1200 bp, Myxococcus xanthus DK 1622
  CDS (1)..(1200): transl_table=11
gtgccccccgggcaaggagacatcaaaatggctggtcgagtcgtgattgccagcgcggtccgcacgcccttcacccgcgcgcacaagggagagttcaaggacacccggccggataccctggccgctgtcgccatcaaggaggccgttgcccaggtcccgggcctgaagccggaggacatcggtgacgtcgtcctgggctgtgccatgccggaggccgagcagggcatgaacgtggcccgcgtggccacgctgctggcgggcctgcccgtcacggtgcccgcgatgaccatcaaccggttctgttcctccggttcgcaggccatcgcccaggtggcccaggccatccaggcggggatgtacgacgtgggcatcggtggtggcaccgagtccatgacgatggtccccatgggcggcaacaaggcgagcgccaaccccgaggccatggagcgcctgccggagatctacacctccatgggcgccacggcggagaacatcgcgtcgcgctacggcgtgtcgcgtgaggactcggacaagttcgccgccgagagccagcgccgtgccgccaccgcgcgcgagcagggcaagttcaaggaggagatcgtccccgtcaccacgacgtactacgacgacgacggcgtggcgcagaacgtcaccgtcacggtggacaccatcctccgcccggagaccacgcaggagggcctggccaagctgcgcccggccttcaaccccaagggcgtggtgacggctggtaacgcgtcgccgctgacggacggcgccgccgccgcggtggtgatgagtgaggccaaggcgaaggagctgggcgtcaagccgctgggctacttcatcgacgccgcggtggcgggcgtgcccccggaaatcatgggcatcggcccggttcccgcggtccgcaagctgctggagaagaacaagctcaaggtcgaggacatcgacgtcttcgagctgaacgaggccttcggggcgcaggcgctgtactgcgtgcgcgagctgggcatccccgccgacaaggtgaaccccaacggcggcgccatcgccctgggtcacccgctgggcgtctctggcgcgcgcatggtggccaccatcctgcgcgagctgaagcgccgcaacggccgctacggcgtcgtctccatgtgcatcggcggcggcatgggcttcgccgccctcatcgaggcgcccaagtag

SEQ ID NO: 3020 - protein, 399 aa, Myxococcus xanthus DK 1622
MPPGQGDIKMAGRVVIASAVRTPFTRAHKGEFKDTRPDTLAAVAIKEAVAQVPGLKPEDIGDVVLGCAMPEAEQGMNVARVATLLAGLPVTVPAMTINRFCSSGSQAIAQVAQAIQAGMYDVGIGGGTESMTMVPMGGNKASANPEAMERLPEIYTSMGATAENIASRYGVSREDSDKFAAESQRRAATAREQGKFKEEIVPVTTTYYDDDGVAQNVTVTVDTILRPETTQEGLAKLRPAFNPKGVVTAGNASPLTDGAAAAVVMSEAKAKELGVKPLGYFIDAAVAGVPPEIMGIGPVPAVRKLLEKNKLKVEDIDVFELNEAFGAQALYCVRELGIPADKVNPNGGAIALGHPLGVSGARMVATILRELKRRNGRYGVVSMCIGGGMGFAALIEAPK

SEQ ID NO: 3021 - DNA, 1185 bp, Cytophaga hutchinsonii ATCC 33406
  CDS (1)..(1185): transl_table=11
atgaaatcgcaagaagtatatatagtagcagcttatagaagtgccgtaggtaaagcacctcgcggactgttccgtttttatcgtgcagatgatctgggtgcagatgttgttaagcatcttgtagcttcggttcctgcattggataaagaccgcattgatgatgtgatcgttggtaatgctactcccgaagcggaacaaggattgaacattggtagaatgatctccttaatgggattgaatacggtaaaagttccgggcatgacggtgaaccgttattgctcatccgggttggaaaccatcgcgattgcggatgcaaaaattcgtgcgggctacgccgattgtatcattgcaggcggtgtggaaaccatgagtccgatcccattcggcggctggaaaacggttccgaattatgaactgactaaatcacatgctgattactattggggtatgggcttaaccgctgaagctgtagctgcacaatacaatgtatccagagaagatcaggatttgttttcgtacaactcgcatcagaaagctgtagcggctattaaaaacggccacttgcaggatggtattgttccgatcacgatcaaagaaacgtatctggatgaaaaagaaaaaaagaaaataaaagaatatcaagtattggtggatgaaggtccgcgtgcagatacaagcatcgctgccttagcgaaacttcgtccggtatttgcgaacggcggttcggtaacagccggtaactcttcgcaaacatccgatggtgcagcgtttgtattgttgatgtctgagaaaatggtaaaagagttaaatctgaaaccaatcgcccgtttggtatcctacgctgttgctggtgtcgaaccacgcatcatgggtattggtccggtggaagccattccgaaggcattaaagcttgcagacttaaaacaggacgatatcaatctgatcgaattgaacgaagcatttgcagcgcaatcattggctgtgattcgcacgctggggctagacgaatccaagatcaacgtaaacggtggtgctattgcattgggtcatccgctgggttgcaccggcgcgaagttgtctgtacagatcttcaatgagctgaaacgtaccaaccagaaatacggcatggttaccatgtgtgtagggtcgggccagggtgcagcaggtatctttgagatgctttag

SEQ ID NO: 3022 - protein, 394 aa, Cytophaga hutchinsonii ATCC 33406
MKSQEVYIVAAYRSAVGKAPRGLFRFYRADDLGADVVKHLVASVPALDKDRIDDVIVGNATPEAEQGLNIGRMISLMGLNTVKVPGMTVNRYCSSGLETIAIADAKIRAGYADCIIAGGVETMSPIPFGGWKTVPNYELTKSHADYYWGMGLTAEAVAAQYNVSREDQDLFSYNSHQKAVAAIKNGHLQDGIVPITIKETYLDEKEKKKIKEYQVLVDEGPRADTSIAALAKLRPVFANGGSVTAGNSSQTSDGAAFVLLMSEKMVKELNLKPIARLVSYAVAGVEPRIMGIGPVEAIPKALKLADLKQDDINLIELNEAFAAQSLAVIRTLGLDESKINVNGGAIALGHPLGCTGAKLSVQIFNELKRTNQKYGMVTMCVGSGQGAAGIFEML

SEQ ID NO: 3023 - DNA, 1197 bp, Ralstonia eutropha H16
  CDS (1)..(1197): transl_table=11
atgaaacaactgcaagacgcatatatcgttgcggccacccgctcgccgatcggcaaggccccgaagggcgcgttcaagaacacgcgcccggacgacctgctggcaaccatcctgaaggctgccgtggcgcaggtgccggacctggacccgaagctgatcgaagacgccatcgtcggctgcgcgattcctgaggcgcagcagggcctgaacgtggcgcgcatcggtgcgctgctgtcgggcctgcccaataccgtgggcggcatcaccgtcaaccgcttctgcgcctcgggcgtgagcgcggtggcgatggctgccgaccgcatccgcgtgggcgagtccgacgtgatgatcgccgccggcgtggaatcgatgagcatggtgccgatgatgggcaactcgccgtcgatgtcgccggagatcttcacccgcgacgagaacgtgggcatcgcctacggcatgggcctgaccgccgagaaggtggcgcagcaatggcaggtcagccgcgaggaccaggatgcgttctcgctggcctcgcaccagaaggccatcgcggcgcagcaggccggcgagttcaaggacgagatcacgccgatcgagatcgtcgagcgcttcccggacctcgccagcggccaggtgaacgtgaagtcgcgcacgatctcgctggacgaaggcccgcgcccggagacctcgctggaaggcctgggcaagctgcgcccggtgtttgccaacaagggcagcgtcaccgccggcaacagctcgcagacctccgacggcgccggcgcgctgatcctggtctcggaaaagatcctcaagcagttcaacctggtgccgctggcgcgcttcgtctcgttcgcggtgcgcggcgtgccgcccgagatcatgggcatcggccccaaggaagcgattccggcggcgctgaaggctgcgggcctgacccaggaccagcttgactggatcgaactgaacgaggcctttgccgcgcagtcgctggcggtgatgcgcgacctgcagctggatccggccaaggtcaaccgcatgggcggcgcgattgcgctgggccacccgctcggtgccaccggtgcgatccgttcggccacggtggtgcacgcgctgcgccgtcacaacctgaagtacggcatggtgaccatgtgcgttggcacgggcatgggcgccgcaggtatcttcgagcgcgtctga

SEQ ID NO: 3024 - protein, 398 aa, Ralstonia eutropha H16
MKQLQDAYIVAATRSPIGKAPKGAFKNTRPDDLLATILKAAVAQVPDLDPKLIEDAIVGCAIPEAQQGLNVARIGALLSGLPNTVGGITVNRFCASGVSAVAMAADRIRVGESDVMIAAGVESMSMVPMMGNSPSMSPEIFTRDENVGIAYGMGLTAEKVAQQWQVSREDQDAFSLASHQKAIAAQQAGEFKDEITPIEIVERFPDLASGQVNVKSRTISLDEGPRPETSLEGLGKLRPVFANKGSVTAGNSSQTSDGAGALILVSEKILKQFNLVPLARFVSFAVRGVPPEIMGIGPKEAIPAALKAAGLTQDQLDWIELNEAFAAQSLAVMRDLQLDPAKVNRMGGAIALGHPLGATGAIRSATVVHALRRHNLKYGMVTMCVGTGMGAAGIFERV

SEQ ID NO: 3025 - DNA, 1191 bp, Alkalilimnicola ehrlichei MLHE-1
  CDS (1)..(1191): transl_table=11
atgactgaaaccgtatacatcgtcgccgcccagcgcaccccggtgggcaaggccccgcgcggcgccttccgccacacccgcccggacgatctgctggcccacgtgatccgcggcgccgtggaccggtgcccggggctggatccggccgagatcgccgacgtgatcgtcggctgcgccatgcccgagggcagccaggggctgaacgtggcccgcatcggtgccctgctggccgggctgccggaccgggtgcccggttacaccgtcaaccgcttttgcgcctcggggctgcaggcggtggccctggccgccgaccgcatccgtctgggcgaggccgacgtggtggtggccggtggcaccgagtccatgagccaagtgcccatgatgggccacaagccacagttcaaccccgccctgttccaggacgacccgcatcgggccatcgcctacggcatgggtatcaccgccgagaaggtggccgagcgctggggtgtggggcgtgaggcgcaggacgccttcgccctgcgcagccaccagcgggcggtggccgccaccgaggcggggcacttccgcgacgagatcctgccctacaccgtgcgcgagtcggtgctggacccgcaggggggcgcggtggccctgcaggagcgggtggtggacagcgatgaggggccgcggccggagaccagcgccgaggcgctggccaagctcaagccgtccttcgcggcccggggcagcgtcaccccggggaacagctcgcagatgagtgacggcgccggcgccgtggtgctgatgagcgagcgccgggtcagcgccctggggttgacgccgctggcgcgcttcgtcggcttctcggtggccggggtggcgccggagatcatgggcatcgggccggtggaggcggtgccgcgggtgttgcgacaggccggcctccgggcggccgacgtggactgggtggagctcaacgaggccttcgccgcccagagccttgcggtgatgcgcgacctggagctggacccggagcggatcaacccgcagggcggggccatcgcactgggccatccgctgggggccaccggtgccatccgtaccgccaccctggtgcacggactgcgccgcaccggcggccgctacggcctggtgaccatgtgcgtgggcaccggcatgggcgcggccggtctgtttgagcggatgtga

SEQ ID NO: 3026 - protein, 396 aa, Alkalilimnicola ehrlichei MLHE-1
MTETVYIVAAQRTPVGKAPRGAFRHTRPDDLLAHVIRGAVDRCPGLDPAEIADVIVGCAMPEGSQGLNVARIGALLAGLPDRVPGYTVNRFCASGLQAVALAADRIRLGEADVVVAGGTESMSQVPMMGHKPQFNPALFQDDPHRAIAYGMGITAEKVAERWGVGREAQDAFALRSHQRAVAATEAGHFRDEILPYTVRESVLDPQGGAVALQERVVDSDEGPRPETSAEALAKLKPSFAARGSVTPGNSSQMSDGAGAVVLMSERRVSALGLTPLARFVGFSVAGVAPEIMGIGPVEAVPRVLRQAGLRAADVDWVELNEAFAAQSLAVMRDLELDPERINPQGGAIALGHPLGATGAIRTATLVHGLRRTGGRYGLVTMCVGTGMGAAGLFERM

SEQ ID NO: 3027 - DNA, 1203 bp, Nitrosomonas eutropha C91
  CDS (1)..(1203): transl_table=11
atgaccaggcaagtgcaggaggcttatatcgtagccgctacacgcacaccggtaggtaaagcgccacggggcatgttcaaggatgctcggccggacgacatgttagtgcatgtgctgcaggtagtgctgaaacagtgtgcagggctggatccggcagcggttgaagatgttatcgtcggttgtgccatgccggaagcggaacaggggattaatgtggcgcgcgtagcactgctgctggctggtctgccggttagcgtgccgggtgtaacaattaatcggttttgcgcttccggcctgcaggcggttgccatggcagccgaccggattcggttaggtgaagcggatgtcatcattgctggcggcaccgaaagcatgagtatggtgccgatgatgggtaacaaagtggcgatgaacccggctttatttaagccagagagtgaacaggtagccattgcttatggcatggggattactgccgaaaaggtggcggaacaatggaaggtcagccgtgaggcgcaggatgaatttgcactggaaagccatcaccgtgcgattcgcgccatcgaacaaggggaattcagggatgaaatttctccttatcccgttcatgaagaccggccggacctgaatacgcacgaaatccacgatttctccgttatcagggatactgacgagggaccccgggcgaatagcagcccggaggcactcgcccggttacgtccggtgtttgcagcacgaggatctgtcacggcgggtaacagctcgcaaatgtcggatggagcaggtgcggtggtggtggcgagcgaggcagctttgcagcgctttaatctgacaccgatcgggcgatttattggttatgcggtggctggtgtgccgccggaaatcatggggataggacccgtcgaggcgattcctaaagtgctgaaacaaaccggcatcaaacaggatgaacttgactggattgagttgaacgaggcattcgctgcgcaaagtctggctgttatccatgatctcggattggatcgggcaaaagttaatccactgggtggggccattgcactgggtcatccactgggtgcaaccggtgcgattcgcgtggcaacattactgagcggattacgtcgtcacaaactcaaatatggcatggtcaccatgtgcattggcggcggaatgggagcggcaggcgtatttgaagcgctataa

SEQ ID NO: 3028 - protein, 400 aa, Nitrosomonas eutropha C91
MTRQVQEAYIVAATRTPVGKAPRGMFKDARPDDMLVHVLQVVLKQCAGLDPAAVEDVIVGCAMPEAEQGINVARVALLLAGLPVSVPGVTINRFCASGLQAVAMAADRIRLGEADVIIAGGTESMSMVPMMGNKVAMNPALFKPESEQVAIAYGMGITAEKVAEQWKVSREAQDEFALESHHRAIRAIEQGEFRDEISPYPVHEDRPDLNTHEIHDFSVIRDTDEGPRANSSPEALARLRPVFAARGSVTAGNSSQMSDGAGAVVVASEAALQRFNLTPIGRFIGYAVAGVPPEIMGIGPVEAIPKVLKQTGIKQDELDWIELNEAFAAQSLAVIHDLGLDRAKVNPLGGAIALGHPLGATGAIRVATLLSGLRRHKLKYGMVTMCIGGGMGAAGVFEAL

SEQ ID NO: 3029 - DNA, 1182 bp, Shewanella frigidimarina NCIMB 400
  CDS (1)..(1182): transl_table=11
atgagagaagccgttattgtatctgtagcaagaaccccgatcggtaaagcataccgtggcgcatttaacgatttatctgcaccgacattagccgcagttgctgttaatgcagccgttgaacgtgcgggtattgacccgaatgaaattgaagattgtatttttggtgctgcgttaactcaaggtaaccaggggatgaactttggtcgtcaagtggccatggcggcaaaactgccagtgtctgtgcctggtatgacggtagatcgtcaatgttcatcaggattaatgtctattgctatcgcggctaatcatattgtttgtgatggcgccaacgtggtagttgctggcggttgtgactcaatcagcttggttcaaaacgataaaatgaacatgcaccgagccgtcgacccaagtgttaaagcgtatcgtccagcgatttatatgccgatgcttgataccgccgaagtggttgctaatcgttattgcatctcgcgtgaagcacaagatgcttatgcattaatctcgcaacaacgcactgctgatgcacaagctgcaggtaaatttgatgacgaaattgtgcctgttacgtgtacaaaattggtgatggataaagccagcagagatatcactaaagaacaagtcaccttaactcaagatgaaggtaatcgtccttcaaccaatattgaaggcttagcgggtttaaaagcggtaaaagataacggctcaattactggcggtaacgcatcgcaactgtctgacggtgctgccgctgttgtggtaatggaacgaaaactcgctgagcaacgcggtcttaagccgttaggtgtttaccgaggcatggtggttgtaggttgtgagccagatgaaatgggcataggtccaatttttgccattcctaagttgcttgaacgtcatagtttgaatattgatgacattggtttgtgggaaatcaatgaagcgtttgcggttcaggtcatttactgtgcagaaaaattgggcattccatatgatcgtttaaacgtcgacggcggcgcaatttctattggtcatccttatggcatgagcggtactcgtatggtgatgcacgcgttaattgaaggtaaacgtcgtggtgttaaatacgtggtgatcagtatgtgtattggtggtggtcaaggcgctgcaggtttatttgaagtgttgtaa

SEQ ID NO: 3030 - protein, 393 aa, Shewanella frigidimarina NCIMB 400
MREAVIVSVARTPIGKAYRGAFNDLSAPTLAAVAVNAAVERAGIDPNEIEDCIFGAALTQGNQGMNFGRQVAMAAKLPVSVPGMTVDRQCSSGLMSIAIAANHIVCDGANVVVAGGCDSISLVQNDKMNMHRAVDPSVKAYRPAIYMPMLDTAEVVANRYCISREAQDAYALISQQRTADAQAAGKFDDEIVPVTCTKLVMDKASRDITKEQVTLTQDEGNRPSTNIEGLAGLKAVKDNGSITGGNASQLSDGAAAVVVMERKLAEQRGLKPLGVYRGMVVVGCEPDEMGIGPIFAIPKLLERHSLNIDDIGLWEINEAFAVQVIYCAEKLGIPYDRLNVDGGAISIGHPYGMSGTRMVMHALIEGKRRGVKYVVISMCIGGGQGAAGLFEVL

SEQ ID NO: 3031 - DNA, 1173 bp, Maricaulis maris MCS10
  CDS (1)..(1173): transl_table=11
atgcgtgatgctgtcatcgtctccaccgctcgcaccccgattggcaaggcctatcgcggcgccttcaacgccacgccttcgccgaccttgtgcggccacgccatcgccgcggcggttgagcgctccaaggtcgacccggctgaaatccaggacgtgatcatcggcgccgccctgcaacagggcgtgcagcacacgatcggccgcaccgccgctctgcgcgccggcctccccgtcacggtcgccggccagtcgatggaccgtcagtgctcgtccggccttatgacgatcgccaccgcggcgaaacaggtcattgttgaccgtatggacgtggtcgtcgccggcggcgtcgagtcgatctccatggtccagaccaaggaaatgcgcgtccagccagatcccgaactcctggccatgcacaaggacatctacatgccgatgctgcagacggccgagatcgtcgccgaccgctatggcatctcgcgcgagcgcatggacgagtacggtctgcaatcacagcagcgcacagccgccgcacaggacgcgggcaagttcgacgatgaaatcgtgccgatgaagtcgaccaagatcgtggtcgacaaggcaaccggcgaaacctcccaacaggacgtcttcctcgaaaaggacgagggcaaccgcccgggcaccgacctggctggcctgcagggtctgaagaccgtcatcgagggcggcaccatcacagccggcaatgcctcacaactctccgatggcgcctcggcctgcgtggtcatggaagccgaactcgccgccaagcgcggtctggcacctctgggtcgttatatgggcatggccgtcgccggcaccgagccggacgagatgggtatcggcccggtcgtcgccgtcccgaaactgcttgagcgcttcggcctcaaggcggatgatatcggcctgtgggaactcaatgaggccttcgccgtccaggtgctctactgcgccgacaagctgggcattccggccgacaagctgaacgtcaatggcggcgccatctcgattggccacccctacggcatgtccggcgcgcgcatggtcggccacgccctgatcgagggcaaacgccagggcgccaaatacgtcgtcgtgaccatgtgtgtcggcggcggcatgggcgcggccggactgttcgaagtgctgtag

SEQ ID NO: 3032 - protein, 390 aa, Maricaulis maris MCS10
MRDAVIVSTARTPIGKAYRGAFNATPSPTLCGHAIAAAVERSKVDPAEIQDVIIGAALQQGVQHTIGRTAALRAGLPVTVAGQSMDRQCSSGLMTIATAAKQVIVDRMDVVVAGGVESISMVQTKEMRVQPDPELLAMHKDIYMPMLQTAEIVADRYGISRERMDEYGLQSQQRTAAAQDAGKFDDEIVPMKSTKIVVDKATGETSQQDVFLEKDEGNRPGTDLAGLQGLKTVIEGGTITAGNASQLSDGASACVVMEAELAAKRGLAPLGRYMGMAVAGTEPDEMGIGPVVAVPKLLERFGLKADDIGLWELNEAFAVQVLYCADKLGIPADKLNVNGGAISIGHPYGMSGARMVGHALIEGKRQGAKYVVVTMCVGGGMGAAGLFEVL

SEQ ID NO: 3033 - DNA, 1209 bp, Hyphomonas neptunium ATCC 15444
  CDS (1)..(1209): transl_table=11
atgcgtgaagccgtaatcgtttcaacagcccgtactgccctgaccaaagccggtcgcggcgccctcaatgacacccatggcatcaccatggctggccacgccatcaagggcgcgctcgagcgcgccggcgttgaagccgctgcggttgaagacgtgttcctcggctgcgccgcgccggaaggcgctaccggccacaacgttgcccgtaacgccgcgctcgccgctggctgcccgtccagcacgtctggcgccaccatcaaccgcttctgttcctcgggcctgcaggccatcgcaaacgccgcgcacaccgtgatccatgaaggcgcagcggtcaccgttggcggcggcgtggagagcatcagcctcgttcagggttcgggccagtccaaccgctacaagtatttcgagccggaactggccaagacctggccggccatctggatgacgatgatcgaaacggccgagatcgttgccgagcgttacaatgtcagccgcgaacaccaggaccagtattctgccgagagccagcgccgcacggccgagttccagcagaaaggctacatggcacaggaaatcgtgccgatgaaaaccaagatgcgcctcgtcaacaaagagaccaaggaagaaaccttccaggacgtgatcgctgaccgtgacgactgtaaccgtcccggcacgacctatgagagcctggctggccttccgccggtgttctccggtggccaggtcatcaagcagggcaagttcgtcactgccggtaacgcctcgcagctctccgatggcgccgcggctgtggtcgtcatggaagccaaggaagcggcaaagcgcggcctgaagccgctcggccgttttgctggtttcaacgttgccggttgcgatcctgacgaaatgggcatcggcccggtcttcgcagtgccgcgtctgctggagcgtcatggcctgaaggtcgacgatatcgacctctgggaactgaacgaagcgttcgcctcgcagtgcctctactcgcgcgatcgcctcggcattgatcctgagaagtacaacgtgaacggcggctcgatctcgatcggccaccccttcggcatgaccggcgcacgctgcaccggatccatcctgctcgaaggtcagcgccgcggcgcaaaatggggcgttgtcaccatgtgtatcggtggcggtatgggcgcagccggcctgttcgaaatctacagctga

SEQ ID NO: 3034 - protein, 402 aa, Hyphomonas neptunium ATCC 15444
MREAVIVSTARTALTKAGRGALNDTHGITMAGHAIKGALERAGVEAAAVEDVFLGCAAPEGATGHNVARNAALAAGCPSSTSGATINRFCSSGLQAIANAAHTVIHEGAAVTVGGGVESISLVQGSGQSNRYKYFEPELAKTWPAIWMTMIETAEIVAERYNVSREHQDQYSAESQRRTAEFQQKGYMAQEIVPMKTKMRLVNKETKEETFQDVIADRDDCNRPGTTYESLAGLPPVFSGGQVIKQGKFVTAGNASQLSDGAAAVVVMEAKEAAKRGLKPLGRFAGFNVAGCDPDEMGIGPVFAVPRLLERHGLKVDDIDLWELNEAFASQCLYSRDRLGIDPEKYNVNGGSISIGHPFGMTGARCTGSILLEGQRRGAKWGVVTMCIGGGMGAAGLFEIYS

SEQ ID NO: 3035 - DNA, 1161 bp, Solibacter usitatus Ellin6076
  CDS (1)..(1161): transl_table=11
atgcgagacgctgttattgtcgattgcctccgaacccccgtcggtaaagccccccgcggcgccctgcgcaatacccgcccggacgacctcgccgccatcgccatccgggccgtgctcgatcgctatccggcggcgctcgacctggtggacgacgtcatcctcggctgcgccatgcccgaaggcgaggccggcgccaacatggcgcgccaggccgcgctccgtgccggtctggccgattccgttccggcgatgaccatcaatcgcttctgcagttccggtctccaggccatcgccctcgccgccgaacgcatccgctcgggcggcgccgatgtcatcattgccggcggcgccgaatccatgtcgatgattccctccggcggacgcaagcccgcgcccaacccctggttcgtcgatcactggcccgaggtctacatgaccatgggactcaccgccgagcgcgtgcagcgcaaatacaacgtctcccgcgaagatgccgacgccttcgcgctgcgcagccaccagaacgccctccgcgcccagcaggacgggaagttcgacgatgaactcgtccccgtcgaaacccagaacatcatgccgggaattgtggagcgcgccgtcttcagccgcgacgaaggtccgcgcgccgatacctcgttcgaagctctcgccaaactgaaacccgtcttccacgccaatggctccgtcactgccggcaactcctcgcagaccagcgacggcgccgccgccgcgctcgtgatgtcggccgccaaggcccgccagttcggtttcgctcccaaggcgcgcttcgtaagctacgcgaccgccggagtgccgcccgagatcatgggcatcggccccgtggtcgcgatccccaaagcgctcgccatggccggcctcaagctgaacgatatcggcgtcatcgagctcaacgaagccttcgccgtgcaagccctcgccgtcatccgcaaggccggcatcgaccccgaccgcgtcaatgtcaatggcggcgccatcgcgctcggccacccccttggttgcaccggggcgaaactcaccgccaccatccttcgcgagatgcagcgcggccaaatccgctacggcatggtcactatgtgcgtcgggggcggccagggtgccgccggtatcttcgagctcatgtag

SEQ ID NO: 3036 - protein, 386 aa, Solibacter usitatus Ellin6076
MRDAVIVDCLRTPVGKAPRGALRNTRPDDLAAIAIRAVLDRYPAALDLVDDVILGCAMPEGEAGANMARQAALRAGLADSVPAMTINRFCSSGLQAIALAAERIRSGGADVIIAGGAESMSMIPSGGRKPAPNPWFVDHWPEVYMTMGLTAERVQRKYNVSREDADAFALRSHQNALRAQQDGKFDDELVPVETQNIMPGIVERAVFSRDEGPRADTSFEALAKLKPVFHANGSVTAGNSSQTSDGAAAALVMSAAKARQFGFAPKARFVSYATAGVPPEIMGIGPVVAIPKALAMAGLKLNDIGVIELNEAFAVQALAVIRKAGIDPDRVNVNGGAIALGHPLGCTGAKLTATILREMQRGQIRYGMVTMCVGGGQGAAGIFELM

SEQ ID NO: 3037 - DNA, 1209 bp, Pyrobaculum islandicum DSM 4184
  CDS (1)..(1209): transl_table=11
atgtctgcagtaggtaaaagacttgaaaatgtctatatagtggcgtttgcaagaactgcctttacgagattttctaggaaggagcctcagaaagacgacttttgggacgtaagaccggaggagttggcggcggtgcctgtgagggcgattttagaaaaaactggcgtcaagccggaagatgtagaagatctcttgacagggacagctctgccggtaggcgagcagtggctctacggcggccgccatgttgttttcgccgccaaactgccttacacaattccggcggcgcatatagatagacagtgcgcctcttcaattactacagtggcttttggagctatggaagtggcaacgggtatggccgacgtggtaatagctggcggcgtcgaaaaaatgtctaagacccctatgtatgaaaacccacatattgagataaatcctaaatttcttacagacgaggagtatgtaagactatacaatctgccaattggctacgtcatggggctcaccgccgagagactagccgaggtctcgggcataaagagggaggagatggacatgtggtctcttagaagccacaggagggcggcagaggcgtatgaaaagggctatttcaaagacgagatagtgcccgtcgcggtggaaaaagacggccagaggaaagttgtagatagagaccagtctgttaggccagacacaagcctcgaggcgcttgccaaactcccgcctgtgtttaagccagatggcgtaataactgcgggcaactcctcgcctttaaactccggcgctgcatatataatgcttgtctctggcgaagttgtgaaaaaacacggccttcaacctctggctaagattagggctgtggctttcgccggagtgccgcctgaggttatgggcatgggccccgtgcctgcgtcgaaaaaagcgcttgagaaggccggacttacggtcaaacagatagggaggtgggagataaatgaggcttttgccgtagttacgctatatgcaattaaacaactcggcctagaccccgagattgttaacacaagaggcggcgccatcgccataggccacccgctgggggccacaggcgcgaggataataggcacgttggctagacagatgcagatagacggcgttgactacggcgtggctactctttgcgtcggcggtgggcaaggcgccgccgtagttttagaaagagtataa

SEQ ID NO: 3038 - protein, 402 aa, Pyrobaculum islandicum DSM 4184
MSAVGKRLENVYIVAFARTAFTRFSRKEPQKDDFWDVRPEELAAVPVRAILEKTGVKPEDVEDLLTGTALPVGEQWLYGGRHVVFAAKLPYTIPAAHIDRQCASSITTVAFGAMEVATGMADVVIAGGVEKMSKTPMYENPHIEINPKFLTDEEYVRLYNLPIGYVMGLTAERLAEVSGIKREEMDMWSLRSHRRAAEAYEKGYFKDEIVPVAVEKDGQRKVVDRDQSVRPDTSLEALAKLPPVFKPDGVITAGNSSPLNSGAAYIMLVSGEVVKKHGLQPLAKIRAVAFAGVPPEVMGMGPVPASKKALEKAGLTVKQIGRWEINEAFAVVTLYAIKQLGLDPEIVNTRGGAIAIGHPLGATGARIIGTLARQMQIDGVDYGVATLCVGGGQGAAVVLERV

SEQ ID NO: 3039 - DNA, 1233 bp, Azoarcus sp. BH72
  CDS (1)..(1233): transl_table=11
atgcgtggcaccgaaagacacgaggagaacagacacatgagcacacagatccaggacgcctacatcgttgccgcggtgcgcaccccggtggccaagcgcaatggcgctttccgccatgtccgcccggacgacatgctggcgcatgtgctgcgcgcggtcgtggcccaggtgccggcgctcgacgccggcgagatcggcgacgtgatcaccggctgcgcgatgccggaagccgagcagggcatgaatgtggcgcgcatcgggctgctgctggccgggctgccggagcgggtgccgggcgtcaccctcaaccgcttctgcgcctccagcctgcaggcggtggccgatgccgccaaccgcatccgcctcggcgaagccgacgtgatgatcgccgccggcaccgagagcatgagcgcgatgccgcagatcatgggcaacaaggtcagcctcaatcccgagatcttcgcccgccaggaaaacatcgacatcgcctacggcatggggctcaccgccgagaaagtggccgaagagtggaaagtcagccgcgccgaccaggacgccttcgcgctgcagtcgcaccagcgcgccagcgccgcgatcgccgatggcagcttcggcgacgagatcgcgccctacaccgtgcgcagccacctgccgggcgaaggcggcaccgtgcggattgccgagcgcatcgtcgacaccgatgaagggccgcgcgccgacgccacgctggaagcgctcgccaggctcaagccggtgttcgccgcgcgcggctcggtcaccgccggcaacagctcgcagatgtccgacggcgccggtgcggtgctgctgatgagcgagaccgcgctgcaacgctacggcgtgacgccgcttgcgcgctttcgcagctatgcggtggcgggcgtgccgccgcgggtgatggggatcgggccggtcgaagcgatcccgcgcgcgctgcggctggcgggcctcgggctggatgcgctcgaccgcatcgaactcaacgaggccttcgccgcgcaggcgctggccgtcatccgcacgctcgggctcgacccggcgcgggtcaatccgcagggcggcgcgattgcgctcggccatccgctcggcgccaccggcgccatccgcaccgccacgctgatgcgcgcgatgcggcagggcggcgtgcgccacgggatgatcaccatgtgcgtcggcaccggcatgggcgcggccgcgatcttcgaacgcgtatag

SEQ ID NO: 3040 - protein, 410 aa, Azoarcus sp. BH72
MRGTERHEENRHMSTQIQDAYIVAAVRTPVAKRNGAFRHVRPDDMLAHVLRAVVAQVPALDAGEIGDVITGCAMPEAEQGMNVARIGLLLAGLPERVPGVTLNRFCASSLQAVADAANRIRLGEADVMIAAGTESMSAMPQIMGNKVSLNPEIFARQENIDIAYGMGLTAEKVAEEWKVSRADQDAFALQSHQRASAAIADGSFGDEIAPYTVRSHLPGEGGTVRIAERIVDTDEGPRADATLEALARLKPVFAARGSVTAGNSSQMSDGAGAVLLMSETALQRYGVTPLARFRSYAVAGVPPRVMGIGPVEAIPRALRLAGLGLDALDRIELNEAFAAQALAVIRTLGLDPARVNPQGGAIALGHPLGATGAIRTATLMRAMRQGGVRHGMITMCVGTGMGAAAIFERV

(The sequence listing continues in the following parts.)
